United States Patent Application Publication US 2024/0327476 A1 - sequence listing, part 11

SEQ ID NO: 11581 - DNA, 1751 bp, Homo sapiens
  source 1..1751: mol_type = unassigned DNA
tgtctccctaacaggaagcaggctgtgagccaaggggaaggcagaggacagaaatgaatgtgtttccaggctttcctggtggtttatggcattctccaaactcctatgcaagggctattcctgaccaagaagatctaaagagaacgtctctgaaatcaagtccggatgaagaattaagagaaaaaaagtgaatatggtttttgctcacagaatggataacagcaagccacatttgattattcctacacttctggtgcccctccaaaaccgcagctgcactgaaacagccacacctctgccaagccaatacctgatggaattaagtgaggagcacagttggatgagcaaccaaacagaccttcactatgtgctgaaacccggggaagtggccacagccagcatcttctttgggattctgtggttgttttctatcttcggcaattccctggtttgtttggtcatccataggagtaggaggactcagtctaccaccaactactttgtggtctccatggcatgtgctgaccttctcatcagcgttgccagcacgcctttcgtcctgctccagttcaccactggaaggtggacgctgggtagtgcaacgtgcaaggttgtgcgatattttcaatatctcactccaggtgtccagatctacgttctcctctccatctgcatagaccggttctacaccatcgtctatcctctgagcttcaaggtgtccagagaaaaagccaagaaaatgattgcggcatcgtgggtctttgatgcaggctttgtgacccctgtgctctttttctatggctccaactgggacagtcattgtaactatttcctcccctcctcttgggaaggcactgcctacactgtcatccacttcttggtgggctttgtgattccatctgtcctcataattttattttaccaaaaggtcataaaatatatttggagaataggcacagatggccgaacggtgaggaggacaatgaacattgtccctcggacaaaagtgaaaactatcaagatgttcctcattttaaatctgttgtttttgctctcctggctgccttttcatgtagctcagctatggcacccccatgaacaagactataagaaaagttcccttgttttcacagctatcacatggatatcctttagttcttcagcctctaaacctactctgtattcaatttataatgccaattttcggagagggatgaaagagactttttgcatgtcctctatgaaatgttaccgaagcaatgcctatactatcacaacaagttcaaggatggccaaaaaaaactacgttggcatttcagaaatcccttccatggccaaaactattaccaaagactcgatctatgactcatttgacagagaagccaaggaaaaaaagcttgcttggcccattaactcaaatccaccaaatacttttgtctaagttctcattctttcaattgttatgcaccagagattaaaaagctttaactataaaaacagaagctatttacatatttgttttcactcaactttccaagggaaatgttttattttgtaaaatgcattcatttgtttactgtagtttttgtgggttttattttacttgctttttatgttttaggaaaagcgttcactttgaactttagccaacagtccttttactattaatatattagttacatgcataaaaaagaaaatgctttcttactatttactgttggttcaaaaacataaacctaagccatacacac

SEQ ID NO: 11582 - DNA, 553 bp, Homo sapiens
  source 1..553: mol_type = unassigned DNA
agcgcgcaaaagtttcaaaactttccgcctagtgagaggcggtccgatttggcccttggggagtgtccgtcgcgttgatctgatggattcacgtacacaacaccacattctatgagattttgcaggcaaaagtccacaagctcgatatatgggacacctgcaccggcattggatttggccccgcaacatcttaaaggaagcaggctgtgagccaaggggaaggcagaggacagaaatgaatgtgtttccaggctttcctggtggtttatggcattctccaaactcctatgcaagggctattcctgaccaagaagatctaaagagaacgtctctgaaatcaagtccggatgaagaattaagagaaaaaaagtgaatatggtttttgctcacagaatggataacagcaagccacatttgattattcctacacttctggtgcccctccaaaaccgcagctgcactgaaacagccacacctctgccaagccaatacctgatggaattaagtgaggagcacagttggatgagcaaccaaacagaccttcactatgtgc

SEQ ID NO: 11583 - DNA, 1515 bp, Homo sapiens
  source 1..1515: mol_type = unassigned DNA
aggtccgggctgcatgcagagctgagagctgaggactcccatctccagcctgcccgggtgaagcgcggcctggggtgtgctggctgccgtcatgccctctgtgtctccagcggggccctcggccggggcagtccccaatgccaccgcagtgacaacagtgcggaccaatgccagcgggctggaggtgcccctgttccacctgtttgcccggctggacgaggagctgcatggcaccttcccaggcctgtggctggcgctgatggcggtgcacggagccatcttcctggcagggctggtgctcaacgggctggcgctgtacgtcttctgctgccgcacccgggccaagacaccctcagtcatctacaccatcaacctggtggtgaccgatctactggtagggctgtccctgcccacgcgcttcgctgtgtactacggcgccaggggctgcctgcgctgtgccttcccgcacgtcctcggttacttcctcaacatgcactgctccatcctcttcctcacctgcatctgcgtggaccgctacctggccatcgtgcggcccgaaggctcccgccgctgccgccagcctgcctgtgccagggccgtgtgcgccttcgtgtggctggccgccggtgccgtcaccctgtcggtgctgggcgtgacaggcagccggccctgctgccgtgtctttgcgctgactgtcctggagttcctgctgcccctgctggtcatcagcgtgtttaccggccgcatcatgtgtgcactgtcgcggccgggtctgctccaccagggtcgccagcgccgcgtgcgggccatgcagctcctgctcacggtgctcatcatctttctcgtctgcttcacgcccttccacgcccgccaagtggccgtggcgctgtggcccgacatgccacaccacacgagcctcgtggtctaccacgtggccgtgaccctcagcagcctcaacagctgcatggaccccatcgtctactgcttcgtcaccagtggcttccaggccaccgtccgaggcctcttcggccagcacggagagcgtgagcccagcagcggtgacgtggtcagcatgcacaggagctccaagggctcaggccgtcatcacatcctcagtgccggccctcacgccctcacccaggccctggctaatgggcccgaggcttagtcagcagggctctgccaggggccgaaggtcaggactcatctgggcatgccagcgtggacacccaccatgccaggggtggcaatcggttccatctcgattgattggtgatggctacccagagcaccgcattgagcgtctaaggccactgtgctgtggttgattagcaatgtctgccactggctccgatgggatgtggtggcctgaatgccggtgatttgctgttcctggggtatagcacgtccactgaaaactcacaggggtagccgggagctgctcctcactttggccagtttgtctccagaaggagttcctcagaaaaaagggcacagtggattccattgattaga

SEQ ID NO: 11584 - DNA, 1170 bp, Homo sapiens
  source 1..1170: mol_type = unassigned DNA
aagcggcagcatgaagtgacagatcactcctgagctcaagatgaactccaccttggatggtaatcagagcagccaccctttttgcctcttggcatttggctatttggaaactgtcaatttttgccttttggaagtattgattattgtctttctaactgtattgattatttctggcaacatcattgtgatttttgtatttcactgtgcacctttgttgaaccatcacactacaagttattttatccagactatggcatatgctgacctttttgttggggtgagctgcgtggtcccttctttatcactcctccatcacccccttccagtagaggagtccttgacttgccagatatttggttttgtagtatcagttctgaagagcgtctccatggcttctctggcctgtatcagcattgatagatacattgccattactaaacctttaacctataatactctggttacaccctggagactacgcctgtgtattttcctgatttggctatactcgaccctggtcttcctgccttcctttttccactggggcaaacctggatatcatggagatgtgtttcagtggtgtgcggagtcctggcacaccgactcctacttcaccctgttcatcgtgatgatgttatatgccccagcagcccttattgtctgcttcacctatttcaacatcttccgcatctgccaacagcacacaaaggatatcagcgaaaggcaagcccgcttcagcagccagagtggggagactggggaagtgcaggcctgtcctgataagcgctatgccatggtcctgtttcgaatcactagtgtattttacatcctctggttgccatatatcatctacttcttgttggaaagctccactggccacagcaaccgcttcgcatccttcttgaccacctggcttgctattagtaacagtttctgcaactgtgtaatttatagtctctccaacagtgtattccaaagaggactaaagcgcctctcaggggctatgtgtacttcttgtgcaagtcagactacagccaacgacccttacacagttagaagcaaaggccctcttaatggatgtcatatctgaagtggctcagttacggggttcccgtgtgtgtgtgtgtgtgtgtgtgtgtgtgtgtgtgtgtgtgtgtattttatctctaa

SEQ ID NO: 11585 - DNA, 753 bp, Homo sapiens
  source 1..753: mol_type = unassigned DNA
atgaactccaccttggatggtaatcagagcagccaccctttttgcctcttggcatttggctatttggaaactgtcaatttttgccttttggaagtattgattattgtctttctaactgtattgattatttctggcaacatcattgtgatttttgtatttcactgtgcacctttgttgaaccatcacactacaagttattttatccagactatggcatatgctgacctttttgttggggtgagctgcgtggtcccttctttatcactcctccatcacccccttccagtagaggagtccttgacttgccagatatttggttttgtagtatcagttctgaagagcgtctccatggcttctctggcctgtatcagcattgatagatacattgccattactaaacctttaacctataatactctggttacaccctggagactacgcctgtgtattttcctgatttggctatactcgaccctggtcttcctgccttcctttttccactggggcaaacctggatatcatggagatgtgtttcagtggtgtgcggagtcctggcacaccgactcctacttcaccctgttcatcgtgatgatgttatatgccccagcagcccttattgtctgcttcacctatttcaacatcttccgcatctgccaacagcacacaaaggatatcagcgaaaggcaagcccgcttcagcagccagagtggggagactggggaagtgcaggcctgtcctgtttcgaatcactag

SEQ ID NO: 11586 - DNA, 2936 bp, Homo sapiens
  source 1..2936: mol_type = unassigned DNA
attctgcaaaagctgcccgaacaggctttcctctgaaaagcagtgccgttcctttttagaaagactgaatctaaatgttgtctctggagacaagaagccttcagtatgttaaattactttcattatgtattttcagatgcttattgattccacagtaggaagagtgagagactgcagcagcctctaagcagcactacatgttccatacattagcagtactgctgaaacaatggcacactacagacacatattttcattaaggtcattttcgaagagatgtttatgaccctcttcccccagtcctctactaacaagtgaacaaaatgaatcaatccaaactggaaatgcttcaactacatcaagaatttatcaaatctttagcagagggccaatagcagctaattcagtatttacaactgacaatatgaagaatgcaattgactgagcatctccctagctgtctgaactacgaactgcaagatgttcttgtaacacgactttaagacattaaggagttaaaaccagggaataggtctacattactgatggaatataaaaaatcaactgtatcctaagaagatgctacataaaataaccacaaaaagaaaaacaatataactgtaaaagcctgaaaagaatttttaaaaggggaagtttatactttcatataccagaattgtggaagttactgattctggaagacataatgaaacatgaatttccaaaaagaaaagaaaatactttatcagcacacaaaaggaagatttaggaagtgttttctgcactaaatattcagatattcatatcaattggtatgactaatggatttttctatctgacttttatgaccaattatgtatcctcttctaatgaaaacaaacaaaattaaacagcagatggtttttatcaaaaggacatggcctggatttataatataaagcaagttatgtgatcaagaaatcatttcaaaatagtgagcactgctattaaaaacagatttacaatggtaacaaaaggatgtctaaatatattttagaagctacaaacgttatgtttccttttttgttttcacatattctggaaaataaagaaatattatcatgtactccatcaaagggaaacataattcctatcatctgaggaaattcctcttggccgtgactttttaaagcaaaacaaatacaaatattatgtactgttctttagaaatccatcagccaactaaatctcataatgcatgcagttgaagtattggagagaaaacgaaagaattcctacaagacatgaaataaaacacagctacttcactgttgtcagggaaaaaaaccaactgctccaaaagaatgtgtttttctcccattctggaaatcaacatgcagtctgaatctaacattacagtgcgagatgacattgatgacatcaacaccaatatgtaccaaccactatcatatccgttaagctttcaagtgtctctcaccggatttcttatgttagaaattgtgttgggacttggcagcaacctcactgtattggtactttactgcatgaaatccaacttaatcaactctgtcagtaacattattacaatgaatcttcatgtacttgatgtaataatttgtgtgggatgtattcctctaactatagttatccttctgctttcactggagagtaacactgctctcatttgctgtttccatgaggcttgtgtatcttttgcaagtgtctcaacagcaatcaacgtttttgctatcactttggacagatatgacatctctgtaaaacctgcaaaccgaattctgacaatgggcagagctgtaatgttaatgatatccatttggattttttcttttttctctttcctgattccttttattgaggtaaattttttcagtcttcaaagtggaaatacctgggaaaacaagacacttttatgtgtcagtacaaatgaatactacactgaactgggaatgtattatcacctgttagtacagatcccaatattctttttcactgttgtagtaatgttaatcacatacaccaaaatacttcaggctcttaatattcgaataggcacaagattttcaacagggcagaagaagaaagcaagaaagaaaaagacaatttctctaaccacacaacatgaggctacagacatgtcacaaagcagtggtgggagaaatgtagtctttggtgtaagaacttcagtttctgtaataattgccctccggcgagctgtgaaacgacaccgtgaacgacgagaaagacaaaagagagtcttcaggatgtctttattgattatttctacatttcttctctgctggacaccaatttctgttttaaataccaccattttatgtttaggcccaagtgaccttttagtaaaattaagattgtgttttttagtcatggcttatggaacaactatatttcaccctctattatatgcattcactagacaaaaatttcaaaaggtcttgaaaagtaaaatgaaaaagcgagttgtttctatagtagaagctgatcccctgcctaataatgctgtaatacacaactcttggatagatcctaaaagaaacaaaaaaattacctttgaagatagtgaaataagagaaaaatgtttagtgcctcaggttgtcacagactagagaaaagtctcagtttcaccaaatccacattcaaatgagttttaaatttaaattgtaaaaactgatattactgccaaatataagaaaaatattttaagtattggttatgttgtaaattttcaatgtgaatgtcaattagataggtcatatatattcaatttcttcattacttaatgtatttgttgcatggcagtttgttaaagtactatcatgtgtatattttgtcaatattatgtccaacagaaaatattcatgtaagtcatattttttaaggaataaatacatagcctt

SEQ ID NO: 11587 - DNA, 1224 bp, Homo sapiens
  source 1..1224: mol_type = unassigned DNA
cgtgaagagcaaaccccctcctgctcagagctgctgccgcctgcgcccagggctgcactccgcgcaggcctcatagccaggccatggcccccacagagccctggagccccagcccggggtcagcgccctgggactactcggggttggacggcctggaggagctggagctgtgtccggccggggacctgccctacggctacgtctacatccccgcgctctacctggcggccttcgccgtgggcctgctgggcaacgcctttgtggtgtggctgctggccgggcggcggggcccgcggcggctggtggataccttcgtgctgcacctggcggcagctgacctgggcttcgtgctcacgctgccgctgtgggccgcggcggcggcgctaggcggccgctggccgttcggcgatggcctctgcaagctcagcagcttcgcgctggcgggcacgcgctgcgcgggcgcgctgctgctggcgggcatgagcgtggaccgctacctggccgtggtgaagctgctcgaggcgaggccactgcgcaccccgcgctgcgcgctggcctcgtgctgcggcgtctgggccgtggcgctgctggccggcctgccctccctggtctaccgggggttgcagcccctgcctgggggccaggacagccagtgcggcgaggagccctcccacgccttccagggcctcagcttgctgctgctgctgctgaccttcgtgctgcccctggtcgtcaccctcttctgctactgccgcatctcgcgccgcctgcgacggccgccgcacgtgggtcgggcccggaggaactcgctgcgcatcatcttcgccatcgagagcacgtttgtgggctcctggctgcccttcagcgccctgcgggccgtcttccacctggcgcgtctgggggcgctgccgctgccgtgccccctgctgctggcgctgcgctggggcctcaccattgccacctgcctggccttcgtcaacagctgcgccaacccgctcatctacctcctgctggaccgctcattccgagcccgggcgctggacggggcctgcgggcgcaccggccgcctggcgcgaaggatcagctcagcctcctcgctctccagggacgacagttccgtgttccgttgccgggcccaggccgcgaacactgcctcggcctcctggtagctgccccgggccgctggaggtgggcggcagcggagcatcgagaggaggccagagg

SEQ ID NO: 11588 - DNA, 7514 bp, Homo sapiens
  source 1..7514: mol_type = unassigned DNA
cgccatggcggcgccgggttgcggaccctgagcgccggcgcggggcgcgcaccatgaactcgtgggacgcgggcctggcggggctactggtgggcacgatgggcgtctcgctgctgtccaacgcgctggtgctgctctgcctgctgcacagcgcggacatccgccgccaggcgccggcgctcttcaccctgaacctcacgtgcgggaacctgctgtgcaccgtggtcaacatgccgctcacgctggccggcgtcgtggcgcagcggcagccggcgggcgaccgcctgtgccgcctggctgccttcctcgacaccttcctggctgccaactccatgctcagcatggccgcgctcagcatcgaccgctgggtggccgtggtcttcccgctgagctaccgggccaagatgcgcctccgcgacgcggcgctcatggtggcctacacgtggctgcacgcgctcaccttcccagccgccgcgctcgccctgtcctggctcggcttccaccagctgtacgcctcgtgcacgctgtgcagccggcggccagacgagcgcctgcgcttcgccgtcttcactggcgccttccacgctctcagcttcctgctctccttcgtcgtgctctgctgcacgtacctcaaggtgctcaaggtggcccgcttccattgcaagcgcatcgacgtgatcaccatgcagacgctggtgctgctggtggacctgcaccccagtgtgcgggaacgctgtctggaggagcagaagcggaggcgacagcgagccaccaagaagatcagcaccttcatagggaccttccttgtgtgcttcgcgccctatgtgatcaccaggctagtggagctcttctccacggtgcccatcggctcccactggggggtgctgtccaagtgcttggcgtacagcaaggccgcatccgacccctttgtgtactccttactgcgacaccagtaccgcaaaagctgcaaggagattctgaacaggctcctgcacagacgctccatccactcctctggcctcacaggcgactctcacagccagaacattctgccggtgtctgagtgaaggaccgcgctcctgctgaagagtttagaatgaggcagcggtgagaagaagggtgggagggcgtgggggcccctgggtggacaccaccagccaccagtccctggcatgcccagtgatcctggttccctggcttgtaggggctccagagcctgcttcctggttcctcaagggcagatattggacactccttatttgtcaccaaaggatgactgtaggccgtgtgctggcctttctttctaagaagctgctttgagctcctggactcacctgaggctccctgggggatgacactcagttctgtcactgtcaaggatgcagagagctggtggtaggtgggaagcatggtgtccacctgcctgctgaccactggacgctgctccatgctgaagaaaagtgacagtctccaggggacatttcagccatgctgaaagggaggctggcagtggtcatttggcccggatctaacatggcacctcgtctccacagggtagtggtggctgcttcaacccaaatattattcagctggtactaacgacattgtgcccagctgggactcttgggctctgtgcctgagggaaaatgtttcacaactagtggctgcccaattgctgctgaccagttgtcttagaaatggtcaattggattcaactttagtcctctccttccccctaaaagcgaatgtttgtgtgtgcagacaatcttagcatgaaaatggtttaaataggctggtcctacatgtattaggttctttcaagtttgactgggaggtcacctttttctgatttacaagtcctaattgttggagctcagtaaaggtaggaggaaggtggctggttggtcctcccttccccctgtttgtgacctgaatttacaggaagtgtttcaacttgtcttatgcatcttatctggcatgtcctgggagatggatgggcaagaactggcctgagcagggatttttgccttgattttaagtcactgggttccattgtcctggcacctccatttccttagtttctgtaagcctgttaacagaaagtagaggctattcaaggttatcaagaaagtgccctgtgctaatgatgagacagtgaattttttttttttttcgagatgggagtttcactcttattgcccaggctagagtgcaatggtgcgatctaggctcaccacaacctctgccttccaggttcaagtgattagagacagtgaaatttttatggaatactgcacctataaaacacatgccaatctgttagcagtcctgacttgatttaataaaaaccaaggagagccacccctgctttctggccatctcttctttgtctaccatttcaaattgacttgtgaatactcagagcagttatttttcaatcctccactctaagtgattcctccagggtgggaagcacggggagcaatggaatcagatggctcattctctccttccagctctttacatcctaactttggaggtatagaaggaaggatgtggtccaacgggaaggaagtgaagagtctattggtttttacttctaggcagtcccaatttttaaaggcagagaagtatctgcatctttatttgaaaagacgtcttattaactcttagctcctcagttagaaaacaattcacctggcttagtcttgtctagtttcaaagttaccatggagactagaatggagacaggtgtagcttccaaggaggccttggcatcttgcagttgctgtcagagatgggctcatatctgcttggggaagccaatggggcacaatccttcccaatttcatgatctggggcatcatgtcggtagctgaagtcagccacggtgggagtgtttataccatgaaaatcagcaagtgctgtaaatcaggccttttgccccacagagagctgattgtgaaacatctactagcacaccactgccagacatgactgtgtgtgtccctgaaacaaaattgctctggctcagagctcctttggccactcatattacaatagcaacagacatttgcttcctggtggcaagtaactgtgcaccctccaacatcccaaccccagaggaaccagtgggattgaaaaccagcagaagccaagacaggatgcacagctgaattggaggagagtagctcccttctcacacaaacgctttcaaagttgggcaaaagtggcccagtgcgtgaggtcagtcaacagccaaattccagcagcaaaatacattttcatcaatatcactttgggagaataactgtggcacatgctctttctgctttctctgtactgtataggcaacatgttgtactcccagtagcaactagatctcttttacctcttctttagccaagaagcaagatctgtcacccacaacaccacatatcttgaaaagatgcttttcataattttcactatacctctaaaaccaattgtaccgacatcacgtagacaaaaactccagataaatccattgattgggtattttcattattatttggacacatgaattaaatcccaagggaaagtgagaagaaaattaatgtattagcaaccagtgttagccaactctgctgtaattacctttagataaatgtttattttcatctctatacagtctatcaaatttgccccctggctttattactcccaattgaattatctacctcattttgttaatttaatttatcaaaggtaacattgttttctcaggtataacacatagaaacaccaagattttcagcatctgaatcaaactaaaattacttgcttgacttcactccagggtgagacttgacctttaaggcccaaactctggtgaactgttggactgggtagaaatctttcaagaagcttgaaaataaggccataaaggaggggctttcaaattcctaaatccacatatagggctgagttcctagtcctacacaatcagaatttgcctttttaagtcacgctgcaactattccggctttttatatggcacctttctgagggaggggattttacagccgagggacctccaaagggaacgtccatttgcatgtgtgccctggtatttagggtttgtctcatggtcagctcgcctctcaaagatggctcaccaatcacctgcctgtttttacttagaaagcaggcttgggcaggaggggaaatggatttgaaccatctcagaccaactctatctcttctagcactcagctcagcctcctgtccccatgagcaataaaactctctccttatgtctgtgaaattcgttttctttttcatggtgcctttctttctaagaaaagatagaaagaatggggccaggttcatgtcccagttgtcacccttttacatgcttgggtgcaggtagatgaggccttcccatggctacagtgtgacccttggaggaaccaaaggctgtgcattgttagaatttagcccagatgcaggataaactagcttgcctgagtttaatgaggatattatatcaggtgccaggaatcccttgggtcagctcctatcctctggacggggagcatcatgggaaaaagaggtccgagtcatatttagggcttcatgtgtctggaagggagccattagctcttaaattattcacagaagtcaccacggaaggttgtttaagatgcagattccagcatcccctcctcagagatcaatttcagcagggccaggcaggacctgggtttccgcacttttaatcatcgatgcccaggtaactgataggagttttcttcaaaccatcccctaaggagaaatgatcttagacacttggataaactctatagaaaattgagtgtttctattaataactatctaggtttcaattgtcttgtatctttccctaattctccaaacagttcaatctccagctttattcaatggctgggccattttgttcttggagggacaaaattgacctctccatgaaattgcaaaaacccatcttcattcctttttatggggctccaggtcataaggatgagatatatttggggtactggcagaggatggcagagctggctggctctgagccaggaagccttgttagaggaaggaactctggcattcagaggtgtccccttgggggcacttgcttgggtcttggatcaaactctactggggcagcctggctgtgggaggtgatgacatctgccacctctgccactacccagagcttgtcctgccctcttcccagccagcctcacacacaggagctgagccaggctgaggcaaggtcagcgagagacagttctccatgccagtatctgggtgtgggtctcttgttggctcccagctcatcccgtgtggctgacccttccaggtcacttggagcagccagtaatgacagtgtcctaacagctggtgggtatggaggaaagactagacatcaggctatggactcacatggagggccctggtgttggctctgggacctgggctgggccggacctggggagagggtgggtggagcttggcctctgcagtttgcgcttgcaggttcaggggagaaagttgtttgagatcagggtttaggggtagtgtttcccattaatcttcatcataatcttttgatgtaggtgctgttattatctctacgttacacatctgggaggatttgaaagtcctggagacagggaggttttggggagaatgcaaaacagggcagggctctcaaggagggtggaccagtgaccatggggaaactgagtgtttctattaataagtatctaagtttcaattgtcttgtatctttccctaattctccaaacggttcaatctccagttttattcagggactgggccattttgttctcagagggacaaaactgatctctccatgaaatcccctgcacctcactctgggcagctctaggctcagcagatgtttttctgccattaggaaacagccccttactctcagctcctgtgctaacacccatacccaccagctgggcgttgggacctctcccgtcatatggctgccacttgcttgggaaggaattctccagactccttttactttgtatgtgtttctaggggaattctgagggaagaagctttgcagcaacctctgtgcccagaacatacggctcacaagtcctttgtgccgacagggaatctatctaattgttttagtgtgtgaggctcattgtcagcctagatttccctgaaactctgggccagcagcccccaggagcatcagtaggacccagcatttcccctggcaccaaagtggacctctttgcaccttgcagccgggagaactgacttagagggccctggtgttggctctggaacctgggctgagatggattcggggagaggctgggtggagcttggcctctacggtctgttcttgcagattcaggagagaaagtggtatgagagcagtgtggtttgtaagttccccaacttccccgctggctcacactgtctccccagaccaatggcctattagcccccaaaaagttagtccaaccccaggccagctgcctttgctctgctgtggcctaagttctggcctggtcaaaggaaggtggcaggaactccaggcttgctcctgcctcctcacacctcattccacaaatgcggagtgaaagagcaggagccagacacatttgggggttgactgtctagaaaggaggaatcagaggtcccaaggaacacaatcgtgcaacttcctagggaatctgcatcaggagaaagaagcggctaggacacacagtggcttcgctcagcctggccacgacatcactgtgcagaagaagagatctgtcaggggtccagaggagcggagtcctggagcctctgggagggtggcatgtggcagctgcaggctgtggtccagaactatgagcagacttgcctgtcactctccaaacatttactgaacacctactgtgtgccaggccctgtgctttgtcaggctctgggggagacaggtcattactctgcagtgtgggaagcggggctgccctggaagtgtgtactcagtgctgtgggggtacagagggagggctggagaacttagctggtgggaaaggagggttctggaaggcttctcagaggtagtggcattgggccagaacttacagtagggaagagcatgtggcaaggcacagaggagatgggagcctgcctggtgaggggtccagtggtgacagagctcagtgtgggtccagagatggtgtcaggtgagggctgagaggggagggcaagtgccccttgagatgggctgaacgtgatgatgatctgtggccagtgggagatgatagaagtcttgaggttgggaatataagaattaggtctcttttagaaagagaggacatggagaaaatccatatatttttagctaccaaaaaagagaaggaagaaagaaaagaaataagaagagaagcaagacagaaaagaaggaagagagaaggaagaatggcaaaggaaggaagaaggag

SEQ ID NO: 11589 - DNA, 2447 bp, Homo sapiens
  source 1..2447: mol_type = unassigned DNA
atggcgaacgcgagcgagccgggtggcagcggcggcggcgaggcggccgccctgggcctcaagctggccacgctcagcctgctgctgtgcgtgagcctagcgggcaacgtgctgttcgcgctgctgatcgtgcgggagcgcagcctgcaccgcgccccgtactacctgctgctcgacctgtgcctggccgacgggctgcgcgcgctcgcctgcctcccggccgtcatgctggcggcgcggcgtgcggcggccgcggcgggggcgccgccgggcgcgctgggctgcaagctgctcgccttcctggccgcgctcttctgcttccacgccgccttcctgctgctgggcgtgggcgtcacccgctacctggccatcgcgcaccaccgcttctatgcagagcgcctggccggctggccgtgcgccgccatgctggtgtgcgccgcctgggcgctggcgctggccgcggccttcccgccagtgctggacggcggtggcgacgacgaggacgcgccgtgcgccctggagcagcggcccgacggcgcccccggcgcgctgggcttcctgctgctgctggccgtggtggtgggcgccacgcacctcgtctacctccgcctgctcttcttcatccacgaccgccgcaagatgcggcccgcgcgcctggtgcccgccgtcagccacgactggaccttccacggcccgggcgccaccggccaggcggccgccaactggacggcgggcttcggccgcgggcccacgccgcccgcgcttgtgggcatccggcccgcagggccgggccgcggcgcgcgccgcctcctcgtgctggaagaattcaagacggagaagaggctgtgcaagatgttctacgccgtcacgctgctcttcctgctcctctgggggccctacgtcgtggccagctacctgcgggtcctggtgcggcccggcgccgtcccccaggcctacctgacggcctccgtgtggctgaccttcgcgcaggccggcatcaaccccgtcgtgtgcttcctcttcaacagggagctgagggactgcttcagggcccagttcccctgctgccagagcccccggaccacccaggcgacccatccctgcgacctgaaaggcattggtttatgagggaggccccgccacatagacccccaacccagcctttccctttggctcggacggtgacgttgtatcttttccttctggcccctgtttaattttctaagctgccttcaaaatgactcgaagtggacagacacttggattgtactgactcctttgggggtggggtgggtgaggagtaggatgctcagcccactccagctccgcacattcgtcctcctaactcgactttcttcctgacaataggccctgcagtctttttgtagcggtactgacgtcttttattccatgtgtggttcctttttttctttttctataaaggctgtactaattttcttcatgcaacgtttcctaaagaccatggccagttttctacagaagctatttttgacaacctcaagtggcattacattttgcagtgaagtagaggaacctagggggacttcttcacaagttagatttcttgaggatcttctgttggaagcaggagaaagtggggggtggggggaagttgtccgaaatgccctctgaattgccggctgcagggtccttgtgctgcgctggttctttgaaagtctcagtgttgatattgaacttaaagagcagagatggagatcagtagcaaggcagtcatttttttaaagcagtaagtaacaagtaagatttggttcccggtttactttctgctgctaaaaaccacgtcagtgacaactgctctctgtattatagcaatcttgaatggaaacatttctgtcaagttgtaagttttaaaagagtaaagtgttttggttagtaatgatgtggagaaaaatacagtattgcatgtgttcgtgtgtatagattgtggttcgaggattgggagggctctgagaagcagagtactacatcaaaattgttttaagtattttttgccaataaaaaattaattttatggaaatggcttgtgctttgagaagcccagttttattctgtcttatgaaactaatttccactttgaaaattgttcttctgttgtttatggtataaatgaatggaatataatgatatcctccttctaggaaacaaagcatttccttaaaatgtttgctaggttaagctgtgctgttctactgatggttgttttaaattaataatgagaactataatttaaataatatttctttgttagacattataatgttaaactgaaagactaaattctgcaagtactatataatatttttggcttataatgctacatttttattaatgtaccttccgttttgaggatttatatctgtatttctctttgcattatacaaatataccagtattttcattctgga

SEQ ID NO: 11590 - DNA, 2115 bp, Homo sapiens
  source 1..2115: mol_type = unassigned DNA
cggccgcgggggcttctcggggtccacgcacgccctgcgccgccaggacccgagcggagcctccccgcggcccggccgcgcctggtcctgagcggtaccatgatgtggggtgcaggcagccctctggcctggctctcagctggctcaggcaacgtgaatgtaagcagcgtgggcccagcagaggggcccacaggtccagccgcaccactgccctcgcctaaggcctgggatgtggtgctctgcatctcaggcaccctggtgtcctgcgagaatgcgctagtggtggccatcatcgtgggcactcctgccttccgtgcccccatgttcctgctggtgggcagcctggccgtggcagacctgctggcaggcctgggcctggtcctgcactttgctgctgtcttctgcatcggctcagcggagatgagcctggtgctggttggcgtgctggcaatggcctttaccgccagcatcggcagtctactggccatcactgtcgaccgctacctttctctgtacaatgccctcacctactattcagagacaacagtgacacggacctatgtgatgctggccttagtgtggggaggtgccctgggcctggggctgctgcctgtgctggcctggaactgcctggatggcctgaccacatgtggcgtggtttatccactctccaagaaccatctggtagttctggccattgccttcttcatggtgtttggcatcatgctgcagctctacgcccaaatctgccgcatcgtctgccgccatgcccagcagattgcccttcagcggcacctgctgcctgcctcccactatgtggccacccgcaagggcattgccacactggccgtggtgcttggagcctttgccgcctgctggttgcccttcactgtctactgcctgctgggtgatgcccactctccacctctctacacctatcttaccttgctccctgccacctacaactccatgatcaaccctatcatctacgccttccgcaaccaggatgtgcagaaagtgctgtgggctgtctgctgctgctgttcctcttccaagatccccttccgatcccgctcccccagtgatgtctagctgagtcttcatgacccttcaaccctgattactacagaattccagaatgttaggctctccagggcttctttccaaacccccagctccacaccccccagacccagctggttctggagttctaggacattgggtgtttcaaggttctgttcagatccctatgggggcccagctggctccacggttccagaatgttcaggtggtcagtgttctactcagaaatgtctcacagcccagctgggttgcaattccagaatgctgggagttttacagtgccattccaagtcccagatgtccctcttcccccaaacttgaccttgaccatgtcactttacgtttgaatttctgagctaaagagtcagagagattagtcacatagttgcctaaataggagagagaaagattatatatgcacatatacaaagacagtgtctatttatgattgatttatttatttataaatttacttatgggtggtaaggggcaaaaaagaggcccacaccttgatatccaggccataccagggtatcccttgtcccttcacccccatttctgacctcagttcctggaggggggaaagggtgaaagagaaaccacgtattttgttattattttggattattttttatcgaagagatcatagaaaccagagccttctccccaggcctgccctcctcgggtttggaaggggaacacaccagcctctggttttttatttttttaagaagccatcacctgagcaaccaaaaattcctctgcgctggggtccgactgccctctggtggccatttggggaaaactgcagcccggccaggcagctgggaccagaatgcaaccccagctccactccagcctggcgtccagggccacagccatggcctgggggccaagcctcaccctgcggtgccctaaaggagggggggcacgagccaacaccccacccctctgccaaccggggtatggcccccagtgcattccctgttcccgtctccaacccaactcaataaaaaatgattttgtcataaa

SEQ ID NO: 11591 - DNA, 2059 bp, Homo sapiens
  source 1..2059: mol_type = unassigned DNA
ggatcccagcaagcgtcctttatgtatgaaaaggaagaagaaaatttccccatgaaacatattcaaagtagagaacaatctttttgattccattgttattttaattgtatacagacataggagtctttgcataattagacttttccttctttcaggactgtggatgcaaagccctggacccccagacgttataggacattactcctcagctttgcagcccggtgatgtgaagcgaaacaccatttccccttttttatggcggaagaaaacagaacacaactgcaaaggggcttttccctcccctgctcatcctctttccccaaatgaattttggtttgctgtggactctattctgctgaggaactgttcttgttgggcaaatgtagatcttgtctactctgtggcaggaaaaggccttttctttcattttgtaagaaagagcacagagttcctcctgtacctgctccagctgtgcctgcagcccctcacggccgggtgatgccattcccaaactgctcagcccccagcactgtggtggccacagctgtgggtgtcttgctggggctggagtgtgggctgggtctgctgggcaacgcggtggcgctgtggaccttcctgttccgggtcagggtgtggaagccgtacgctgtctacctgctcaacctggccctggctgacctgctgttggctgcgtgcctgcctttcctggccgccttctacctgagcctccaggcttggcatctgggccgtgtgggctgctgggccctgcacttcctgctggacctcagccgcagcgtggggatggccttcctggccgccgtggctttggaccggtacctccgtgtggtccaccctcggcttaaggtcaacctgctgtctcctcaggcggccctgggggtctcgggcctcgtctggctcctgatggtcgccctcacctgcccgggcttgctcatctctgaggccgcccagaactccaccaggtgccacagtttctactccagggcagacggctccttcagcatcatctggcaggaagcactctcctgccttcagtttgtcctcccctttggcctcatcgtgttctgcaatgcaggcatcatcagggctctccagaaaagactccgggagcctgagaaacagcccaagcttcagcgggcccaggcactggtcaccttggtggtggtgctgtttgctctgtgctttctgccctgcttcctggccagagtcctgatgcacatcttccagaatctggggagctgcagggccctttgtgcagtggctcatacctcggatgtcacgggcagcctcacctacctgcacagtgtgctcaaccccgtggtatactgcttctccagccccaccttcaggagctcctatcggagggtcttccacaccctccgaggcaaagggcaggcagcagagcccccagatttcaaccccagagactcctattcctgacaacagccagcgtcctcaacgcccgtgtttatggaactacctgcgacctaaataataattactcctactttgggattctggaagaagaagaagtcttaagactgcaatacaaggatcagagcataaacatgggcacagttgctgcaggtgtggtcttatactttgttgaccagggtggtcctctgtgattttaccttgtagagtggcaaatcaaaatgaacaagctagaacctcctcctacccaactatgatgcagattcagttgctgaactgaaaagtcgggcagctactccatctccacacttgaagaaatgtaatttgctaaatcagtgaaggaagagaagaaagccgggtgatggcatctttccaactcttacttggtctcagcaagtcattttcatttattatgcttcagttttaaatacaaaaaaaaaactatgttttcttcccacctgctgtgcagactggggatgaccgacatcagaaagtgccctggttctaaaaagagactctgctgtatataaggtactgtcgtacatgctagcctttatttggaacataacatttttgttttcataaaattttgcttcatttttctaga

SEQ ID NO: 11592 - DNA, 1071 bp, Homo sapiens
  source 1..1071: mol_type = unassigned DNA
atgaatggggtctcggaggggaccagaggctgcagtgacaggcaacctggggtcctgacacgtgatcgctcttgttccaggaagatgaactcttccggatgcctgtctgaggaggtggggtccctccgcccactgactgtggttatcctgtctgcgtccattgtcgtcggagtgctgggcaatgggctggtgctgtggatgactgtcttccgtatggcacgcacggtctccaccgtctgcttcttccacctggcccttgccgatttcatgctctcactgtctctgcccattgccatgtactatattgtctccaggcagtggctcctcggagagtgggcctgcaaactctacatcacctttgtgttcctcagctactttgccagtaactgcctccttgtcttcatctctgtggaccgttgcatctctgtcctctaccccgtctgggccctgaaccaccgcactgtgcagcgggcgagctggctggcctttggggtgtggctcctggccgccgccttgtgctctgcgcacctgaaattccggacaaccagaaaatggaatggctgtacgcactgctacttggcgttcaactctgacaatgagactgcccagatttggattgaaggggtcgtggagggacacattatagggaccattggccacttcctgctgggcttcctggggcccttagcaatcataggcacctgcgcccacctcatccgggccaagctcttgcgggagggctgggtccatgccaaccggcccaagaggctgctgctggtgctggtgagcgctttctttatcttctggtccccgtttaacgtggtgctgttggtccatctgtggcgacgggtgatgctcaaggaaatctaccacccccggatgctgctcatcctccaggctagctttgccttgggctgtgtcaacagcagcctcaaccccttcctctacgtcttcgttggcagagatttccaagaaaagtttttccagtctttgacttctgccctggcgagggcgtttggagaggaggagtttctgtcatcctgtccccgtggcaacgccccccgggaatga

SEQ ID NO: 11593 - DNA, 1815 bp, Homo sapiens
  source 1..1815: mol_type = unassigned DNA
agctgacacaaccaagacgagtctcagtgtctagggaagcttggggttctgctccttttacttcaggcgaacctgaactttaatgcaattttgaagcatgccctgaatagattcagtcattatcaagtcaaactaaaaacggtgaaaggttgcgactattaccaaatagaagacaatgagaagtcataccataacaatgacgacaacttcagtcagcagctggccttactcctcccacagaatgcgctttataaccaatcatagcgaccaaccgccacaaaacttctcagcaacaccaaatgttactacctgtcccatggatgaaaaattgctatctactgtgttaaccacatcctactctgttattttcatcgtgggactggttgggaacataatcgccctctatgtatttctgggtattcaccgtaaaagaaattccattcaaatttatctacttaacgtagccattgcagacctcctactcatcttctgcctccctttccgaataatgtatcatattaaccaaaacaagtggacactaggtgtgattctgtgcaaggttgtgggaacactgttttatatgaacatgtacattagcattattttgcttggattcatcagtttggatcgctatataaaaattaatcggtctatacagcaacggaaggcaataacaaccaaacaaagtatttatgtctgttgtatagtatggatgcttgctcttggtggattcctaactatgattattttaacacttaagaaaggagggcataattccacaatgtgtttccattacagagataagcataacgcaaaaggagaagccatttttaacttcattcttgtggtaatgttctggctaattttcttactaataatcctttcatatattaagattgggaagaatctattgaggatttctaaaaggaggtcaaaatttcctaattctggtaaatatgccactacagctcgtaactcctttattgtacttatcatttttactatatgttttgttccctatcatgcctttcgattcatctacatttcttcacagctaaatgtatcatcttgctactggaaagaaattgttcacaaaaccaatgagatcatgctggttctctcatctttcaatagttgcttagatccagtcatgtatttcctgatgtccagtaacattcgcaaaataatgtgccaacttctttttagacgatttcaaggtgaaccaagtaggagtgaaagcacttcagaatttaaaccaggatactccctgcatgatacatctgtggcagtgaaaatacagtctagttctaaaagtacttgaggtaaacatactaaaatgaattatataatgcagcctcttaattctttgaagaactaaaaaattaggaaacaaagttctagcatttacaaaactcagatctcaaagctctgcttgtatttgtgatatttcatttgcttaactgtaaaccatttcaaggtactaacttttaaatctgtatgtaaaatcttttcaaaatacatttttaagctaatactcttaacatagattatgaagttaagtgaaatttatggctctaacagcaaaataattaaagtgccatagtttctcaagtgactaaagtagttattaaaatcaagcacttgatactaatttgaagtgtgtttaaaagtaaatgatttgggaactgacaatgtgtcagaaaatatatgttcatttatcattttaaaatcttgtataatttgccactgtattcatttatgcctaaatctctataacagatgaaaagataattaataaaatcctaattaaaaaat

SEQ ID NO: 11594 - DNA, 1924 bp, Homo sapiens
  source 1..1924: mol_type = unassigned DNA
aaccaattgcaccacgaccggatggaagagcccagctgacacaaccaagacgagtctcagtgtctagggaagcttggggttctgctccttttacttcaggcgaacctgaactcagttaatgcaattttgaagcatgccctgaatagattcagtcattatcaagtcaaactaaaaacggtgaaaggttgcgactattaccaaataggaaaaatctgaagacataagaactacacatgaggaatatgtcatttagcactttcactttttgatctccacagaagacaatgagaagtcataccataacaatgacgacaacttcagtcagcagctggccttactcctcccacagaatgcgctttataaccaatcatagcgaccaaccgccacaaaacttctcagcaacaccaaatgttactacctgtcccatggatgaaaaattgctatctactgtgttaaccacatcctactctgttattttcatcgtgggactggttgggaacataatcgccctctatgtatttctgggtattcaccgtaaaagaaattccattcaaatttatctacttaacgtagccattgcagacctcctactcatcttctgcctccctttccgaataatgtatcatattaaccaaaacaagtggacactaggtgtgattctgtgcaaggttgtgggaacactgttttatatgaacatgtacattagcattattttgcttggattcatcagtttggatcgctatataaaaattaatcggtctatacagcaacggaaggcaataacaaccaaacaaagtatttatgtctgttgtatagtatggatgcttgctcttggtggattcctaactatgattattttaacacttaagaaaggagggcataattccacaatgtgtttccattacagagataagcataacgcaaaaggagaagccatttttaacttcattcttgtggtaatgttctggctaattttcttactaataatcctttcatatattaagattgggaagaatctattgaggatttctaaaaggaggtcaaaatttcctaattctggtaaatatgccactacagctcgtaactcctttattgtacttatcatttttactatatgttttgttccctatcatgcctttcgattcatctacatttcttcacagctaaatgtatcatcttgctactggaaagaaattgttcacaaaaccaatgagatcatgctggttctctcatctttcaatagttgcttagatccagtcatgtatttcctgatgtccagtaacattcgcaaaataatgtgccaacttctttttagacgatttcaaggtgaaccaagtaggagtgaaagcacttcagaatttaaaccaggatactccctgcatgatacatctgtggcagtgaaaatacagtctagttctaaaagtacttgaggtaaacatactaaaatgaattatataatgcagcctcttaattctttgaagaactaaaaaattaggaaacaaagttctagcatttacaaaactcagatctcaaagctctgcttgtatttgtgatatttcatttgcttaactgtaaaccatttcaaggtactaacttttaaatctgtatgtaaaatcttttcaaaatacatttttaagctaatactcttaacatagattatgaagttaagtgaaatttatggctctaacagcaaaataattaaagtgccatagtttctcaagtgactaaagtagttattaaaatcaagcacttgatactaatttgaagtgtgtttaaaagtaaatgatttgggaactgacaatgtgtcagaaaatatatgttcatttatcattttaaaatcttgtataatttgccactgtattcatttatgcctaaatctctataacagatgaaaagataattaataaaatcctaattaaaaaat

SEQ ID NO: 11595 - DNA, 1282 bp, Homo sapiens
  source 1..1282: mol_type = unassigned DNA
ggttctgctccttttacttcaggcgaacctgaactcagttaatgcaattttgaagcatgccctgaatagattcagtcattatcaagtcaaactaaaaacggtgaaaggttgcgactattaccaaataggaaaaatctgaagacataagaactacacatgaggaatatgtcatttagcactttcactttttgatctccacagaagacaatgagaagtcataccataacaatgacgacaacttcagtcagcagcaacaccaaatgttactacctgtcccatggatgaaaaattgctatctactgtgttaaccacatcctactctgttattttcatcgtgggactggttgggaacataatcgccctctatgtatttctgggtattcaccgtaaaagaaattccattcaaatttatctacttaacgtagccattgcagacctcctactcatcttctgcctccctttccgaataatgtatcatattaaccaaaacaagtggacactaggtgtgattctgtgcaaggttgtgggaacactgttttatatgaacatgtacattagcattattttgcttggattcatcagtttggatcgctatataaaaattaatcggtctatacagcaacggaaggcaataacaaccaaacaaagtatttatgtctgttgtatagtatggatgcttgctcttggtggattcctaactatgattattttaacacttaagaaaggagggcataattccacaatgtgtttccattacagagataagcataacgcaaaaggagaagccatttttaacttcattcttgtggtaatgttctggctaattttcttactaataatcctttcatatattaagattgggaagaatctattgaggatttctaaaaggaggtcaaaatttcctaattctggtaaatatgccactacagctcgtaactcctttattgtacttatcatttttactatatgttttgttccctatcatgcctttcgattcatctacatttcttcacagctaaatgtatcatcttgctactggaaagaaattgttcacaaaaccaatgagatcatgctggttctctcatctttcaatagttgcttagatccagtcatgtatttcctgatgtccagtaacattcgcaaaataatgtgccaacttctttttagacgatttcaaggtgaaccaagtaggagtgaaagcacttcagaatttaaaccaggatactccctgcatgatacatctgtggcagtgaaaatacagtctagttctaaaagtacttga

SEQ ID NO: 11596 - DNA, 2249 bp, Homo sapiens
  source 1..2249: mol_type = unassigned DNA
ctttagtcacttccagctccaggcacagcagttggtgactccttggtgggagccgtgtcccacccggtcctgatactgccgtcttctctttcacagtcctccaggcttgggccagccttgggggcagcagagcttctgggctgacatgggctcattgctccttctccaagccctctgaggacatcaaaagcgtggacgcatcactttccaccatcttgctgcccactgtccctccatcctgaggcctcctaagcacatgtgtggggtggcaggcacactgctgatagctgtggatgcggccgtgacatccttcacccctgcccccatggcatgcatgatccattagggaggaccgtctgcacaaaggtctcttgccctgtgcagcttcctgcagactggacttgcaaagtccagcctgtatggctggagttcccatgcctgccaatctcctgtcgactgcgagtcagctccgatacttcaccagattcagccacctgggggagctggaagtgaatctcctcgtagctgagccttctgatgagactgcagccccggctgacacctggattgcagactcatgaaagacctgaaactctaccaacagccacctgggggagctggaagtgaatctcctcgtagctgagccttctgatgagactgcagccccggctgacacctggattgcagactcatgaaagaccctgagcagaggacccagtttggcagagcccgaattcctgacccacaggaactgggagataaaactctgtggttttaatcttctcattttagagtgctcagtgtcctgtggtgtgaacacgcttcattcaacctgggcccttgggagagatgctgagtggttcccgggctgtccccactccacaccgtggcagtgaagagctgctgaagtacatgcttcatagtccttgcgtctctctgaccatgaatggcacctacaacacctgtggctccagcgacctcacctggcccccagcgatcaagctgggcttctacgcctacttgggcgtcctgctggtgctaggcctgctgctcaacagcctggcgctctgggtgttctgctgccgcatgcagcagtggacggagacccgcatctacatgaccaacctggcggtggccgacctctgcctgctgtgcaccttgcccttcgtgctgcactccctgcgagacacctcagacacgccgctgtgccagctctcccagggcatctacctgaccaacaggtacatgagcatcagcctggtcacggccatcgccgtggaccgctatgtggccgtgcggcacccgctgcgtgcccgcgggctgcggtcccccaggcaggctgcggccgtgtgcgcggtcctctgggtgctggtcatcggctccctggtggctcgctggctcctggggattcaggagggcggcttctgcttcaggagcacccggcacaatttcaactccatggcgttcccgctgctgggattctacctgcccctggccgtggtggtcttctgctccctgaaggtggtgactgccctggcccagaggccacccaccgacgtggggcaggcagaggccacccgcaaggctgcccgcatggtctgggccaacctcctggtgttcgtggtctgcttcctgcccctgcacgtggggctgacagtgcgcctcgcagtgggctggaacgcctgtgccctcctggagacgatccgtcgcgccctgtacataaccagcaagctctcagatgccaactgctgcctggacgccatctgctactactacatggccaaggagttccaggaggcgtctgcactggccgtggctcccagtgctaaggcccacaaaagccaggactctctgtgcgtgaccctcgcctaagaggcgtgctgtgggcgctgtgggccaggtctcgggggctccgggaggtgctgcctgccaggggaagctggaaccagtagcaaggagcccgagatcagccctgaactcactgtgtattctcttggagccttgggtgggcagggacggcccaggtacctgctctcttgggaagagagagggacagggacaagggcaagaggactgaggccagagcaaggccaatgtcagagacccccgggatggggcctcacacttgccacccccagaaccagctcacctggccagagtgggttcctgctggccagggtgcagccttgatgacacctgccgctgcccctcggggctggaataaaactccccacccagagtcagtccta

SEQ ID NO: 11597 - DNA, 2032 bp, Homo sapiens
  source 1..2032: mol_type = unassigned DNA
agctccaggcacagcagttggtgactccttggtgggagccgtgtcccacccggtcctgatactgccgtcttctctttcacagtcctccaggcttgggccagccttgggggcagcagagcttctgggctgacatgggctcattgctccttctccaagccctctgaggacatcaaaagcgtggacgcatcactttccaccatcttgctgcccactgtccctccatcctgaggcctcctaagcacatgtgtggggtggcaggcacactgctgatagctgtggatgcggccgtgacatccttcacccctgcccccatggcatgcatgatccattagggaggaccgtctgcacaaaggtctcttgccctgtgcagcttcctgcagactggacttgcaaagtccagcctgtatggctggagttcccatgcctgccaatctcctgtcgactgcgagtcagctccgatacttcaccagattcagccacctgggggagctggaagtgaatctcctcgtagctgagccttctgatgagactgcagccccggctgacacctggattgcagactcatgaaagaccctgagcagaggacccagtttggcagagcccgaattcctgacccacaggaactgggagataaaactctgtggttttaatcttctcattttagagtgctcagtgtcctgtggtgtgaacacgcttcattcaacctgggcccttgggagagatgctgagtggttcccgggctgtccccactccacaccgtggcagtgaagagctgctgaagtacatgcttcatagtccttgcgtctctctgaccatgaatggcacctacaacacctgtggctccagcgacctcacctggcccccagcgatcaagctgggcttctacgcctacttgggcgtcctgctggtgctaggcctgctgctcaacagcctggcgctctgggtgttctgctgccgcatgcagcagtggacggagacccgcatctacatgaccaacctggcggtggccgacctctgcctgctgtgcaccttgcccttcgtgctgcactccctgcgagacacctcagacacgccgctgtgccagctctcccagggcatctacctgaccaacaggtacatgagcatcagcctggtcacggccatcgccgtggaccgctatgtggccgtgcggcacccgctgcgtgcccgcgggctgcggtcccccaggcaggctgcggccgtgtgcgcggtcctctgggtgctggtcatcggctccctggtggctcgctggctcctggggattcaggagggcggcttctgcttcaggagcacccggcacaatttcaactccatggcgttcccgctgctgggattctacctgcccctggccgtggtggtcttctgctccctgaaggtggtgactgccctggcccagaggccacccaccgacgtggggcaggcagaggccacccgcaaggctgcccgcatggtctgggccaacctcctggtgttcgtggtctgcttcctgcccctgcacgtggggctgacagtgcgcctcgcagtgggctggaacgcctgtgccctcctggagacgatccgtcgcgccctgtacataaccagcaagctctcagatgccaactgctgcctggacgccatctgctactactacatggccaaggagttccaggaggcgtctgcactggccgtggctcccagtgctaaggcccacaaaagccaggactctctgtgcgtgaccctcgcctaagaggcgtgctgtgggcgctgtgggccaggtctcgggggctccgggaggtgctgcctgccaggggaagctggaaccagtagcaaggagcccgagatcagccctgaactcactgtgtattctcttggagccttgggtgggcagggacggcccaggtacctgctctcttgggaagagagagggacagggacaagggcaagaggactgaggccagagcaaggccaatgtcagagacccccgggatggggcctcacacttgccacccccagaaccagctcacctggccagagt

SEQ ID NO: 11598 - DNA, 1258 bp, Homo sapiens
  source 1..1258: mol_type = unassigned DNA
agaacaaatgtgtgccctcagcaaggatgctggctcttcagaggtgtcagcacaggcagccggcaccccacttccctcccagaaatcccccacgccctctagctggggctggtgcaggagcagtggggaactcctgttacccctgacctgctgccgtcagtcagccgcccgcccccccaccttaaggaggggcagagtcagggaccagccctgaggggtggctcaccccagcttcacttcccccagcccttctcagacagccactgtgcaggctttggcagcgggggtcacacactccacccgggaggccaaagctgcctgcaggaccatgaatggcacctacaacacctgtggctccagcgacctcacctggcccccagcgatcaagctgggcttctacgcctacttgggcgtcctgctggtgctaggcctgctgctcaacagcctggcgctctgggtgttctgctgccgcatgcagcagtggacggagacccgcatctacatgaccaacctggcggtggccgacctctgcctgctgtgcaccttgcccttcgtgctgcactccctgcgagacacctcagacacgccgctgtgccagctctcccagggcatctacctgaccaacaggtacatgagcatcagcctggtcacggccatcgccgtggaccgctatgtggccgtgcggcacccgctgcgtgcccgcgggctgcggtcccccaggcaggctgcggccgtgtgcgcggtcctctgggtgctggtcatcggctccctggtggctcgctggctcctggggattcaggagggcggcttctgcttcaggagcacccggcacaatttcaactccatggcgttcccgctgctgggattctacctgcccctggccgtggtggtcttctgctccctgaaggtggtgactgccctggcccagaggccacccaccgacgtggggcaggcagaggccacccgcaaggctgcccgcatggtctgggccaacctcctggtgttcgtggtctgcttcctgcccctgcacgtggggctgacagtgcgcctcgcagtgggctggaacgcctgtgccctcctggagacgatccgtcgcgccctgtacataaccagcaagctctcagatgccaactgctgcctggacgccatctgctactactacatggccaaggagttccaggaggcgtctgcactggccgtggctcccagtgctaaggcccacaaaagccaggactctctgtgcgtgaccctcgcctaa

SEQ ID NO: 11599 - DNA, 1875 bp, Homo sapiens
  source 1..1875: mol_type = unassigned DNA
caggccagagtcccagctgtcctggactctgctgtggggaagggctgatgcaggtgtggagtcaaatgtgggtgcctcctgcagccgggtgccaggaggggtggaggggccaccctgggctttgtccgggagcctggtcttcccgtccttgggctgacaggtgctgctgcctctgagccctccctgctaagagctgtgtgctgggtaaggctggtggccctttgggctccctgtccaggatttgcgctctggagggtagggcttgctgggctggggactggaggggaacgtggagctccttctgcctcctttcctgccccatgacagcaggcagatcccaggagagaagagctcaggagatgggaagaggatctgtccaggggttagacctcaagggtgacttggagttctttacggcacccatgctttctttgaggagttttgtgtttgtgggtgtggggtcggggctcacctcctcccacatccctgcccagaggtgggcagagtgggggcagtgccttgctccccctgctcactctctgctgacctccggctccctgtgctgccccaggaccatgaatggcacctacaacacctgtggctccagcgacctcacctggcccccagcgatcaagctgggcttctacgcctacttgggcgtcctgctggtgctaggcctgctgctcaacagcctggcgctctgggtgttctgctgccgcatgcagcagtggacggagacccgcatctacatgaccaacctggcggtggccgacctctgcctgctgtgcaccttgcccttcgtgctgcactccctgcgagacacctcagacacgccgctgtgccagctctcccagggcatctacctgaccaacaggtacatgagcatcagcctggtcacggccatcgccgtggaccgctatgtggccgtgcggcacccgctgcgtgcccgcgggctgcggtcccccaggcaggctgcggccgtgtgcgcggtcctctgggtgctggtcatcggctccctggtggctcgctggctcctggggattcaggagggcggcttctgcttcaggagcacccggcacaatttcaactccatggcgttcccgctgctgggattctacctgcccctggccgtggtggtcttctgctccctgaaggtggtgactgccctggcccagaggccacccaccgacgtggggcaggcagaggccacccgcaaggctgcccgcatggtctgggccaacctcctggtgttcgtggtctgcttcctgcccctgcacgtggggctgacagtgcgcctcgcagtgggctggaacgcctgtgccctcctggagacgatccgtcgcgccctgtacataaccagcaagctctcagatgccaactgctgcctggacgccatctgctactactacatggccaaggagttccaggaggcgtctgcactggccgtggctcccagtgctaaggcccacaaaagccaggactctctgtgcgtgaccctcgcctaagaggcgtgctgtgggcgctgtgggccaggtctcgggggctccgggaggtgctgcctgccaggggaagctggaaccagtagcaaggagcccgagatcagccctgaactcactgtgtattctcttggagccttgggtgggcagggacggcccaggtacctgctctcttgggaagagagagggacagggacaagggcaagaggactgaggccagagcaaggccaatgtcagagacccccgggatggggcctcacacttgccacccccagaaccagctcacctggccagagtgggttcctgctggccagggtgcagccttgatgacacctgccgctgcccctcggggctggaataaaactccccacccagagtc

SEQ ID NO: 11600 - DNA, 2032 bp, Homo sapiens; identical to SEQ ID NO: 11597
  source 1..2032: mol_type = unassigned DNA

SEQ ID NO: 11601 - DNA, 3021 bp, Homo sapiens
  source 1..3021: mol_type = unassigned DNA
ggggttggaatcccgcttctcctcggcagcagtaggctcgcaagtcgctggggttaggtggggcaagagtttcgccggcgcatcagcgctgcttcggactgtttgcaacgtgtttccagcgagctgggagcggggttgtgactgcgagtcgtctgggggagggggacttgtttttcttttcctctagagacctcggcttgcaactggatcaaacgctgtcgaaaggatgtaaataggcagagcaactgttaccaagaaggccaccacccccacccaaaggcagtgaggagtgtggggcttcgtctgggctcccccgagtctcaacagtaatcaacagtcaggtgttgattgcaacttttcaaggtcagccaccgggagtagcctattccctctaggaaccttggagggcataccttgctgggactcaacttggctgagaaatgcacaagatgccaaaggaggaaggattatagggggcgtgtgtgtgacccccaagaccgatcttccgctatcaccctaatctccggttccccgctacccgggcgggggtgagtatgtgacatgtgcctaactctcagcagcaacttcggcagcaggtgtcgatcctaactaagcaggagctgcggctgccgggtgtgccctcaccaagccatgcgagccccgggcgcgcttctcgcccgcatgtcgcggctactgcttctgctactgctcaaggtgtctgcctcttctgccctcggggtcgcccctgcgtccagaaacgaaacttgtctgggggagagctgtgcacctacagtgatccagcgccgcggcagggacgcctggggaccgggaaattctgcaagagacgttctgcgagcccgagcacccagggaggagcagggggcagcgtttcttgcgggaccctcctgggacctgccggcggccccgggccgtgacccggctgcaggcagaggggcggaggcgtcggcagccggacccccgggacctccaaccaggccacctggcccctggaggtggaaaggtgctcggggtcaggagccttctgaaactttggggagagggaaccccacggccctccagctcttccttcagatctcagaggaggaagagaagggtcccagaggcgctggcatttccgggcgtagccaggagcagagtgtgaagacagtccccggagccagcgatcttttttactggccaaggagagccgggaaactccagggttcccaccacaagcccctgtccaagacggccaatggactggcggggcacgaagggtggacaattgcactcccgggccgggcgctggcccagaatggatccttgggtgaaggaatccatgagcctgggggtccccgccggggaaacagcacgaaccggcgtgtgagactgaagaaccccttctacccgctgacccaggagtcctatggagcctacgcggtcatgtgtctgtccgtggtgatcttcgggaccggcatcattggcaacctggcggtgatgtgcatcgtgtgccacaactactacatgcggagcatctccaactccctcttggccaacctggccttctgggactttctcatcatcttcttctgccttccgctggtcatcttccacgagctgaccaagaagtggctgctggaggacttctcctgcaagatcgtgccctatatagaggtcgcttctctgggagtcaccactttcaccttatgtgctctgtgcatagaccgcttccgtgctgccaccaacgtacagatgtactacgaaatgatcgaaaactgttcctcaacaactgccaaacttgctgttatatgggtgggagctctattgttagcacttccagaagttgttctccgccagctgagcaaggaggatttggggtttagtggccgagctccggcagaaaggtgcattattaagatctctcctgatttaccagacaccatctatgttctagccctcacctacgacagtgcgagactgtggtggtattttggctgttacttttgtttgcccacgcttttcaccatcacctgctctctagtgactgcgaggaaaatccgcaaagcagagaaagcctgtacccgagggaataaacggcagattcaactagagagtcagatgaactgtacagtagtggcactgaccattttatatggattttgcattattcctgaaaatatctgcaacattgttactgcctacatggctacaggggtttcacagcagacaatggacctccttaatatcatcagccagttccttttgttctttaagtcctgtgtcaccccagtcctccttttctgtctctgcaaacccttcagtcgggccttcatggagtgctgctgctgttgctgtgaggaatgcattcagaagtcttcaacggtgaccagtgatgacaatgacaacgagtacaccacggaactcgaactctcgcctttcagtaccatacgccgtgaaatgtccacttttgcttctgtcggaactcattgctgaaggacagtacttggttgggtcagatttatttgtttgattttcatatcccgtgaaagtttttaattcatatttttccttatagggaaaaatgcaaaaaagaaacaataaagaaagaaatattaactactgtagaactgattttacaaattaatatttgtgctttgaaaaaaagtttctatttagttatttaagaagaatgagaaggccaatagttttagattattttatctggtatggtgctaatattttatttgaaaaaagttactgcaacttaacttaaaattgctaacgttttttcttcttttaaaaatacaattattgtatattgattatagcaatgtgattttgtaggttattttatatttgagttgtgattgaaagtatgttgtatatggtattgtgagatgatttgtacttggaagcattcacaaagtagcaccaaataaattacactttattctttaatgtcattgtcaatctacttttaaccaatattcaataaatcttctaattgccttaaagatacaa

SEQ ID NO: 11602 - DNA, 2784 bp, Homo sapiens
  source 1..2784: mol_type = unassigned DNA
atgattaatcgctgaccaccccgcctcccgcagctcgggagagggtgctctgggaatgtggaccggggctctcaagtgccggcagctggaaaggaagaggagtgctgcgaggcggagtgcgccctcggcgaagaggggcagaggcggagcgccaggtgctgcggtctcactcccagccagccaggagtttagaacgttcttcctccgccctctccccgcctcgccccagccacatacactcccaaacctcaacacccaggcgcctcctgggcctctcctaggttgggctgctccagcaagtttccatgaaagcacctgaaatactaagttaccttcgcgaggagaactcgagtgagataaaatcgtgcgcccacgcaggtgagtttgcagccaagaattttggacgctgctgggaggagaaagggaagttgagaaagtctttggacctggtagcctggtgctctttctcatggcttcacccagcctcccgggcagtgactgctcccaaatcattgatcacagtcatgtccccgagtttgaggtggccacctggatcaaaatcacccttattctggtgtacctgatcatcttcgtgatgggccttctggggaacagcgccaccattcgggtcacccaggtgctgcagaagaaaggatacttgcagaaggaggtgacagaccacatggtgagtttggcttgctcggacatcttggtgttcctcatcggcatgcccatggagttctacagcatcatctggaatcccctgaccacgtccagctacaccctgtcctgcaagctgcacactttcctcttcgaggcctgcagctacgctacgctgctgcacgtgctgacactcagctttgagcgctacatcgccatctgtcaccccttcaggtacaaggctgtgtcgggaccttgccaggtgaagctgctgattggcttcgtctgggtcacctccgccctggtggcactgcccttgctgtttgccatgggtactgagtaccccctggtgaacgtgcccagccaccggggtctcacttgcaaccgctccagcacccgccaccacgagcagcccgagacctccaatatgtccatctgtaccaacctctccagccgctggaccgtgttccagtccagcatcttcggcgccttcgtggtctacctcgtggtcctgctctccgtagccttcatgtgctggaacatgatgcaggtgctcatgaaaagccagaagggctcgctggccgggggcacgcggcctccgcagctgaggaagtccgagagcgaagagagcaggaccgccaggaggcagaccatcatcttcctgaggctgattgttgtgacattggccgtatgctggatgcccaaccagattcggaggatcatggctgcggccaaacccaagcacgactggacgaggtcctacttccgggcgtacatgatcctcctccccttctcggagacgtttttctacctcagctcggtcatcaacccgctcctgtacacggtgtcctcgcagcagtttcggcgggtgttcgtgcaggtgctgtgctgccgcctgtcgctgcagcacgccaaccacgagaagcgcctgcgcgtacatgcgcactccaccaccgacagcgcccgctttgtgcagcgcccgttgctcttcgcgtcccggcgccagtcctctgcaaggagaactgagaagattttcttaagcacttttcagagcgaggccgagccccagtctaagtcccagtcattgagtctcgagtcactagagcccaactcaggcgcgaaaccagccaattctgctgcagagaatggttttcaggagcatgaagtttgaatgtcaagcgagggagccttgagtgggaactggccctccagccctaagaaaacgtcactctcactctgcagtctcaaactatgcccccatcagggatggaatggacactggaggctttacaaaaggcagatgcccacctcagtgacttctaaggactgactctgccagcctggccttgactccggttacacagacatgggggtgaactttcactccacctccttccttcaagtacatactgaaaattcagtcaggctgaatttattcagaatgctttaccgagctctttcattatttgcacaggaacaaaagagaacacggactcccgctccctacccagaataaaaggacacccagaagaaactcactcagggaggtggggggttgggggcgagggctggaagaacaatgcaggagggggtggcatctccttcagcttcagcagtgtgccgagaagagggctaatttgaggaacaggatggtggtgcggagccctggcctgagggccgaggcagaacttccccttttcttgggccttggcccgttacaaagaggggtgttgcagcagctgatgcaaactgagttcagtttccctggggagcagaaggactggtacccggcagaggcgatgagacaggccgctgatgatgcacaggacttgcggtacatgatccctgtaacacagacccaaaggagctgagttaacgtgcaccggcaaaagaatagctgtccctctcagcccaaatccaaacggacagctcttccttactcctcccacagcccagagactaggtgaggtcagggaagtgcttcggattgtctcattgatattcaagatagatggtgaaagagacaggcactatttcattagttttaacaaaactgttccaaaagcgatttgagatgccaatacctgtgaatacctgttaataaagagctgttaaatagactta

SEQ ID NO: 11603 - DNA, 3045 bp, Homo sapiens
  source 1..3045: mol_type = unassigned DNA
gctgttctgccccgcgggggcatccgctgggtccccgcgccgttgtcaagaccggggacctggacgcagcggagagaggtgccgccgcccgccccgtccagtcgccgcgcgcaggcactgcagtcagcggtgaactgacttcatcccaatccctcagcccccaccaggaccagtctggagtccctcccctgcccccattgaaatttcccttccgtccccaaacttacctctgatctagaccttactcacctccttcctgtttcctaagactccttcctgccgtccacagaccgagccttttatctttgtccaccctgtgccagacacctccttttccagaaccttctccttactggtgaccttacttatctctgttgctttctggggtcctaggaaatgccagcactcccacccacattgcctgaactttccaacactccctaactgcgctgtgtcctatctcaacactttctcatgtatttcttgtgtcttctagaacattcccccgccattattacttcaatatggctacacatacttcctaattgccctgcaaaccatctccttctcaccattgcccagcgatgctttcgtctcctccataaacactcccggagaccaatttttgtgtcacccccatactccctcgttgacacactgactccatacataacctccttgaaaaacctctttattaatctcaccatcctccagacttccctcctgtcataattccatccctcctccaacttttccctctcaagctctgcccttcccagcccagcccagcctacccaacctcatctcttccctgtagaccacatcccaccatgttcccctgagcctccaaggaaggggctcagggggccccatggcctcccgctccctgtggccccacagcccccgtgggccaggggaagcgccccagaagccgaagtgcccaccatgggcaaccacacgtgggagggctgccacgtggactcgcgcgtggaccacctctttccgccatccctctacatctttgtcatcggcgtggggctgcccaccaactgcctggctctgtgggcggcctaccgccaggtgcaacagcgcaacgagctgggcgtctacctgatgaacctcagcatcgccgacctgctgtacatctgcacgctgccgctgtgggtggactacttcctgcaccacgacaactggatccacggccccgggtcctgcaagctctttgggttcatcttctacaccaatatctacatcagcatcgccttcctgtgctgcatctcggtggaccgctacctggctgtggcccacccactccgcttcgcccgcctgcgccgcgtcaagaccgccgtggccgtgagctccgtggtctgggccacggagctgggcgccaactcggcgcccctgttccatgacgagctcttccgagaccgctacaaccacaccttctgctttgagaagttccccatggaaggctgggtggcctggatgaacctctatcgggtgttcgtgggcttcctcttcccgtgggcgctcatgctgctgtcgtaccggggcatcctgcgggccgtgcggggcagcgtgtccaccgagcgccaggagaaggccaagatcaagcggctggccctcagcctcatcgccatcgtgctggtctgctttgcgccctatcacgtgctcttgctgtcccgcagcgccatctacctgggccgcccctgggactgcggcttcgaggagcgcgtcttttctgcataccacagctcactggctttcaccagcctcaactgtgtggcggaccccatcctctactgcctggtcaacgagggcgcccgcagcgatgtggccaaggccctgcacaacctgctccgctttctggccagcgacaagccccaggagatggccaatgcctcgctcaccctggagaccccactcacctccaagaggaacagcacagccaaagccatgactggcagctgggcggccactccgccctcccagggggaccaggtgcagctgaagatgctgccgccagcacaatgaaccccgagtggcacagaatccccagttttcccctctcatcccacagtcccttctctcctggtctggtgtatgcaaattgtatggaaaaagggctgtgttaatattcataagaatacaagaacttaggaagagtgaggttggtgtgtcactggtcaacctttgtgctcccagatcccatcacagtttggcgattgtggagggcctcctgaaggaggagatgagtaaatatatttttttggagacagggtctcactgtgttgcccaggctggagtgcagtagtgcagtcgtggctcactgcagcctccacctcctgggctctccagcgatcttcccacatcagcctcccgagtagctgggaccacaaatgtgagccaccatgcctggctaatttttgtactttttgtagaaatggagtctcactatgtttcccaggctgatcttgaactcctgggctcaagagatcctcctgccttggcctcccaaagtgctcagattagagatgtgagccgccatgtctggccagataaattaagtcaaacatttggtttccagaaaataaagacaaatagagaaggttagatttttttttttccaacaagtggataaaagtctgtgactcgggggaaagtggaaggagaaatgcagccgatatagagtcattatgtttgcaaagcccctggtcatacaggccagggaacataagaccgcaattctaagtttctagataaacagcgatctccaagtcaagactgaggatgaagagggagaatgtcagaactcaagtgaagggcaatcagggcagactgcctggaggagtgatgccagaaggtttgggaagaaggtgtgggacaagaagaaagggtatttattcattcattcaacagaggtttatgtagggcactgtgctgggtggggctggggacacaacaatgactgaggcagcctggccttgccttcacagggctcaccatacacaagtaaataaaaaatatgtaatgtttggaattgct

SEQ ID NO: 11604 - DNA, 1795 bp, Homo sapiens
  source 1..1795: mol_type = unassigned DNA
cccctttttgcatactgaccagccctggcaacggagctcaaggcatctttgtgccactgctcaacagtgagtgatgtcatgggcacggccaggtctttatcagttctgccggataaatagccaactgcactaggtctggagagacagcaaggtgctgtgcggcagagcatttggggtctcaaagaagcagtggccaccaccatggatacaggccccgaccagtcctacttctccggcaatcactggttcgtcttctcggtgtaccttctcactttcctggtggggctccccctcaacctgctggccctggtggtcttcgtgggcaagctgcggtgccgcccggtggccgtggacgtgctcctgctcaacctgaccgcctcggacctgctcctgctgctgttcctgcctttccgcatggtggaggcagccaatggcatgcactggcccctgcccttcatcctctgcccactctctggattcatcttcttcaccaccatctatctcaccgccctcttcctggcagctgtgagcattgaacgcttcctgagtgtggcccacccactgtggtacaagacccggccgaggctggggcaggcaggtctggtgagtgtggcctgctggctgttggcctctgctcactgcagcgtggtctacgtcatagaattctcaggggacatctcccacagccagggcaccaatgggacctgctacctggagttctggaaggaccagctagccatcctcctgcccgtgcggctggagatggctgtggtcctctttgtggtcccgctgatcatcaccagctactgctacagccgcctggtgtggatcctcggcagagggggcagccaccgccggcagaggagggtggcggggctggtggcggccacgctgctcaacttccttgtctgctttgggccctacaacgtgtcccatgtcgtgggctatatctgcggtgaaagcccggtgtggaggatctacgtgacgcttctcagcaccctgaactcctgtgtcgacccctttgtctactacttctcctcctccgggttccaagccgactttcatgagctgctgaggaggttgtgtgggctctggggccagtggcagcaggagagcagcatggagctgaaggagcagaagggaggggaggagcagagagcggaccgaccagctgaaagaaagaccagtgaacactcacagggctgtggaactggtggccaggtggcctgtgctgaaaactaggtcctccgggggaggagggtgtagctggcgtgtcatcctcagggcgcttcctcgctcacgccaggagggacttggagtggcgagctggggcccgatggggcttgggggcagagtagacatctagcctccctaagggtatgcgcgctaaagcccagctctcgatctcacctccatccccatccacccacacactatggattgggctctgggaaggggtcagggtgagaggctgctctggagaacaatgaggtcctcatagcagcaggcagctcctgtgttttcttgagggtggcagaggagctaagagcagtgcccaggtctgagggggctgcccagtgagtggcaggggcaggagaggggagaaccccatcctcagagctgctcccagccagcgagtcaggagcgggggagacagggctccagggatgaggccgcattctgctcccacagtgccttttccagaaagttcccattgctcaataaatgtggatcatcagagacatttatgaacaatgacagaagaaaaattacccaaataaatgtggaagcaagc

SEQ ID NO: 11605 - DNA, 1725 bp, Homo sapiens
  source 1..1725: mol_type = unassigned DNA
cagaggtccacagacatccaggaagatgcagccagcagacaaagaatggcagccacccaagtgctgaggggagccctcccggccatttctgtcccagctccaagggtctctccacgatggcctgcaacagcacgtcccttgaggcttacacatacctgctgctgaacaccagcaacgcctcagactcggggtccacccagttgcccgcacccctcaggatctccttggccatagtgatgctgctgatgaccgtggtggggttcctgggcaacactgtggtctgcatcatcgtgtaccagaggccggctatgcgctcggccatcaacctgctgctggccaccctggccttctccgacatcatgctgtccctctgctgcatgcccttcaccgccgtcaccctcatcaccgtgcgctggcactttggggaccacttctgccgcctctcagccacgctctactggttttttgtcctggagggcgtggccatcctgctcatcatcagcgtggaccgcttcctcatcatcgtccagcgccaggacaagctgaacccgcgcagggccaaggtgatcatcgcggtctcctgggtgctgtccttctgcatcgcggggccctcgctcacgggctggacgctggtggaggtgccggcgcgggccccacagtgcgtgctgggctacacggagctccccgctgaccgcgcctacgtggtcaccttggtggtggccgtgttcttcgcgccctttggcgtcatgctgtgcgcctacatgtgcatcctcaacacggtccgcaagaacgccgtgcgcgtgcacaaccagtcggacagcctggacctgcggcagctcaccagggcgggcctgcggcgcctgcagcggcagcaacaggtcagcgtggacttgagcttcaagaccaaggccttcaccaccatcctgatcctcttcgtgggcttctccctctgctggctgccccactccgtctacagcctcctgtctgtgtttagccagcgcttttactgcggttcctccttctacgccaccagcacctgcgtcctgtggctcagttacctcaagtccgtcttcaaccccatcgtctactgctggagaatcaaaaaattccgcgaggcctgcatagagttgctgccccagaccttccaaatcctccccaaagtgcctgagcggatccgaaggagaatccagccaagcacagtctacgtgtgcaatgaaaaccagtctgcggtttagggggtcagggggccacagagaaggggcagctgagccccagtcccagggtggatctgtcctgctctgttccctggcatgttggtcatagtctgcactttgtggtggcaatttaagcacaaaggtactcatttgtaatcagatgagctgcagctcccaaatttcaaattttggcacgatgaattatttttgtttctctttgcagagagccaaatatggggctgatgggaactgcaacgtcattaagtcaaaaatggagtgggctggggagtgcagaagttgggcagaaagggaggaggagggcaacagggaatgaagctggttgagtgtggggcaggaggactggtcagtcacaagagcttcaacctgccctgcgagccctctctgcacctgctcaagagaaaccctgagaaaccccagtaggtgtgagctcctgggtgttcattcattttgtttgacaccagggttcttcagctattgatgtttgtggtgt

SEQ ID NO: 11606 - DNA, 1951 bp, Homo sapiens
  source 1..1951: mol_type = unassigned DNA
tgtttgctgtctggacctggctgctgatcctgagcctgctgggagatcttaacgatccccaggagcaacatggggcccaccctagcggttcccaccccctatggctgtattggctgtaagctaccccagccagaatacccaccggctctaatcatctttatgttctgcgcgatggttatcaccatcgttgtagacctaatcggcaactccatggtcattttggctgtgacgaagaacaagaagctccggaattctggcaacatcttcgtggtcagtctctctgtggccgatatgctggtggccatctacccataccctttgatgctgcatgccatgtccattgggggctgggatctgagccagttacagtgccagatggtcgggttcatcacagggctgagtgtggtcggctccatcttcaacatcgtggcaatcgctatcaaccgttactgctacatctgccacagcctccagtacgaacggatcttcagtgtgcgcaatacctgcatctacctggtcatcacctggatcatgaccgtcctggctgtcctgcccaacatgtacattggcaccatcgagtacgatcctcgcacctacacctgcatcttcaactatctgaacaaccctgtcttcactgttaccatcgtctgcatccacttcgtcctccctctcctcatcgtgggtttctgctacgtgaggatctggaccaaagtgctggcggcccgtgaccctgcagggcagaatcctgacaaccaacttgctgaggttcgcaattttctaaccatgtttgtgatcttcctcctctttgcagtgtgctggtgccctatcaacgtgctcactgtcttggtggctgtcagtccgaaggagatggcaggcaagatccccaactggctttatcttgcagcctacttcatagcctacttcaacagctgcctcaacgctgtgatctacgggctcctcaatgagaatttccgaagagaatactggaccatcttccatgctatgcggcaccctatcatattcttctctggcctcatcagtgatattcgtgagatgcaggaggcccgtaccctggcccgcgcccgtgcccatgctcgcgaccaagctcgtgaacaagaccgtgcccatgcctgtcctgctgtggaggaaaccccgatgaatgtccggaatgttccattacctggtgatgctgcagctggccaccccgaccgtgcctctggccaccctaagccccattccagatcctcctctgcctatcgcaaatctgcctctacccaccacaagtctgtctttagccactccaaggctgcctctggtcacctcaagcctgtctctggccactccaagcctgcctctggtcaccccaagtctgccactgtctaccctaagcctgcctctgtccatttcaaggctgactctgtccatttcaagggtgactctgtccatttcaagcctgactctgttcatttcaagcctgcttccagcaaccccaagcccatcactggccaccatgtctctgctggcagccactccaagtctgccttcagtgctgccaccagccaccctaaacccaccactggccacatcaagccagctaccagccatgctgagcccaccactgctgactatcccaagcctgccactaccagccaccctaagcccactgctgctgacaaccctgagctctctgcctcccattgccccgagatccctgccattgcccaccctgtgtctgacgacagtgacctccctgagtcggcctctagccctgccgctgggcccaccaagcctgctgccagccagctggagtctgacaccatcgctgaccttcctgaccctactgtagtcactaccagtaccaatgattaccatgatgtcgtggttattgatgttgaagatgatcctgatgaaatggctgtgtgaaaaatgctctcgtaggtggccaggcagt

SEQ ID NO: 11607 - DNA, 864 bp, Homo sapiens
  source 1..864: mol_type = unassigned DNA
gctgtcatttgctctctgactctcagagagggaggcacgctttcctggagctcctggtgacagaacaggtgtttgctgtctggacctggctgctgatcctgagcctgctgggagatcttaacgatccccaggagcaacatggggcccaccctagcggttcccaccccctatggctgtattggctgtaagctaccccagccagaatacccaccggctctaatcatctttatgttctgcgcgatggttatcaccatcgttgtagacctaatcggcaactccatggtcattttggctgtgacgaagaacaagaagctccggaattctggcaacatcttcgtggtcagtctctctgtggccgatatgctggtggccatctacccataccctttgatgctgcatgccatgtccattgggggctgggatctgagccagttacagtgccagatggtcgggttcatcacagggctgagtgtggtcggctccatcttcaacatcgtggcaatcgctatcaaccgttactgctacatctgccacagcctccagtacgaacggatcttcagtgtgcgcaatacctgcatctacctggtcatcacctggatcatgaccgtcctggctgtcctgcccaacatgtacattggcaccatcgagtacgatcctcgcacctacacctgcatcttcaactatctgaacaaccctgtcttcactgttaccatcgtctgcatccacttcgtcctccctctcctcatcgtgggtttctgctacgtgaggatctggaccaaagtgctggcggcccgtgaccctgcagggcagaatcctgacaaccaacttgctgagcctacttcaacagctgcctcaacgctgtga

SEQ ID NO: 11608 - DNA, 1472 bp, Homo sapiens
  source 1..1472: mol_type = unassigned DNA
tgtagccaagtctgcaggtgtctttaaatttccaagccatgaatgaatccaggtggactgaatggaggatcctgaacatgagcagtggcattgtgaatgtgtccgagcgtcactcctgcccacttggatttggccactacagtgtggtggatgtctgcatcttcgagacagtggttattgtgttgctgacatttctgatcattgctgggaatctaacagttatctttgtctttcattgtgctccactgttacatcattatactaccagctatttcattcagacgatggcatatgctgatcttttcgttggagttagctgcttggttcctactctgtcacttctccactactccacaggtgtccacgagtcattgacttgccaggtttttggatatatcatctcagttctaaaaagtgtttctatggcatgtcttgcttgcatcagtgtggatcgttatcttgcaataaccaagcctctttcctacaatcaactggtcaccccttgtcgcttgagaatttgcattattttgatctggatctactcctgcctaattttcttgccttccttttttggctgggggaaacctggttaccatggtgacatttttgaatggtgtgccacgtcttggctcaccagtgcctattttactggctttattgtttgtttactttatgctcctgctgcctttgttgtctgcttcacttacttccacattttcaaaatttgccgtcagcacaccaaagagataaatgaccgaagagcccgattccctagtcatgaggtagattcttccagagagactggacacagccctgaccgtcgctacgccatggttttgtttaggataaccagtgtattttatatgctgtggctcccctatataatttactttcttctagaaagctcccgggtcttggacaatccaactctgtccttcttaacaacctggcttgcaataagtaatagtttttgtaactgtgtaatatacagcctctccaacagcgttttccggctaggcctccgaagactgtctgagacaatgtgcacatcctgtatgtgtgtgaaggatcaggaagcacaagaacccaaacctaggaaacgggctaattcttgctccatttgaagagagctacatagtaaatcaaatgtaatctgacagtggttttggatcatattctagattcatctggaaatttgccatcagagaaatatttacttgaatagttgactgtaaaatgaagtatgagactaaaggtttctctctttttttttctttttcatggaagaaactaaagggaaggatgtatagagggttagctcatgaaataattatagcatgtgagtattagtgtgcagtaataggaaaaattaagcactgagatgaaaaagaatatctcaaatcttctgcaggacatgagcaagccccttggctcagcatttctgtctttctgtctgactgtaccctgcctct

SEQ ID NO: 11609 - DNA, 1523 bp, Homo sapiens
  source 1..1523: mol_type = unassigned DNA
agaatgctctgggctttcaaaatggttacttttcggctgggcatggttttaaatggttacttttcctctcctgttgcctgaagcctggggatttttctcctgtcttcacagtgagaaactggtgaccttcctggaggtaaccccaggaaaatgtggggcttccctactacagggaccccaggactttatgacacttaagctagcccaaacactcagcctccagcaattcgtcaggtaccatgtaagtgctcctacaagttgccggctcctgggtggcttctgcttctggaagttgtgattcaatgggcatgaattgctgtgtgatgctggggaggtgtttgtgattcttgacaaagtcatttgaatccatcacttcaagagagtgaaaggagccccgtctgatctgttggtgttgtaggaagaaacatgagtcagcaaaacaccagtggggactgcctgtttgacggtgtcaacgagctgatgaaaaccctacagtttgcagtccacatccccaccttcgtcctgggcctgctcctcaacctgctggccatccatggcttcagcaccttccttaagaacaggtggcccgattatgctgccacctccatctacatgatcaacctggcagtctttgacctgctgctggtgctctccctcccattcaagatggtcctgtcccaggtacagtcccccttcccgtccctgtgcaccctggtggagtgcctttacttcgtcagcatgtacggaagcgtcttcaccatctgcttcatcagcatggaccggttcttggccatccgttacccgctactggtgagccacctccggtcccccaggaagatctttgggatctgctgcaccatctgggtcctggtgtggaccggaagcatccctatctacagtttccatgggaaagtggaaaaatacatgtgcttccacaacatgtctgatgatacctggagcgccaaggtcttcttcccgctggaggtgtttggcttcctccttcccatgggcatcatgggcttctgctgctccaggagcatccacatcctgctgggccgccgagaccacacccaggactgggtgcagcagaaagcctgcatctacagcatcgcagccagcctggctgtcttcgtggtctccttcctcccagtccacctggggttcttcctgcagttcctggtgagaaacagctttatcgtagagtgcagagccaagcagagcatcagcttcttcttgcaattgtccatgtgtttctccaacgtcaactgctgcctggatgttttctgctactactttgtcatcaaagaattccgcatgaacatcagggcccaccggccttccagggtccagctggtcctgcaggacaccacgatctcccggggctaacggaaggacatcctgttcaggggaagaaagccctggccctgaattctggtaacggatatcgcgttccagggttttgatgtggtgggatgatccgcaccatcttcactgatgtgcttccctttgatgcccattgagtg

SEQ ID NO: 11610 - DNA, 3828 bp, Homo sapiens
  source 1..3828: mol_type = unassigned DNA
caggcctggaggagaaatgacatctctcagccctctcagctgcaccggaccaccaacagttgtgattcaatgggcatgaattgctgtgtgatgctggggaggtgtttgtgattcttgacaaagtcatttgaatccatcacttcaagagagtgaaaggagccccgtctgatctgttggtgttgtaggaagaaacatgagtcagcaaaacaccagtggggactgcctgtttgacggtgtcaacgagctgatgaaaaccctacagtttgcagtccacatccccaccttcgtcctgggcctgctcctcaacctgctggccatccatggcttcagcaccttccttaagaacaggtggcccgattatgctgccacctccatctacatgatcaacctggcagtctttgacctgctgctggtgctctccctcccattcaagatggtcctgtcccaggtacagtcccccttcccgtccctgtgcaccctggtggagtgcctttacttcgtcagcatgtacggaagcgtcttcaccatctgcttcatcagcatggaccggttcttggccatccgttacccgctactggtgagccacctccggtcccccaggaagatctttgggatctgctgcaccatctgggtcctggtgtggaccggaagcatccctatctacagtttccatgggaaagtggaaaaatacatgtgcttccacaacatgtctgatgatacctggagcgccaaggtcttcttcccgctggaggtgtttggcttcctccttcccatgggcatcatgggcttctgctgctccaggagcatccacatcctgctgggccgccgagaccacacccaggactgggtgcagcagaaagcctgcatctacagcatcgcagccagcctggctgtcttcgtggtctccttcctcccagtccacctggggttcttcctgcagttcctggtgagaaacagctttatcgtagagtgcagagccaagcagagcatcagcttcttcttgcaattgtccatgtgtttctccaacgtcaactgctgcctggatgttttctgctactactttgtcatcaaagaattccgcatgaacatcagggcccaccggccttccagggtccagctggtcctgcaggacaccacgatctcccggggctaacggaaggacatcctgttcaggggaagaaagccctggccctgaattctggtaacggatatcgcgttccagggttttgatgtggtgggatgatccgcaccatcttcactgatgtgcttccctttgatgcccattgagtgccagctttgctcattataccccaaagaccttttttccactgcccagacagcttataccacccagtgttcagggatctctgaagaacccacagaccaggtgaattactgatttctaagtccaaaaactatagagcagaagaattgagaaagagaatgagaccatgtcaacaaggctgtttccaactctccccattttcctgttcgactgggaggttctggaaagaaagagagagagagaaaagaggtaaaggagggagccaagagagtcagttattggggagagtgtcttgggcagaggtggggtggtagggatgagtgaagtccctttttagtttgggtgtcccagaacagagcagacttgcattttccagtcccttctggaactgtgttgccaaaagcctcactgagatgacagcaagaaggggtggtgttggggctgggcaagtagcatggatcaccccaagtttccagtgagcctcagaaaggtgaaggaagccagccacacctttccgtgcccgtgagaagactgcaaaatgactgagtggggtgttgatgacatccaagagccatgaggggggagaggaaaggacacttctggggaaggaagaagacaggcccagggctggaagcacacagcccctcccctatcaccatcagggtgtccacagcacggagtgttggtgctggcccagggtgaagagagacagtgagagacggcctgggagcggggagaccccgacctgctttctatcttaaacagactgggaagttgctcattacagctagcttccttgaaaacaatggcaaagaatcaggcctgccttggttccaccataggagggtggaggaggtgctgtcttactcacctgcatcctggctgggcagctggcacccgtggcactgcccatggagccgtccctccctggcagctgggagggagatgaggcagctaggcacaagggtgtggccttgagaaagaaggcaagggggggtccctgctggtcccaggaaactgtaaacaattgagtcacgcctggatggcttctcaacggatctggaggaggagtgcaagtgacagcggaagcctcccaatgactcagctgctccggagagtgaaatgatgagaaggatccattgtggggtggttttgcatgacagagcgagtgggatgaggagtaactgatgagacttcatgtgagcaaggtcttcaggaggaaaagcaactgaggtctacttgtaggatctgggctcagtgggggctgaagggcttgggaggggtggtgacctgaggggaagaagagaagcatttggataaacctggacctgtggggaggaggaggaggaagaggaagaggaaaaggaggggaagctgagccgtggccctaggcttgaagcctgcagggagtgcagggtgggtggggaacctggctgagctgcttcctgcctgagagctttcccagctggcctaagagccatggacggacaggagtcgccttctcaggagcagctcccgctgttgctgtgttcaagtggcaccctgtacacctcctcctaggtggatggagggaagggtgaggaagagagcgtcaatgaaggggtggaagtggatgtggaggagtgaccagaccagaccagaccagaccagagggatcggaggctcaggccccctgagctgggcctctaagaaccacagccacagagtcaggctctgcagacccagaggtaaggctgcctggctgccccaaaccccagacactcctctccttgcctgcaggctgccctctcccatggccaccctagacagagacccacccgtgatactctgagggagccagactttcacatgcaacggggcatttggggctggttcgggtcagtgtctacgggtggtggatttagtgaccaccctcctcccacttctttctctgcacgaggagttgggagcctgcctggtggagttgagtgatgcccgtcatgtgcacttgggtctaccaatgtgcttaaggccagatgggcttcctaagagacaagggtgggtggacctaaccaactatcatccccagcgatgttcaaacataaaatcttatctatgtgcagcatgactctctccaggtgacagaaagggctctagacagctgagaggacctgatcatgtagggagggacggggaggggagccaggacccaggagctgcatggctgtaagaggaaggtccttggagggtatcagcagtctcagtgtgatgtgacaactatggacctgtgggtgtgccctggggacccctgacccatcccaaaacactgtggaaagaagggcctcttctccgtggggacccgtgtctgtgggagcgggcacaggtccatgctgcaggccactacggctgctcggcaggagggccgagagtttggacccacatagctgcaacccaagctggcccataatcagcagtggggcccagcagcacaggaggggcggacggttagctttggaaaaaatgacttgattaatctgattcgccaaataaatagattcatgtga

SEQ ID NO: 11611 - DNA, 919 bp, Homo sapiens
  source 1..919: mol_type = unassigned DNA
caggcctggaggagaaatgacatctctcagccctctcagctgcaccggaccaccaacagttgtgattcaatgggcatgaattgctgtgtgatgctggggaggtgtttgtgattcttgacaaagtcatttgaatccatcacttcaagagagtgaaaggagccccgtctgatctgttggtgttgtaggaagaaacatgagtcagcaaaacaccagtggggactgcctgtttgacggtgtcaacgagctgatgaaaaccctacagtttgcagtccacatccccaccttcgtcctgggcctgctcctcaacctgctggccatccatggcttcagcaccttccttaagaacaggtggcccgattatgctgccacctccatctacatgatcaacctggcagtctttgacctgctgctggtgctctccctcccattcaagatggtcctgtcccaggtacagtcccccttcccgtccctgtgcaccctggtggagtgcctttacttcgtcagcatgtacggaagcgtcttcaccatctgcttcatcagcatggaccggttcttggccatccgttacccgctactggtgagccacctccggtcccccaggaagatctttgggatctgctgcaccatctgggtcctggtgtggaccggaagcatccctatctacagtttccatgggaaagtggaaaaatacatgtgcttccacaacatgtctgatgatacctggagcgccaaggtcttcttcccgctggaggtgtttggcttcctccttcccatgggcatcatgggcttctgctgctccaggagcatccacatcctgctgggccgccgagaccacacccaggactgggtgcagcagaaagcctgcatctacagcatcgcagccagcctggctgtcttcgtggtctccttcctcccagtc

SEQ ID NO: 11612 - DNA, 2527 bp, Homo sapiens
  source 1..2527: mol_type = unassigned DNA
caggcctggaggagaaatgacatctctcagccctctcagctgcaccggaccaccaacagttgtgattcaatgggcatgaattgctgtgtgatgctggggaggtgtttgtgattcttgacaaagtcatttgaatccatcacttcaagagagtgaaaggagccccgtctgatctgttggtgttgtaggaagaaacatgagtcagcaaaacaccagtggggactgcctgtttgacggtgtcaacgagctgatgaaaaccctacagtttgcagtccacatccccaccttcgtcctgggcctgctcctcaacctgctggccatccatggcttcagcaccttccttaagaacaggtggcccgattatgctgccacctccatctacatgatcaacctggcagtctttgacctgctgctggtgctctccctcccattcaagatggtcctgtcccaggtacagtcccccttcccgtccctgtgcaccctggtggagtgcctttacttcgtcagcatgtacggaagcgtcttcaccatctgcttcatcagcatggaccggttcttggccatccgttacccgctactggtgagccacctccggtcccccaggaagatctttgggatctgctgcaccatctgggtcctggtgtggaccggaagcatccctatctacagtttccatgggaaagtggaaaaatacatgtgcttccacaacatgtctgatgatacctggagcgccaaggtcttcttcccgctggaggtgtttggcttcctccttcccatgggcatcatgggcttctgctgctccaggagcatccacatcctgctgggccgccgagaccacacccaggactgggtgcagcagaaagcctgcatctacagcatcgcagccagcctggctgtcttcgtggtctccttcctcccagtccacctggggttcttcctgcagttcctggtgagaaacagctttatcgtagagtgcagagccaagcagagcatcagcttcttcttgcaattgtccatgtgtttctccaacgtcaactgctgcctggatgttttctgctactactttgtcatcaaagaattccgcatgaacatcagggcccaccggccttccagggtccagctggtcctgcaggacaccacgatctcccggggctaacggaaggacatcctgttcaggggaagaaagccctggccctgaattctggtaacggatatcgcgttccagggttttgatgtggtgggatgatccgcaccatcttcactgatgtgcttccctttgatgcccattgagtgccagctttgctcattataccccaaagaccttttttccactgcccagacagcttataccacccagtgttcagggatctctgaagaacccacagaccaggtgaattactgatttctaagtccaaaaactatagagcagaagaattgagaaagagaatgagaccatgtcaacaaggctgtttccaactctccccattttcctgttcgactgggaggttctggaaagaaagagagagagagaaaagaggtggatggagggaagggtgaggaagagagcgtcaatgaaggggtggaagtggatgtggaggagtgaccagaccagaccagaccagaccagagggatcggaggctcaggccccctgagctgggcctctaagaaccacagccacagagtcaggctctgcagacccagaggtaaggctgcctggctgccccaaaccccagacactcctctccttgcctgcaggctgccctctcccatggccaccctagacagagacccacccgtgatactctgagggagccagactttcacatgcaacggggcatttggggctggttcgggtcagtgtctacgggtggtggatttagtgaccaccctcctcccacttctttctctgcacgaggagttgggagcctgcctggtggagttgagtgatgcccgtcatgtgcacttgggtctaccaatgtgcttaaggccagatgggcttcctaagagacaagggtgggtggacctaaccaactatcatccccagcgatgttcaaacataaaatcttatctatgtgcagcatgactctctccaggtgacagaaagggctctagacagctgagaggacctgatcatgtagggagggacggggaggggagccaggacccaggagctgcatggctgtaagaggaaggtccttggagggtatcagcagtctcagtgtgatgtgacaactatggacctgtgggtgtgccctggggacccctgacccatcccaaaacactgtggaaagaagggcctcttctccgtggggacccgtgtctgtgggagcgggcacaggtccatgctgcaggccactacggctgctcggcaggagggccgagagtttggacccacatagctgcaacccaagctggcccataatcagcagtggggcccagcagcacaggaggggcggacggttagctttggaaaaaatgacttgattaatctgattcgccaaataaatagattcatgtgatgccttgtga

SEQ ID NO: 11613 - DNA, 3174 bp, Homo sapiens
  source 1..3174: mol_type = unassigned DNA
aagcagggtctcactctgtcacccaggctggagtgcagtggcgcagttatagctcactgcagcctcgacctcctgggctcaagtgatccttccacctcagcctccctagtagctgggaccacaggtggtgacttccaagagtgactccgtcggaggaaaatgactccccagtcgctgctgcagacgacactgttcctgctgagtctgctcttcctggtccaaggtgcccacggcaggggccacagggaagactttcgcttctgcagccagcagttgcagagcctggagtcgaaactgacctctgtgagattcatgggggacatggtgtccttcgaggaggaccggatcaacgccacggtgtggaagctccagcccacagccggcctccaggacctgcacatccactcccggcaggaggaggagcagagcgagatcatggagtactcggtgctgctgcctcgaacactcttccagaggacgaaaggccggagcggggaggctgagaagagactcctcctggtggacttcagcagccaagccctgttccaggacaagaattccagccaagtcctgggtgagaaggtcttggggattgtggtacagaacaccaaagtagccaacctcacggagcccgtggtgctcactttccagcaccagctacagccgaagaatgtgactctgcaatgtgtgttctgggttgaagaccccacattgagcagcccggggcattggagcagtgctgggtgtgagaccgtcaggagagaaacccaaacatcctgcttctgcaaccacttgacctactttgcagtgctgatggtctcctcggtggaggtggacgccgtgcacaagcactacctgagcctcctctcctacgtgggctgtgtcgtctctgccctggcctgccttgtcaccattgccgcctacctctgctccagggtgcccctgccgtgcaggaggaaacctcgggactacaccatcaaggtgcacatgaacctgctgctggccgtcttcctgctggacacgagcttcctgctcagcgagccggtggccctgacaggctctgaggctggctgccgagccagtgccatcttcctgcacttctccctgctcacctgcctttcctggatgggcctcgaggggtacaacctctaccgactcgtggtggaggtctttggcacctatgtccctggctacctactcaagctgagcgccatgggctggggcttccccatctttctggtgacgctggtggccctggtggatgtggacaactatggccccatcatcttggctgtgcataggactccagagggcgtcatctacccttccatgtgctggatccgggactccctggtcagctacatcaccaacctgggcctcttcagcctggtgtttctgttcaacatggccatgctagccaccatggtggtgcagatcctgcggctgcgcccccacacccaaaagtggtcacatgtgctgacactgctgggcctcagcctggtccttggcctgccctgggccttgatcttcttctcctttgcttctggcaccttccagcttgtcgtcctctaccttttcagcatcatcacctccttccaaggcttcctcatcttcatctggtactggtccatgcggctgcaggcccggggtggcccctcccctctgaagagcaactcagacagcgccaggctccccatcagctcgggcagcacctcgtccagccgcatctaggcctccagcccacctgcccatgtgatgaagcagagattcggcctcgtcgcacactgcctgtggcccccgagcccggcccagccccaggccagtcagccgcagactttggaaagcccaacgaccatggagagatgggccgttgccatggtggacggactcccgggctgggcttttgaattggccttggggactactcggctctcactcagctcccacgggactcagaagtgcgccgccatgctgcctagggtactgtccccacatctgtcccaacccagctggaggcctggtctctccttacaacccctgggcccagccctcattgctgggggccaggccttggatcttgagggtctggcacatccttaatcctgtgcccctgcctgggacagaaatgtggctccagttgctctgtctctcgtggtcaccctgagggcactctgcatcctctgtcattttaacctcaggtggcacccagggcgaatggggcccagggcagaccttcagggccagagccctggcggaggagaggccctttgccaggagcacagcagcagctcgcctacctctgagcccaggccccctccctccctcagccccccagtcctccctccatcttccctggggttctcctcctctcccagggcctccttgctccttcgttcacagctgggggtccccgattccaatgctgttttttggggagtggtttccaggagctgcctggtgtctgctgtaaatgtttgtctactgcacaagcctcggcctgcccctgagccaggctcggtaccgatgcgtgggctgggctaggtccctctgtccatctgggcctttgtatgagctgcattgcccttgctcaccctgaccaagcacacgcctcagaggggccctcagcctctcctgaagccctcttgtggcaagaactgtggaccatgccagtcccgtctggtttccatcccaccactccaaggactgagactgacctcctctggtgacactggcctagggcctgacactctcctaagaggttctctccaagcccccaaatagctccaggcgccctcggccgcccatcatggttaattctgtccaacaaacacacacgggtagattgctggcctgttgtaggtggtagggacacagatgaccgacctggtcactcctcctgccaacattcagtctggtatgtgaggcgtgcgtgaagcaagaactcctggagctacagggacagggagccatcattcctgcctgggaatcctggaagacttcctgcaggagtcagcgttcaatcttgaccttgaagatgggaaggatgttctttttacgtaccaattcttttgtcttttgatattaaaaagaagtacatgttcattgtagagaatttggaaactgtagaagagaatcaagaagaaaaataaaaatcagctgttgtaatcacctagc

SEQ ID NO: 11614 - DNA, 3689 bp, Homo sapiens
  source 1..3689: mol_type = unassigned DNA
gcagggtctcactctgtcacccaggctggagtgcagtggcgcagttatagctcactgcagcctcgacctcctgggctcaagtgatccttccacctcagcctccctagtagctgggaccacaggtggtgacttccaagagtgactccgtcggaggaaaatgactccccagtcgctgctgcagacgacactgttcctgctgagtctgctcttcctggtccaaggtgcccacggcaggggccacagggaagactttcgcttctgcagccagcggaaccagacacacaggagcagcctccactacaaacccacaccagacctgcgcatctccatcgagaactccgaagaggccctcacagtccatgcccctttccctgcagcccaccctgcttcccgatccttccctgaccccaggggcctctaccacttctgcctctactggaaccgacatgctgggagattacatcttctctatggcaagcgtgacttcttgctgagtgacaaagcctctagcctcctctgcttccagcaccaggaggagagcctggctcagggccccccgctgttagccacttctgtcacctcctggtggagccctcagaacatcagcctgcccagtgccgccagcttcaccttctccttccacagtcctccccacacggccgctcacaatgcctcggtggacatgtgcgagctcaaaagggacctccagctgctcagccagttcctgaagcatccccagaaggcctcaaggaggccctcggctgcccccgccagccagcagttgcagagcctggagtcgaaactgacctctgtgagattcatgggggacatggtgtccttcgaggaggaccggatcaacgccacggtgtggaagctccagcccacagccggcctccaggacctgcacatccactcccggcaggaggaggagcagagcgagatcatggagtactcggtgctgctgcctcgaacactcttccagaggacgaaaggccggagcggggaggctgagaagagactcctcctggtggacttcagcagccaagccctgttccaggacaagaattccagccaagtcctgggtgagaaggtcttggggattgtggtacagaacaccaaagtagccaacctcacggagcccgtggtgctcactttccagcaccagctacagccgaagaatgtgactctgcaatgtgtgttctgggttgaagaccccacattgagcagcccggggcattggagcagtgctgggtgtgagaccgtcaggagagaaacccaaacatcctgcttctgcaaccacttgacctactttgcagtgctgatggtctcctcggtggaggtggacgccgtgcacaagcactacctgagcctcctctcctacgtgggctgtgtcgtctctgccctggcctgccttgtcaccattgccgcctacctctgctccagggtgcccctgccgtgcaggaggaaacctcgggactacaccatcaaggtgcacatgaacctgctgctggccgtcttcctgctggacacgagcttcctgctcagcgagccggtggccctgacaggctctgaggctggctgccgagccagtgccatcttcctgcacttctccctgctcacctgcctttcctggatgggcctcgaggggtacaacctctaccgactcgtggtggaggtctttggcacctatgtccctggctacctactcaagctgagcgccatgggctggggcttccccatctttctggtgacgctggtggccctggtggatgtggacaactatggccccatcatcttggctgtgcataggactccagagggcgtcatctacccttccatgtgctggatccgggactccctggtcagctacatcaccaacctgggcctcttcagcctggtgtttctgttcaacatggccatgctagccaccatggtggtgcagatcctgcggctgcgcccccacacccaaaagtggtcacatgtgctgacactgctgggcctcagcctggtccttggcctgccctgggccttgatcttcttctcctttgcttctggcaccttccagcttgtcgtcctctaccttttcagcatcatcacctccttccaaggcttcctcatcttcatctggtactggtccatgcggctgcaggcccggggtggcccctcccctctgaagagcaactcagacagcgccaggctccccatcagctcgggcagcacctcgtccagccgcatctaggcctccagcccacctgcccatgtgatgaagcagagattcggcctcgtcgcacactgcctgtggcccccgagcccggcccagccccaggccagtcagccgcagactttggaaagcccaacgaccatggagagatgggccgttgccatggtggacggactcccgggctgggcttttgaattggccttggggactactcggctctcactcagctcccacgggactcagaagtgcgccgccatgctgcctagggtactgtccccacatctgtcccaacccagctggaggcctggtctctccttacaacccctgggcccagccctcattgctgggggccaggccttggatcttgagggtctggcacatccttaatcctgtgcccctgcctgggacagaaatgtggctccagttgctctgtctctcgtggtcaccctgagggcactctgcatcctctgtcattttaacctcaggtggcacccagggcgaatggggcccagggcagaccttcagggccagagccctggcggaggagaggccctttgccaggagcacagcagcagctcgcctacctctgagcccaggccccctccctccctcagccccccagtcctccctccatcttccctggggttctcctcctctcccagggcctccttgctccttcgttcacagctgggggtccccgattccaatgctgttttttggggagtggtttccaggagctgcctggtgtctgctgtaaatgtttgtctactgcacaagcctcggcctgcccctgagccaggctcggtaccgatgcgtgggctgggctaggtccctctgtccatctgggcctttgtatgagctgcattgcccttgctcaccctgaccaagcacacgcctcagaggggccctcagcctctcctgaagccctcttgtggcaagaactgtggaccatgccagtcccgtctggtttccatcccaccactccaaggactgagactgacctcctctggtgacactggcctagggcctgacactctcctaagaggttctctccaagcccccaaatagctccaggcgccctcggccgcccatcatggttaattctgtccaacaaacacacacgggtagattgctggcctgttgtaggtggtagggacacagatgaccgacctggtcactcctcctgccaacattcagtctggtatgtgaggcgtgcgtgaagcaagaactcctggagctacagggacagggagccatcattcctgcctgggaatcctggaagacttcctgcaggagtcagcgttcaatcttgaccttgaagatgggaaggatgttctttttacgtaccaattcttttgtcttttgatattaaaaagaagtacatgttcattgtagagaatttggaaactgtagaagagaatcaagaagaaaaataaaaatcagctgttgtaatcacctagcaaactgg

SEQ ID NO: 11615 - DNA, 3972 bp, Homo sapiens
  source 1..3972: mol_type = unassigned DNA
gagaaatccatgactcacatatatcgtccgtcatccccagtcaagctcagggaggagggaggagcccagctggggcaggagaggggtgtctccccaccaaacaaacccggtccctccctctccgcactagctgtctgccctgccctgccgtaggagatgggctgggagcctcccacgctctccagctcactcggcaggcagcggggaccagggctggcaggttaagcctctgggggtggatcctgaaaggtggtccagccgcctggccctgcgtgggaccctccacctggcagcaggtacccaaacaagggctggacagcaggtgggaaggggaatagtgtgagtgtggccagcccaaccaccacacagtccacactcccagctaacactcctggtctcttccaggtggtgacttccaagagtgactccgtcggaggaaaatgactccccagtcgctgctgcagacgacactgttcctgctgagtctgctcttcctggtccaaggtgcccacggcaggggccacagggaagactttcgcttctgcagccagcggaaccagacacacaggagcagcctccactacaaacccacaccagacctgcgcatctccatcgagaactccgaagaggccctcacagtccatgcccctttccctgcagcccaccctgcttcccgatccttccctgaccccaggggcctctaccacttctgcctctactggaaccgacatgctgggagattacatcttctctatggcaagcgtgacttcttgctgagtgacaaagcctctagcctcctctgcttccagcaccaggaggagagcctggctcagggccccccgctgttagccacttctgtcacctcctggtggagccctcagaacatcagcctgcccagtgccgccagcttcaccttctccttccacagtcctccccacacggccgctcacaatgcctcggtggacatgtgcgagctcaaaagggacctccagctgctcagccagttcctgaagcatccccagaaggcctcaaggaggccctcggctgcccccgccagccagcagttgcagagcctggagtcgaaactgacctctgtgagattcatgggggacatggtgtccttcgaggaggaccggatcaacgccacggtgtggaagctccagcccacagccggcctccaggacctgcacatccactcccggcaggaggaggagcagagcgagatcatggagtactcggtgctgctgcctcgaacactcttccagaggacgaaaggccggagcggggaggctgagaagagactcctcctggtggacttcagcagccaagccctgttccaggacaagaattccagccaagtcctgggtgagaaggtcttggggattgtggtacagaacaccaaagtagccaacctcacggagcccgtggtgctcactttccagcaccagctacagccgaagaatgtgactctgcaatgtgtgttctgggttgaagaccccacattgagcagcccggggcattggagcagtgctgggtgtgagaccgtcaggagagaaacccaaacatcctgcttctgcaaccacttgacctactttgcagtgctgatggtctcctcggtggaggtggacgccgtgcacaagcactacctgagcctcctctcctacgtgggctgtgtcgtctctgccctggcctgccttgtcaccattgccgcctacctctgctccagggtgcccctgccgtgcaggaggaaacctcgggactacaccatcaaggtgcacatgaacctgctgctggccgtcttcctgctggacacgagcttcctgctcagcgagccggtggccctgacaggctctgaggctggctgccgagccagtgccatcttcctgcacttctccctgctcacctgcctttcctggatgggcctcgaggggtacaacctctaccgactcgtggtggaggtctttggcacctatgtccctggctacctactcaagctgagcgccatgggctggggcttccccatctttctggtgacgctggtggccctggtggatgtggacaactatggccccatcatcttggctgtgcataggactccagagggcgtcatctacccttccatgtgctggatccgggactccctggtcagctacatcaccaacctgggcctcttcagcctggtgtttctgttcaacatggccatgctagccaccatggtggtgcagatcctgcggctgcgcccccacacccaaaagtggtcacatgtgctgacactgctgggcctcagcctggtccttggcctgccctgggccttgatcttcttctcctttgcttctggcaccttccagcttgtcgtcctctaccttttcagcatcatcacctccttccaaggcttcctcatcttcatctggtactggtccatgcggctgcaggcccggggtggcccctcccctctgaagagcaactcagacagcgccaggctccccatcagctcgggcagcacctcgtccagccgcatctaggcctccagcccacctgcccatgtgatgaagcagagattcggcctcgtcgcacactgcctgtggcccccgagcccggcccagccccaggccagtcagccgcagactttggaaagcccaacgaccatggagagatgggccgttgccatggtggacggactcccgggctgggcttttgaattggccttggggactactcggctctcactcagctcccacgggactcagaagtgcgccgccatgctgcctagggtactgtccccacatctgtcccaacccagctggaggcctggtctctccttacaacccctgggcccagccctcattgctgggggccaggccttggatcttgagggtctggcacatccttaatcctgtgcccctgcctgggacagaaatgtggctccagttgctctgtctctcgtggtcaccctgagggcactctgcatcctctgtcattttaacctcaggtggcacccagggcgaatggggcccagggcagaccttcagggccagagccctggcggaggagaggccctttgccaggagcacagcagcagctcgcctacctctgagcccaggccccctccctccctcagccccccagtcctccctccatcttccctggggttctcctcctctcccagggcctccttgctccttcgttcacagctgggggtccccgattccaatgctgttttttggggagtggtttccaggagctgcctggtgtctgctgtaaatgtttgtctactgcacaagcctcggcctgcccctgagccaggctcggtaccgatgcgtgggctgggctaggtccctctgtccatctgggcctttgtatgagctgcattgcccttgctcaccctgaccaagcacacgcctcagaggggccctcagcctctcctgaagccctcttgtggcaagaactgtggaccatgccagtcccgtctggtttccatcccaccactccaaggactgagactgacctcctctggtgacactggcctagggcctgacactctcctaagaggttctctccaagcccccaaatagctccaggcgccctcggccgcccatcatggttaattctgtccaacaaacacacacgggtagattgctggcctgttgtaggtggtagggacacagatgaccgacctggtcactcctcctgccaacattcagtctggtatgtgaggcgtgcgtgaagcaagaactcctggagctacagggacagggagccatcattcctgcctgggaatcctggaagacttcctgcaggagtcagcgttcaatcttgaccttgaagatgggaaggatgttctttttacgtaccaattcttttgtcttttgatattaaaaagaagtacatgttcattgtagagaatttggaaactgtagaagagaatcaagaagaaaaataaaaatcagctgttgtaatcacctagcaaactgg

SEQ ID NO: 11616 - DNA, 3989 bp, Homo sapiens
  source 1..3989: mol_type = unassigned DNA
gagaaatccatgactcacatatatcgtccgtcatccccagtcaagctcagggaggagggaggagcccagctggggcaggagaggggtgtctccccaccaaacaaacccggtccctccctctccgcactagctgtctgccctgccctgccgtaggagatgggctgggagcctcccacgctctccagctcactcggcaggcagcggggaccagggctggcaggttaagcctctgggggtggatcctgaaaggtggtccagccgcctggccctgcgtgggaccctccacctggcagcaggtacccaaacaagggctggacagcagggtctcgctctgtcacacaggctggagtgcagtggtgtgatcttggctcatcgtaacctccacctcccgggttcaagtgattctcatgcctcagcctcccgagtagctgggattacaggtggtgacttccaagagtgactccgtcggaggaaaatgactccccagtcgctgctgcagacgacactgttcctgctgagtctgctcttcctggtccaaggtgcccacggcaggggccacagggaagactttcgcttctgcagccagcggaaccagacacacaggagcagcctccactacaaacccacaccagacctgcgcatctccatcgagaactccgaagaggccctcacagtccatgcccctttccctgcagcccaccctgcttcccgatccttccctgaccccaggggcctctaccacttctgcctctactggaaccgacatgctgggagattacatcttctctatggcaagcgtgacttcttgctgagtgacaaagcctctagcctcctctgcttccagcaccaggaggagagcctggctcagggccccccgctgttagccacttctgtcacctcctggtggagccctcagaacatcagcctgcccagtgccgccagcttcaccttctccttccacagtcctccccacacggccgctcacaatgcctcggtggacatgtgcgagctcaaaagggacctccagctgctcagccagttcctgaagcatccccagaaggcctcaaggaggccctcggctgcccccgccagccagcagttgcagagcctggagtcgaaactgacctctgtgagattcatgggggacatggtgtccttcgaggaggaccggatcaacgccacggtgtggaagctccagcccacagccggcctccaggacctgcacatccactcccggcaggaggaggagcagagcgagatcatggagtactcggtgctgctgcctcgaacactcttccagaggacgaaaggccggagcggggaggctgagaagagactcctcctggtggacttcagcagccaagccctgttccaggacaagaattccagccaagtcctgggtgagaaggtcttggggattgtggtacagaacaccaaagtagccaacctcacggagcccgtggtgctcactttccagcaccagctacagccgaagaatgtgactctgcaatgtgtgttctgggttgaagaccccacattgagcagcccggggcattggagcagtgctgggtgtgagaccgtcaggagagaaacccaaacatcctgcttctgcaaccacttgacctactttgcagtgctgatggtctcctcggtggaggtggacgccgtgcacaagcactacctgagcctcctctcctacgtgggctgtgtcgtctctgccctggcctgccttgtcaccattgccgcctacctctgctccaggaggaaacctcgggactacaccatcaaggtgcacatgaacctgctgctggccgtcttcctgctggacacgagcttcctgctcagcgagccggtggccctgacaggctctgaggctggctgccgagccagtgccatcttcctgcacttctccctgctcacctgcctttcctggatgggcctcgaggggtacaacctctaccgactcgtggtggaggtctttggcacctatgtccctggctacctactcaagctgagcgccatgggctggggcttccccatctttctggtgacgctggtggccctggtggatgtggacaactatggccccatcatcttggctgtgcataggactccagagggcgtcatctacccttccatgtgctggatccgggactccctggtcagctacatcaccaacctgggcctcttcagcctggtgtttctgttcaacatggccatgctagccaccatggtggtgcagatcctgcggctgcgcccccacacccaaaagtggtcacatgtgctgacactgctgggcctcagcctggtccttggcctgccctgggccttgatcttcttctcctttgcttctggcaccttccagcttgtcgtcctctaccttttcagcatcatcacctccttccaaggcttcctcatcttcatctggtactggtccatgcggctgcaggcccggggtggcccctcccctctgaagagcaactcagacagcgccaggctccccatcagctcgggcagcacctcgtccagccgcatctaggcctccagcccacctgcccatgtgatgaagcagagattcggcctcgtcgcacactgcctgtggcccccgagcccggcccagccccaggccagtcagccgcagactttggaaagcccaacgaccatggagagatgggccgttgccatggtggacggactcccgggctgggcttttgaattggccttggggactactcggctctcactcagctcccacgggactcagaagtgcgccgccatgctgcctagggtactgtccccacatctgtcccaacccagctggaggcctggtctctccttacaacccctgggcccagccctcattgctgggggccaggccttggatcttgagggtctggcacatccttaatcctgtgcccctgcctgggacagaaatgtggctccagttgctctgtctctcgtggtcaccctgagggcactctgcatcctctgtcattttaacctcaggtggcacccagggcgaatggggcccagggcagaccttcagggccagagccctggcggaggagaggccctttgccaggagcacagcagcagctcgcctacctctgagcccaggccccctccctccctcagccccccagtcctccctccatcttccctggggttctcctcctctcccagggcctccttgctccttcgttcacagctgggggtccccgattccaatgctgttttttggggagtggtttccaggagctgcctggtgtctgctgtaaatgtttgtctactgcacaagcctcggcctgcccctgagccaggctcggtaccgatgcgtgggctgggctaggtccctctgtccatctgggcctttgtatgagctgcattgcccttgctcaccctgaccaagcacacgcctcagaggggccctcagcctctcctgaagccctcttgtggcaagaactgtggaccatgccagtcccgtctggtttccatcccaccactccaaggactgagactgacctcctctggtgacactggcctagggcctgacactctcctaagaggttctctccaagcccccaaatagctccaggcgccctcggccgcccatcatggttaattctgtccaacaaacacacacgggtagattgctggcctgttgtaggtggtagggacacagatgaccgacctggtcactcctcctgccaacattcagtctggtatgtgaggcgtgcgtgaagcaagaactcctggagctacagggacagggagccatcattcctgcctgggaatcctggaagacttcctgcaggagtcagcgttcaatcttgaccttgaagatgggaaggatgttctttttacgtaccaattcttttgtcttttgatattaaaaagaagtacatgttcattgtagagaatttggaaactgtagaagagaatcaagaagaaaaataaaaatcagctgttgtaatcacctagcaaactgg

SEQ ID NO: 11617 - DNA, 3863 bp, Homo sapiens
  source 1..3863: mol_type = unassigned DNA
gagaaatccatgactcacatatatcgtccgtcatccccagtcaagctcagggaggagggaggagcccagctggggcaggagaggggtgtctccccaccaaacaaacccggtccctccctctccgcactagctgtctgccctgccctgccgtaggagatgggctgggagcctcccacgctctccagctcactcggcaggcagcggggaccagggctggcaggttaagcctctgggggtggatcctgaaaggtggtccagccgcctggccctgcgtgggaccctccacctggcagcaggtggtgacttccaagagtgactccgtcggaggaaaatgactccccagtcgctgctgcagacgacactgttcctgctgagtctgctcttcctggtccaaggtgcccacggcaggggccacagggaagactttcgcttctgcagccagcggaaccagacacacaggagcagcctccactacaaacccacaccagacctgcgcatctccatcgagaactccgaagaggccctcacagtccatgcccctttccctgcagcccaccctgcttcccgatccttccctgaccccaggggcctctaccacttctgcctctactggaaccgacatgctgggagattacatcttctctatggcaagcgtgacttcttgctgagtgacaaagcctctagcctcctctgcttccagcaccaggaggagagcctggctcagggccccccgctgttagccacttctgtcacctcctggtggagccctcagaacatcagcctgcccagtgccgccagcttcaccttctccttccacagtcctccccacacggccgctcacaatgcctcggtggacatgtgcgagctcaaaagggacctccagctgctcagccagttcctgaagcatccccagaaggcctcaaggaggccctcggctgcccccgccagccagcagttgcagagcctggagtcgaaactgacctctgtgagattcatgggggacatggtgtccttcgaggaggaccggatcaacgccacggtgtggaagctccagcccacagccggcctccaggacctgcacatccactcccggcaggaggaggagcagagcgagatcatggagtactcggtgctgctgcctcgaacactcttccagaggacgaaaggccggagcggggaggctgagaagagactcctcctggtggacttcagcagccaagccctgttccaggacaagaattccagccaagtcctgggtgagaaggtcttggggattgtggtacagaacaccaaagtagccaacctcacggagcccgtggtgctcactttccagcaccagctacagccgaagaatgtgactctgcaatgtgtgttctgggttgaagaccccacattgagcagcccggggcattggagcagtgctgggtgtgagaccgtcaggagagaaacccaaacatcctgcttctgcaaccacttgacctactttgcagtgctgatggtctcctcggtggaggtggacgccgtgcacaagcactacctgagcctcctctcctacgtgggctgtgtcgtctctgccctggcctgccttgtcaccattgccgcctacctctgctccagggtgcccctgccgtgcaggaggaaacctcgggactacaccatcaaggtgcacatgaacctgctgctggccgtcttcctgctggacacgagcttcctgctcagcgagccggtggccctgacaggctctgaggctggctgccgagccagtgccatcttcctgcacttctccctgctcacctgcctttcctggatgggcctcgaggggtacaacctctaccgactcgtggtggaggtctttggcacctatgtccctggctacctactcaagctgagcgccatgggctggggcttccccatctttctggtgacgctggtggccctggtggatgtggacaactatggccccatcatcttggctgtgcataggactccagagggcgtcatctacccttccatgtgctggatccgggactccctggtcagctacatcaccaacctgggcctcttcagcctggtgtttctgttcaacatggccatgctagccaccatggtggtgcagatcctgcggctgcgcccccacacccaaaagtggtcacatgtgctgacactgctgggcctcagcctggtccttggcctgccctgggccttgatcttcttctcctttgcttctggcaccttccagcttgtcgtcctctaccttttcagcatcatcacctccttccaaggcttcctcatcttcatctggtactggtccatgcggctgcaggcccggggtggcccctcccctctgaagagcaactcagacagcgccaggctccccatcagctcgggcagcacctcgtccagccgcatctaggcctccagcccacctgcccatgtgatgaagcagagattcggcctcgtcgcacactgcctgtggcccccgagcccggcccagccccaggccagtcagccgcagactttggaaagcccaacgaccatggagagatgggccgttgccatggtggacggactcccgggctgggcttttgaattggccttggggactactcggctctcactcagctcccacgggactcagaagtgcgccgccatgctgcctagggtactgtccccacatctgtcccaacccagctggaggcctggtctctccttacaacccctgggcccagccctcattgctgggggccaggccttggatcttgagggtctggcacatccttaatcctgtgcccctgcctgggacagaaatgtggctccagttgctctgtctctcgtggtcaccctgagggcactctgcatcctctgtcattttaacctcaggtggcacccagggcgaatggggcccagggcagaccttcagggccagagccctggcggaggagaggccctttgccaggagcacagcagcagctcgcctacctctgagcccaggccccctccctccctcagccccccagtcctccctccatcttccctggggttctcctcctctcccagggcctccttgctccttcgttcacagctgggggtccccgattccaatgctgttttttggggagtggtttccaggagctgcctggtgtctgctgtaaatgtttgtctactgcacaagcctcggcctgcccctgagccaggctcggtaccgatgcgtgggctgggctaggtccctctgtccatctgggcctttgtatgagctgcattgcccttgctcaccctgaccaagcacacgcctcagaggggccctcagcctctcctgaagccctcttgtggcaagaactgtggaccatgccagtcccgtctggtttccatcccaccactccaaggactgagactgacctcctctggtgacactggcctagggcctgacactctcctaagaggttctctccaagcccccaaatagctccaggcgccctcggccgcccatcatggttaattctgtccaacaaacacacacgggtagattgctggcctgttgtaggtggtagggacacagatgaccgacctggtcactcctcctgccaacattcagtctggtatgtgaggcgtgcgtgaagcaagaactcctggagctacagggacagggagccatcattcctgcctgggaatcctggaagacttcctgcaggagtcagcgttcaatcttgaccttgaagatgggaaggatgttctttttacgtaccaattcttttgtcttttgatattaaaaagaagtacatgttcattgtagagaatttggaaactgtagaagagaatcaagaagaaaaataaaaatcagctgttgtaatcacctagcaaactgg

SEQ ID NO: 11618 - DNA, 3967 bp, Homo sapiens
  source 1..3967: mol_type = unassigned DNA
gagaaatccatgactcacatatatcgtccgtcatccccagtcaagctcagggaggagggaggagcccagctggggcaggagaggggtgtctccccaccaaacaaacccggtccctccctctccgcactagctgtctgccctgccctgccgtaggagatgggctgggagcctcccacgctctccagctcactcggcaggcagcggggaccagggctggcaggttaagcctctgggggtggatcctgaaaggtggtccagccgcctggccctgcgtgggaccctccacctggcagcagacagggtctcgctctgtcacacaggctggagtgcagtggtgtgatcttggctcatcgtaacctccacctcccgggttcaagtgattctcatgcctcagcctcccgagtagctgggattacaggtggtgacttccaagagtgactccgtcggaggaaaatgactccccagtcgctgctgcagacgacactgttcctgctgagtctgctcttcctggtccaaggtgcccacggcaggggccacagggaagactttcgcttctgcagccagcggaaccagacacacaggagcagcctccactacaaacccacaccagacctgcgcatctccatcgagaactccgaagaggccctcacagtccatgcccctttccctgcagcccaccctgcttcccgatccttccctgaccccaggggcctctaccacttctgcctctactggaaccgacatgctgggagattacatcttctctatggcaagcgtgacttcttgctgagtgacaaagcctctagcctcctctgcttccagcaccaggaggagagcctggctcagggccccccgctgttagccacttctgtcacctcctggtggagccctcagaacatcagcctgcccagtgccgccagcttcaccttctccttccacagtcctccccacacggccgctcacaatgcctcggtggacatgtgcgagctcaaaagggacctccagctgctcagccagttcctgaagcatccccagaaggcctcaaggaggccctcggctgcccccgccagccagcagttgcagagcctggagtcgaaactgacctctgtgagattcatgggggacatggtgtccttcgaggaggaccggatcaacgccacggtgtggaagctccagcccacagccggcctccaggacctgcacatccactcccggcaggaggaggagcagagcgagatcatggagtactcggtgctgctgcctcgaacactcttccagaggacgaaaggccggagcggggaggctgagaagagactcctcctggtggacttcagcagccaagccctgttccaggacaagaattccagccaagtcctgggtgagaaggtcttggggattgtggtacagaacaccaaagtagccaacctcacggagcccgtggtgctcactttccagcaccagctacagccgaagaatgtgactctgcaatgtgtgttctgggttgaagaccccacattgagcagcccggggcattggagcagtgctgggtgtgagaccgtcaggagagaaacccaaacatcctgcttctgcaaccacttgacctactttgcagtgctgatggtctcctcggtggaggtggacgccgtgcacaagcactacctgagcctcctctcctacgtgggctgtgtcgtctctgccctggcctgccttgtcaccattgccgcctacctctgctccaggaggaaacctcgggactacaccatcaaggtgcacatgaacctgctgctggccgtcttcctgctggacacgagcttcctgctcagcgagccggtggccctgacaggctctgaggctggctgccgagccagtgccatcttcctgcacttctccctgctcacctgcctttcctggatgggcctcgaggggtacaacctctaccgactcgtggtggaggtctttggcacctatgtccctggctacctactcaagctgagcgccatgggctggggcttccccatctttctggtgacgctggtggccctggtggatgtggacaactatggccccatcatcttggctgtgcataggactccagagggcgtcatctacccttccatgtgctggatccgggactccctggtcagctacatcaccaacctgggcctcttcagcctggtgtttctgttcaacatggccatgctagccaccatggtggtgcagatcctgcggctgcgcccccacacccaaaagtggtcacatgtgctgacactgctgggcctcagcctggtccttggcctgccctgggccttgatcttcttctcctttgcttctggcaccttccagcttgtcgtcctctaccttttcagcatcatcacctccttccaaggcttcctcatcttcatctggtactggtccatgcggctgcaggcccggggtggcccctcccctctgaagagcaactcagacagcgccaggctccccatcagctcgggcagcacctcgtccagccgcatctaggcctccagcccacctgcccatgtgatgaagcagagattcggcctcgtcgcacactgcctgtggcccccgagcccggcccagccccaggccagtcagccgcagactttggaaagcccaacgaccatggagagatgggccgttgccatggtggacggactcccgggctgggcttttgaattggccttggggactactcggctctcactcagctcccacgggactcagaagtgcgccgccatgctgcctagggtactgtccccacatctgtcccaacccagctggaggcctggtctctccttacaacccctgggcccagccctcattgctgggggccaggccttggatcttgagggtctggcacatccttaatcctgtgcccctgcctgggacagaaatgtggctccagttgctctgtctctcgtggtcaccctgagggcactctgcatcctctgtcattttaacctcaggtggcacccagggcgaatggggcccagggcagaccttcagggccagagccctggcggaggagaggccctttgccaggagcacagcagcagctcgcctacctctgagcccaggccccctccctccctcagccccccagtcctccctccatcttccctggggttctcctcctctcccagggcctccttgctccttcgttcacagctgggggtccccgattccaatgctgttttttggggagtggtttccaggagctgcctggtgtctgctgtaaatgtttgtctactgcacaagcctcggcctgcccctgagccaggctcggtaccgatgcgtgggctgggctaggtccctctgtccatctgggcctttgtatgagctgcattgcccttgctcaccctgaccaagcacacgcctcagaggggccctcagcctctcctgaagccctcttgtggcaagaactgtggaccatgccagtcccgtctggtttccatcccaccactccaaggactgagactgacctcctctggtgacactggcctagggcctgacactctcctaagaggttctctccaagcccccaaatagctccaggcgccctcggccgcccatcatggttaattctgtccaacaaacacacacgggtagattgctggcctgttgtaggtggtagggacacagatgaccgacctggtcactcctcctgccaacattcagtctggtatgtgaggcgtgcgtgaagcaagaactcctggagctacagggacagggagccatcattcctgcctgggaatcctggaagacttcctgcaggagtcagcgttcaatcttgaccttgaagatgggaaggatgttctttttacgtaccaattcttttgtcttttgatattaaaaagaagtacatgttcattgtagagaatttggaaactgtagaagagaatcaagaagaaaaataaaaatcagctgttgtaatcacctagcaaactgg

SEQ ID NO: 11619 - DNA, 4043 bp, Homo sapiens
  source 1..4043: mol_type = unassigned DNA
acttgggaacaggacaagttacggagccacgttgctttgctgggtctgagccggggtgtgacgtagtccctgcagctgccaacggttgccagggcaacggttgccaggggctgctgtcacctgcgccccttctcccgcgctggcggctggggcttctcagcctctattccctggctgtcccctttgtttgaagctccagtgagggagcagtggctggggtggcccagcttcaaagtctctgtcctcttgaaaaaaggtggtcgggggacattgacccaccagccccgcaggctactgcctgcaaacaagaacccctcatctgccacgcacgttcttaatgtatctatagtctgcctgatgccacaaaggagtccagggtctcgctctgtcacacaggctggagtgcagtggtgtgatcttggctcatcgtaacctccacctcccgggttcaagtgattctcatgcctcagcctcccgagtagctgggattacaggtggtgacttccaagagtgactccgtcggaggaaaatgactccccagtcgctgctgcagacgacactgttcctgctgagtctgctcttcctggtccaaggtgcccacggcaggggccacagggaagactttcgcttctgcagccagcggaaccagacacacaggagcagcctccactacaaacccacaccagacctgcgcatctccatcgagaactccgaagaggccctcacagtccatgcccctttccctgcagcccaccctgcttcccgatccttccctgaccccaggggcctctaccacttctgcctctactggaaccgacatgctgggagattacatcttctctatggcaagcgtgacttcttgctgagtgacaaagcctctagcctcctctgcttccagcaccaggaggagagcctggctcagggccccccgctgttagccacttctgtcacctcctggtggagccctcagaacatcagcctgcccagtgccgccagcttcaccttctccttccacagtcctccccacacggccgctcacaatgcctcggtggacatgtgcgagctcaaaagggacctccagctgctcagccagttcctgaagcatccccagaaggcctcaaggaggccctcggctgcccccgccagccagcagttgcagagcctggagtcgaaactgacctctgtgagattcatgggggacatggtgtccttcgaggaggaccggatcaacgccacggtgtggaagctccagcccacagccggcctccaggacctgcacatccactcccggcaggaggaggagcagagcgagatcatggagtactcggtgctgctgcctcgaacactcttccagaggacgaaaggccggagcggggaggctgagaagagactcctcctggtggacttcagcagccaagccctgttccaggacaagaattccagccaagtcctgggtgagaaggtcttggggattgtggtacagaacaccaaagtagccaacctcacggagcccgtggtgctcactttccagcaccagctacagccgaagaatgtgactctgcaatgtgtgttctgggttgaagaccccacattgagcagcccggggcattggagcagtgctgggtgtgagaccgtcaggagagaaacccaaacatcctgcttctgcaaccacttgacctactttgcagtgctgatggtctcctcggtggaggtggacgccgtgcacaagcactacctgagcctcctctcctacgtgggctgtgtcgtctctgccctggcctgccttgtcaccattgccgcctacctctgctccaggaggaaacctcgggactacaccatcaaggtgcacatgaacctgctgctggccgtcttcctgctggacacgagcttcctgctcagcgagccggtggccctgacaggctctgaggctggctgccgagccagtgccatcttcctgcacttctccctgctcacctgcctttcctggatgggcctcgaggggtacaacctctaccgactcgtggtggaggtctttggcacctatgtccctggctacctactcaagctgagcgccatgggctggggcttccccatctttctggtgacgctggtggccctggtggatgtggacaactatggccccatcatcttggctgtgcataggactccagagggcgtcatctacccttccatgtgctggatccgggactccctggtcagctacatcaccaacctgggcctcttcagcctggtgtttctgttcaacatggccatgctagccaccatggtggtgcagatcctgcggctgcgcccccacacccaaaagtggtcacatgtgctgacactgctgggcctcagcctggtccttggcctgccctgggccttgatcttcttctcctttgcttctggcaccttccagcttgtcgtcctctaccttttcagcatcatcacctccttccaaggcttcctcatcttcatctggtactggtccatgcggctgcaggcccggggtggcccctcccctctgaagagcaactcagacagcgccaggctccccatcagctcgggcagcacctcgtccagccgcatctaggcctccagcccacctgcccatgtgatgaagcagagattcggcctcgtcgcacactgcctgtggcccccgagcccggcccagccccaggccagtcagccgcagactttggaaagcccaacgaccatggagagatgggccgttgccatggtggacggactcccgggctgggcttttgaattggccttggggactactcggctctcactcagctcccacgggactcagaagtgcgccgccatgctgcctagggtactgtccccacatctgtcccaacccagctggaggcctggtctctccttacaacccctgggcccagccctcattgctgggggccaggccttggatcttgagggtctggcacatccttaatcctgtgcccctgcctgggacagaaatgtggctccagttgctctgtctctcgtggtcaccctgagggcactctgcatcctctgtcattttaacctcaggtggcacccagggcgaatggggcccagggcagaccttcagggccagagccctggcggaggagaggccctttgccaggagcacagcagcagctcgcctacctctgagcccaggccccctccctccctcagccccccagtcctccctccatcttccctggggttctcctcctctcccagggcctccttgctccttcgttcacagctgggggtccccgattccaatgctgttttttggggagtggtttccaggagctgcctggtgtctgctgtaaatgtttgtctactgcacaagcctcggcctgcccctgagccaggctcggtaccgatgcgtgggctgggctaggtccctctgtccatctgggcctttgtatgagctgcattgcccttgctcaccctgaccaagcacacgcctcagaggggccctcagcctctcctgaagccctcttgtggcaagaactgtggaccatgccagtcccgtctggtttccatcccaccactccaaggactgagactgacctcctctggtgacactggcctagggcctgacactctcctaagaggttctctccaagcccccaaatagctccaggcgccctcggccgcccatcatggttaattctgtccaacaaacacacacgggtagattgctggcctgttgtaggtggtagggacacagatgaccgacctggtcactcctcctgccaacattcagtctggtatgtgaggcgtgcgtgaagcaagaactcctggagctacagggacagggagccatcattcctgcctgggaatcctggaagacttcctgcaggagtcagcgttcaatcttgaccttgaagatgggaaggatgttctttttacgtaccaattcttttgtcttttgatattaaaaagaagtacatgttcattgtagagaatttggaaactgtagaagagaatcaagaagaaaaataaaaatcagctgttgtaatcacctagcaaactgg

SEQ ID NO: 11620 - DNA, 2688 bp, Homo sapiens
  source 1..2688: mol_type = unassigned DNA
tctcccgcgctggcggctggggcttctcagcctctattccctggctgtcccctttgtttgaagctccagtgagggagcagtggctggggtggcccagcttcaaagtctctgtcctcttgaaaaaaggtggtcgggggacattgacccaccagccccgcaggctactgcctgcaaacaagaacccctcatctgccacgcacgttcttaatgtatctatagtctgcctgatgccacaaaggagtccaggtggtgacttccaagagtgactccgtcggaggaaaatgactccccagtcgctgctgcagacgacactgttcctgctgagtctgctcttcctggtccaagccagcggaaccagacacacaggagcagcctccactacaaacccacaccagacctgcgcatctccatcgagaactccgaagaggccctcacagtccatgcccctttccctgcagcccaccctgcttcccgatccttccctgaccccaggggcctctaccacttctgcctctactggaaccgacatgctgggagattacatcttctctatggcaagcgtgacttcttgctgagtgacaaagcctctagcctcctctgcttccagcaccaggaggagagcctggctcagggccccccgctgttagccacttctgtcacctcctggtggagccctcagaacatcagcctgcccagtgccgccagcttcaccttctccttccacagtcctccccacacggccgctcacaatgcctcggtggacatgtgcgagctcaaaagggacctccagctgctcagccagttcctgaagcatccccagaaggcctcaaggaggccctcggctgcccccgccagccagcagttgcagagcctggagtcgaaactgacctctgtgagattcatgggggacatggtgtccttcgaggaggaccggatcaacgccacggtgtggaagctccagcccacagccggcctccaggacctgcacatccactcccggcaggaggaggagcagagcgagatcatggagtactcggtgctgctgcctcgaacactcttccagaggacgaaaggccggagcggggaggctgagaagagactcctcctggtggacttcagcagccaagccctgttccaggacaagaattccagccaagtcctgggtgagaaggtcttggggattgtggtacagaacaccaaagtagccaacctcacggagcccgtggtgctcactttccagcaccagctacagccgaagaatgtgactctgcaatgtgtgttctgggttgaagaccccacattgagcagcccggggcattggagcagtgctgggtgtgagaccgtcaggagagaaacccaaacatcctgcttctgcaaccacttgacctactttgcagtgctgatggtctcctcggtggaggtggacgccgtgcacaagcactacctgagcctcctctcctacgtgggctgtgtcgtctctgccctggcctgccttgtcaccattgccgcctacctctgctccaggaggaaacctcgggactacaccatcaaggtgcacatgaacctgctgctggccgtcttcctgctggacacgagcttcctgctcagcgagccggtggccctgacaggctctgaggctggctgccgagccagtgccatcttcctgcacttctccctgctcacctgcctttcctggatgggcctcgaggggtacaacctctaccgactcgtggtggaggtctttggcacctatgtccctggctacctactcaagctgagcgccatgggctggggcttccccatctttctggtgacgctggtggccctggtggatgtggacaactatggccccatcatcttggctgtgcataggactccagagggcgtcatctacccttccatgtgctggatccgggactccctggtcagctacatcaccaacctgggcctcttcagcctggtgtttctgttcaacatggccatgctagccaccatggtggtgcagatcctgcggctgcgcccccacacccaaaagtggtcacatgtgctgacactgctgggcctcagcctggtccttggcctgccctgggccttgatcttcttctcctttgcttctggcaccttccagcttgtcgtcctctaccttttcagcatcatcacctccttccaaggcttcctcatcttcatctggtactggtccatgcggctgcaggcccggggtggcccctcccctctgaagagcaactcagacagcgccaggctccccatcagctcgggcagcacctcgtccagccgcatctaggcctccagcccacctgcccatgtgatgaagcagagattcggcctcgtcgcacactgcctgtggcccccgagcccggcccagccccaggccagtcagccgcagactttggaaagcccaacgaccatggagagatgggccgttgccatggtggacggactcccgggctgggcttttgaattggccttggggactactcggctctcactcagctcccacgggactcagaagtgcgccgccatgctgcctagggtactgtccccacatctgtcccaacccagctggaggcctggtctctccttacaacccctgggcccagccctcattgctgggggccaggccttggatcttgagggtctggcacatccttaatcctgtgcccctgcctg

SEQ ID NO: 11621 - DNA, 4042 bp, Homo sapiens
  source 1..4042: mol_type = unassigned DNA
actttggggagactggccctgggaggcgacagatggaggctgaggaagcagagtgatccccggccccttcctgtccctgaacactgtctgcctggatgaggggtgaggctgaggtgcccccttgcccggcgctgagtcatgggcatcccccaggatcactgcctcagcgctctcagccctgccccctcctggtctccctctgagaaatccatgactcacatatatcgtccgtcatccccagtcaagctcagggaggagggaggagcccagctggggcaggagaggggtgtctccccaccaaacaaacccggtccctccctctccgcactagctgtctgccctgccctgccgtaggagatgggctgggagcctcccacgctctccagctcactcggcaggcagcggggaccagggctggcaggttaagcctctgggggtggatcctgaaaggtggtccagccgcctggccctgcgtgggaccctccacctggcagcaggtggtgacttccaagagtgactccgtcggaggaaaatgactccccagtcgctgctgcagacgacactgttcctgctgagtctgctcttcctggtccaaggtgcccacggcaggggccacagggaagactttcgcttctgcagccagcggaaccagacacacaggagcagcctccactacaaacccacaccagacctgcgcatctccatcgagaactccgaagaggccctcacagtccatgcccctttccctgcagcccaccctgcttcccgatccttccctgaccccaggggcctctaccacttctgcctctactggaaccgacatgctgggagattacatcttctctatggcaagcgtgacttcttgctgagtgacaaagcctctagcctcctctgcttccagcaccaggaggagagcctggctcagggccccccgctgttagccacttctgtcacctcctggtggagccctcagaacatcagcctgcccagtgccgccagcttcaccttctccttccacagtcctccccacacggccgctcacaatgcctcggtggacatgtgcgagctcaaaagggacctccagctgctcagccagttcctgaagcatccccagaaggcctcaaggaggccctcggctgcccccgccagccagcagttgcagagcctggagtcgaaactgacctctgtgagattcatgggggacatggtgtccttcgaggaggaccggatcaacgccacggtgtggaagctccagcccacagccggcctccaggacctgcacatccactcccggcaggaggaggagcagagcgagatcatggagtactcggtgctgctgcctcgaacactcttccagaggacgaaaggccggagcggggaggctgagaagagactcctcctggtggacttcagcagccaagccctgttccaggacaagaattccagccaagtcctgggtgagaaggtcttggggattgtggtacagaacaccaaagtagccaacctcacggagcccgtggtgctcactttccagcaccagctacagccgaagaatgtgactctgcaatgtgtgttctgggttgaagaccccacattgagcagcccggggcattggagcagtgctgggtgtgagaccgtcaggagagaaacccaaacatcctgcttctgcaaccacttgacctactttgcagtgctgatggtctcctcggtggaggtggacgccgtgcacaagcactacctgagcctcctctcctacgtgggctgtgtcgtctctgccctggcctgccttgtcaccattgccgcctacctctgctccaggaggaaacctcgggactacaccatcaaggtgcacatgaacctgctgctggccgtcttcctgctggacacgagcttcctgctcagcgagccggtggccctgacaggctctgaggctggctgccgagccagtgccatcttcctgcacttctccctgctcacctgcctttcctggatgggcctcgaggggtacaacctctaccgactcgtggtggaggtctttggcacctatgtccctggctacctactcaagctgagcgccatgggctggggcttccccatctttctggtgacgctggtggccctggtggatgtggacaactatggccccatcatcttggctgtgcataggactccagagggcgtcatctacccttccatgtgctggatccgggactccctggtcagctacatcaccaacctgggcctcttcagcctggtgtttctgttcaacatggccatgctagccaccatggtggtgcagatcctgcggctgcgcccccacacccaaaagtggtcacatgtgctgacactgctgggcctcagcctggtccttggcctgccctgggccttgatcttcttctcctttgcttctggcaccttccagcttgtcgtcctctaccttttcagcatcatcacctccttccaaggcttcctcatcttcatctggtactggtccatgcggctgcaggcccggggtggcccctcccctctgaagagcaactcagacagcgccaggctccccatcagctcgggcagcacctcgtccagccgcatctaggcctccagcccacctgcccatgtgatgaagcagagattcggcctcgtcgcacactgcctgtggcccccgagcccggcccagccccaggccagtcagccgcagactttggaaagcccaacgaccatggagagatgggccgttgccatggtggacggactcccgggctgggcttttgaattggccttggggactactcggctctcactcagctcccacgggactcagaagtgcgccgccatgctgcctagggtactgtccccacatctgtcccaacccagctggaggcctggtctctccttacaacccctgggcccagccctcattgctgggggccaggccttggatcttgagggtctggcacatccttaatcctgtgcccctgcctgggacagaaatgtggctccagttgctctgtctctcgtggtcaccctgagggcactctgcatcctctgtcattttaacctcaggtggcacccagggcgaatggggcccagggcagaccttcagggccagagccctggcggaggagaggccctttgccaggagcacagcagcagctcgcctacctctgagcccaggccccctccctccctcagccccccagtcctccctccatcttccctggggttctcctcctctcccagggcctccttgctccttcgttcacagctgggggtccccgattccaatgctgttttttggggagtggtttccaggagctgcctggtgtctgctgtaaatgtttgtctactgcacaagcctcggcctgcccctgagccaggctcggtaccgatgcgtgggctgggctaggtccctctgtccatctgggcctttgtatgagctgcattgcccttgctcaccctgaccaagcacacgcctcagaggggccctcagcctctcctgaagccctcttgtggcaagaactgtggaccatgccagtcccgtctggtttccatcccaccactccaaggactgagactgacctcctctggtgacactggcctagggcctgacactctcctaagaggttctctccaagcccccaaatagctccaggcgccctcggccgcccatcatggttaattctgtccaacaaacacacacgggtagattgctggcctgttgtaggtggtagggacacagatgaccgacctggtcactcctcctgccaacattcagtctggtatgtgaggcgtgcgtgaagcaagaactcctggagctacagggacagggagccatcattcctgcctgggaatcctggaagacttcctgcaggagtcagcgttcaatcttgaccttgaagatgggaaggatgttctttttacgtaccaattcttttgtcttttgatattaaaaagaagtacatgttcattgtagagaatttggaaactgtagaagagaatcaagaagaaaaataaaaatcagctgttgtaatcacctagcaaa

SEQ ID NO: 11622 - DNA, 3852 bp, Homo sapiens
  source 1..3852: mol_type = unassigned DNA
aacaagagagggtggcggctgcagtggctgtggggcagccggaaatggggcgagacagacaggcggagcctcacctggggctgcccgccagcccagacaagctcagactgggtgcctgtggccctgggaggaggtggaaggggaggagcaggccacacaggcacaggccggtgagggacctgcccagacctggagggtctcgctctgtcacacaggctggagtgcagtggtgtgatcttggctcatcgtaacctccacctcccgggttcaagtgattctcatgcctcagcctcccgagtagctgggattacaggtggtgacttccaagagtgactccgtcggaggaaaatgactccccagtcgctgctgcagacgacactgttcctgctgagtctgctcttcctggtccaaggtgcccacggcaggggccacagggaagactttcgcttctgcagccagcggaaccagacacacaggagcagcctccactacaaacccacaccagacctgcgcatctccatcgagaactccgaagaggccctcacagtccatgcccctttccctgcagcccaccctgcttcccgatccttccctgaccccaggggcctctaccacttctgcctctactggaaccgacatgctgggagattacatcttctctatggcaagcgtgacttcttgctgagtgacaaagcctctagcctcctctgcttccagcaccaggaggagagcctggctcagggccccccgctgttagccacttctgtcacctcctggtggagccctcagaacatcagcctgcccagtgccgccagcttcaccttctccttccacagtcctccccacacggccgctcacaatgcctcggtggacatgtgcgagctcaaaagggacctccagctgctcagccagttcctgaagcatccccagaaggcctcaaggaggccctcggctgcccccgccagccagcagttgcagagcctggagtcgaaactgacctctgtgagattcatgggggacatggtgtccttcgaggaggaccggatcaacgccacggtgtggaagctccagcccacagccggcctccaggacctgcacatccactcccggcaggaggaggagcagagcgagatcatggagtactcggtgctgctgcctcgaacactcttccagaggacgaaaggccggagcggggaggctgagaagagactcctcctggtggacttcagcagccaagccctgttccaggacaagaattccagccaagtcctgggtgagaaggtcttggggattgtggtacagaacaccaaagtagccaacctcacggagcccgtggtgctcactttccagcaccagctacagccgaagaatgtgactctgcaatgtgtgttctgggttgaagaccccacattgagcagcccggggcattggagcagtgctgggtgtgagaccgtcaggagagaaacccaaacatcctgcttctgcaaccacttgacctactttgcagtgctgatggtctcctcggtggaggtggacgccgtgcacaagcactacctgagcctcctctcctacgtgggctgtgtcgtctctgccctggcctgccttgtcaccattgccgcctacctctgctccaggaggaaacctcgggactacaccatcaaggtgcacatgaacctgctgctggccgtcttcctgctggacacgagcttcctgctcagcgagccggtggccctgacaggctctgaggctggctgccgagccagtgccatcttcctgcacttctccctgctcacctgcctttcctggatgggcctcgaggggtacaacctctaccgactcgtggtggaggtctttggcacctatgtccctggctacctactcaagctgagcgccatgggctggggcttccccatctttctggtgacgctggtggccctggtggatgtggacaactatggccccatcatcttggctgtgcataggactccagagggcgtcatctacccttccatgtgctggatccgggactccctggtcagctacatcaccaacctgggcctcttcagcctggtgtttctgttcaacatggccatgctagccaccatggtggtgcagatcctgcggctgcgcccccacacccaaaagtggtcacatgtgctgacactgctgggcctcagcctggtccttggcctgccctgggccttgatcttcttctcctttgcttctggcaccttccagcttgtcgtcctctaccttttcagcatcatcacctccttccaaggcttcctcatcttcatctggtactggtccatgcggctgcaggcccggggtggcccctcccctctgaagagcaactcagacagcgccaggctccccatcagctcgggcagcacctcgtccagccgcatctaggcctccagcccacctgcccatgtgatgaagcagagattcggcctcgtcgcacactgcctgtggcccccgagcccggcccagccccaggccagtcagccgcagactttggaaagcccaacgaccatggagagatgggccgttgccatggtggacggactcccgggctgggcttttgaattggccttggggactactcggctctcactcagctcccacgggactcagaagtgcgccgccatgctgcctagggtactgtccccacatctgtcccaacccagctggaggcctggtctctccttacaacccctgggcccagccctcattgctgggggccaggccttggatcttgagggtctggcacatccttaatcctgtgcccctgcctgggacagaaatgtggctccagttgctctgtctctcgtggtcaccctgagggcactctgcatcctctgtcattttaacctcaggtggcacccagggcgaatggggcccagggcagaccttcagggccagagccctggcggaggagaggccctttgccaggagcacagcagcagctcgcctacctctgagcccaggccccctccctccctcagccccccagtcctccctccatcttccctggggttctcctcctctcccagggcctccttgctccttcgttcacagctgggggtccccgattccaatgctgttttttggggagtggtttccaggagctgcctggtgtctgctgtaaatgtttgtctactgcacaagcctcggcctgcccctgagccaggctcggtaccgatgcgtgggctgggctaggtccctctgtccatctgggcctttgtatgagctgcattgcccttgctcaccctgaccaagcacacgcctcagaggggccctcagcctctcctgaagccctcttgtggcaagaactgtggaccatgccagtcccgtctggtttccatcccaccactccaaggactgagactgacctcctctggtgacactggcctagggcctgacactctcctaagaggttctctccaagcccccaaatagctccaggcgccctcggccgcccatcatggttaattctgtccaacaaacacacacgggtagattgctggcctgttgtaggtggtagggacacagatgaccgacctggtcactcctcctgccaacattcagtctggtatgtgaggcgtgcgtgaagcaagaactcctggagctacagggacagggagccatcattcctgcctgggaatcctggaagacttcctgcaggagtcagcgttcaatcttgaccttgaagatgggaaggatgttctttttacgtaccaattcttttgtcttttgatattaaaaagaagtacatgttcattgtagagaatttggaaactgtagaagagaatcaagaagaaaaataaaaatcagctgttgtaatcacct

SEQ ID NO: 11623 - DNA, 1624 bp, Homo sapiens
  source 1..1624: mol_type = unassigned DNA
ggtgcaaatccggccgcgatgaacgcgagcgccgcctcgctcaacgactcccaggtggtggtagtggcggccgaaggagcggcggcggcggccacagcagcaggggggccggacacgggcgaatggggaccccctgctgcggcggctctaggagccggcggcggagctaatgggtctctggagctgtcctcgcagctgtcggctgggccaccgggactcctgctgccagcggtgaatccgtgggacgtgctcctgtgcgtgtcggggacagtgatcgctggagaaaacgcgctggtggtggcgctcatcgcgtccactccggcgctgcgcacgcccatgttcgtgctggtaggcagcctggccaccgctgacctgttggcgggctgtggcctcatcttgcactttgtgttccagtacttggtgccctcggagactgtgagtctgctcacggtgggcttcctcgtggcctccttcgccgcctctgtcagcagcctgctggccattacggtggaccgctacctgtccctgtataacgcgctcacctattactcgcgccggaccctgttgggcgtgcacctcctgcttgccgccacttggaccgtgtccctaggcctggggctgctgcccgtgctgggctggaactgcctggcagagcgcgccgcctgcagcgtggtgcgcccgctggcgcgcagccacgtggctctgctctccgccgccttcttcatggtcttcggcatcatgctgcacctgtacgtgcgcatctgccaggtggtctggcgccacgcgcaccagatcgcgctgcagcagcactgcctggcgccaccccatctcgctgccaccagaaagggtgtgggtacactggctgtggtgctgggcactttcggcgccagctggctgcccttcgccatctattgcgtggtgggcagccatgaggacccggcggtctacacttacgccaccctgctgcccgccacctacaactccatgatcaatcccatcatctatgccttccgcaaccaggagatccagcgcgccctgtggctcctgctctgtggctgtttccagtccaaagtgccctttcgttccaggtctcccagcgaggtctgaagggctcgccccgtgtcctctcaccaacaccacaccccaacaagccagcctttggtaagctcggtgcctgctgacgaactctgagatcccaatggtgtgagtctgactttggaaagaaaaagggactaaagagaaatgtaacaaacttacaaggacaaagaggcttgttggcactttacatatacagtgtatacatgtgtacatatatatacaaatatttgtatcttctggaggtgttcaggatgtggagcttcctattctgtgaaaaaccaagaaaaagatatggttgtatactcaaattgtacatcacgtttgtcaaacgaagacattccaatactgcttaattatagcactttatttttagctgctgaactgccaaaacagtgttgccattttcaagggcagggaaaagggagtaaaaggtgtatttttgtcgtatgtgatagaatattttgctgcacatgcatcaacaaattacaacatgttttgtacacgaataaacccattacaagaatgt

SEQ ID NO: 11624 - DNA, 1711 bp, Homo sapiens
  source 1..1711: mol_type = unassigned DNA
actcgcggagccggcacagcgacaggcgccccgcgcttgcctcctccccggcccggccgcctcctgcaggcagctgctctgtttgcgcggggagctcagcccggcgccccgcctcggcgcccatgaccagcgacttccagaagtcctgacgccccagcaccgcggacagcgtctctgctgcccagccccatggggatgtcctggtcgcgccgccacaacccaggcgggactctcccaggatgacactcctagcttggtgcactcggggtgcaaatccggccgcgatgaacgcgagcgccgcctcgctcaacgactcccaggtggtggtagtggcggccgaaggagcggcggcggcggccacagcagcaggggggccggacacgggcgaatggggaccccctgctgcggcggctctaggagccggcggcggagctaatgggtctctggagctgtcctcgcagctgtcggctgggccaccgggactcctgctgccagcggtgaatccgtgggacgtgctcctgtgcgtgtcggggacagtgatcgctggagaaaacgcgctggtggtggcgctcatcgcgtccactccggcgctgcgcacgcccatgttcgtgctggtaggcagcctggccaccgctgacctgttggcgggctgtggcctcatcttgcactttgtgttccagtacttggtgccctcggagactgtgagtctgctcacggtgggcttcctcgtggcctccttcgccgcctctgtcagcagcctgctggccattacggtggaccgctacctgtccctgtataacgcgctcacctattactcgcgccggaccctgttgggcgtgcacctcctgcttgccgccacttggaccgtgtccctaggcctggggctgctgcccgtgctgggctggaactgcctggcagagcgcgccgcctgcagcgtggtgcgcccgctggcgcgcagccacgtggctctgctctccgccgccttcttcatggtcttcggcatcatgctgcacctgtacgtgcgcatctgccaggtggtctggcgccacgcgcaccagatcgcgctgcagcagcactgcctggcgccaccccatctcgctgccaccagaaagggtgtgggtacactggctgtggtgctgggcactttcggcgccagctggctgcccttcgccatctattgcgtggtgggcagccatgaggacccggcggtctacacttacgccaccctgctgcccgccacctacaactccatgatcaatcccatcatctatgccttccgcaaccaggagatccagcgcgccctgtggctcctgctctgtggctgtttccagtccaaagtgccctttcgttccaggtctcccagcgaggtctgaagggctcgccccgtgtcctctcaccaacaccacaccccaacaagccagcctttggtaagctcggtgcctgctgacgaactctgagatcccaatggtgtgagtctgactttggaaagaaaaagggactaaagagaaatgtaacaaacttacaaggacaaagaggcttgttggcactttacatatacagtgtatacatgtgtacatatatatacaaatatttgtatcttctggaggtgttcaggatgtggagcttcctattctgtgaaaaaccaagaaaaagatatggttgtatactcaaattgtacatcacgtttgtcaaacgaagacattccaatact

SEQ ID NO: 11625 - DNA, 1259 bp, Homo sapiens
  source 1..1259: mol_type = unassigned DNA
ctctcactcgcggagccggcacagcgacaggcgccccgcgcttgcctcctccccggcccggccgcctcctgcaggcagctgctctgtttgcgcggggagctcagcccggcgccccgcctcggcgcccatgaccagcgacttccagaagtcctgacgccccagggtgcaaatccggccgcgatgaacgcgagcgccgcctcgctcaacgactcccaggtggtggtagtggcggccgaaggagcggcggcggcggccacagcagcaggggggccggacacgggcgaatggggaccccctgctgcggcggctctaggagccggcggcggagctaatgggtctctggagctgtcctcgcagctgtcggctgggccaccgggactcctgctgccagcggtgaatccgtgggacgtgctcctgtgcgtgtcggggacagtgatcgctggagaaaacgcgctggtggtggcgctcatcgcgtccactccggcgctgcgcacgcccatgttcgtgctggtaggcagcctggccaccgctgacctgttggcgggctgtggcctcatcttgcactttgtgttccagtacttggtgccctcggagactgtgagtctgctcacggtgggcttcctcgtggcctccttcgccgcctctgtcagcagcctgctggccattacggtggaccgctacctgtccctgtataacgcgctcacctattactcgcgccggaccctgttgggcgtgcacctcctgcttgccgccacttggaccgtgtccctaggcctggggctgctgcccgtgctgggctggaactgcctggcagagcgcgccgcctgcagcgtggtgcgcccgctggcgcgcagccacgtggctctgctctccgccgccttcttcatggtcttcggcatcatgctgcacctgtacgtgcgcatctgccaggtggtctggcgccacgcgcaccagatcgcgctgcagcagcactgcctggcgccaccccatctcgctgccaccagaaagggtgtgggtacactggctgtggtgctgggcactttcggcgccagctggctgcccttcgccacctacaactccatgatcaatcccatcatctatgccttccgcaaccaggagatccagcgcgccctgtggctcctgctctgtggctgtttccagtccaaagtgccctttcgttccaggtctcccagcgaggtctgaagggctcgccccgtgtcctctcaccaacaccacaccccaacaagccagcctttggt

SEQ ID NO: 11626 - DNA, 2819 bp, Homo sapiens
  source 1..2819: mol_type = unassigned DNA
gcagtgcttcaggcttcagcagccttggagaagcatcagctgagaggagctatcacatgggagccgggactgctcagcaaagatggatttatgaggaaactgaaattcagaagattcacagagttagtaatgcccagaactgggactagaaactaaattttgtgctccttctactccccagcagctcttgccattctgaggagacaagaaatcaggaaatttacataaggaaccctaaaactgaggcactatcccagagatcagcaggaccctgggaaggagaaacaggatttagaatccccggctaacagttctggaaagggtagaagggtatggagaacaagaatggcagaaaggagatggaaaaggaagaggtgaaggccattccgaaagcggagtgttgagtgggtcaggctcctgcacctctcacgtctcctgcttcttagcagtcaccaaggcagaccctgcagctacctccggccagaaaggggatgagcttctgatccttcagctgcctggcctggcgctctgtacgcagacaaacctgcccaagaggctccagtgggaggtgccccctacgaaaccaggaagcctgggcctgggctcgccatcccagggtcgctggactaggatgggggatgggcctcaggaggtaccctgggtgccctctttcggccccatggagtcctcacccatcccccagtcatcagggaactcttccactttggggagggtccctcaaaccccaggtccctctactgccagtggggtcccggaggtggggctacgggatgttgcttcggaatctgtggccctcttcttcatgctcctgctggacttgactgctgtggctggcaatgccgctgtgatggccgtgatcgccaagacgcctgccctccgaaaatttgtcttcgtcttccacctctgcctggtggacctgctggctgccctgaccctcatgcccctggccatgctctccagctctgccctctttgaccacgccctctttggggaggtggcctgccgcctctacttgtttctgagcgtgtgctttgtcagcctggccatcctctcggtgtcagccatcaatgtggagcgctactattacgtagtccaccccatgcgctacgaggtgcgcatgacgctggggctggtggcctctgtgctggtgggtgtgtgggtgaaggccttggccatggcttctgtgccagtgttgggaagggtctcctgggaggaaggagctcccagtgtccccccaggctgttcactccagtggagccacagtgcctactgccagctttttgtggtggtctttgctgtcctttactttctgttgcccctgctcctcatacttgtggtctactgcagcatgttccgagtggcccgcgtggctgccatgcagcacgggccgctgcccacgtggatggagacaccccggcaacgctccgaatctctcagcagccgctccacgatggtcaccagctcgggggccccccagaccaccccacaccggacgtttgggggagggaaagcagcagtggttctcctggctgtggggggacagttcctgctctgttggttgccctacttctctttccacctctatgttgccctgagtgctcagcccatttcaactgggcaggtggagagtgtggtcacctggattggctacttttgcttcacttccaaccctttcttctatggatgtctcaaccggcagatccggggggagctcagcaagcagtttgtctgcttcttcaagccagctccagaggaggagctgaggctgcctagccgggagggctccattgaggagaacttcctgcagttccttcaggggactggctgtccttctgagtcctgggtttcccgacccctacccagccccaagcaggagccacctgctgttgactttcgaatcccaggccagatagctgaggagacctctgagttcctggagcagcaactcaccagcgacatcatcatgtcagacagctacctccgtcctgccgcctcaccccggctggagtcatgatgggccgctggacactcggagggatatggggctggggccagttatgattgcaaggaccaccttgtgggatcaccttttcccagctggctagggctgaggctggggtctctgcacacagcttttgcttagtgtttcctgggtcaggaacagagccaacaggatgaacgtgtgcaaaagccttggacttggctgtgatctttgactgctaggggagggaacctgggtatggtgagacggtgacgagagaaaagggtcacaaaggactggcctccctgatctctctcctcatggcagcgacccacctccagtcccctggacaatcgggtacaagagacttaaggttgggcatgggaagggtggggtttccatgatccattaaatgccttcctactcccattcatcgctctcaaaattagcttcagtgacaaagacttaaatctctctcctatctgcagcactgggttggagagagggcacgggagttggtcttggctgttcattgattgagactgtaggaactgtgttggttggtattggtggtggtattttcaacaaacagggaataactgcaaactggacaggacacccatctgggaccacctgtccatcctacttccctcaattgaatcaggtaacactaacggatcaaggcagggccagagggtggtgtggtctctatttgaacaaattcctggctcactgagcatcaaaaggggaaatgggctggtgggagtgggatagtctcccatttaagcagctaataaataatttttatgataaaagg

SEQ ID NO: 11627 - DNA, 2834 bp, Homo sapiens
  source 1..2834: mol_type = unassigned DNA
gcagtgcttcaggcttcagcagccttggagaagcatcagctgagaggagctatcacatgggagccgggactgctcagcaaagatggatttatgaggaaactgaaattcagaagattcacagagttagtaatgcccagaactgggactagaaactaaattttgtgctccttctactccccagcagctcttgccattctgaggagacaagaaatcaggaaatttacataaggaaccctaaaactgaggcactatcccagagatcagcaggaccctgggaaggagaaacaggatttagaatccccggctaacagttctggaaagggtagaagggtatggagaacaagaatggcagaaaggagatggaaaaggaagaggtgaaggccattccgaaagcggagtgttgagtgggtcaggctcctgcacctctcacgtctcctgcttcttagcagtcaccaaggcagaccctgcagctacctccggccagaaaggggatgagcttctgatccttcagctgcctggcctggcgctctgtacgcagacaaacctgcccaagaggctccagtgggaggtgccccctacgaaaccaggaagcctgggcctgggctcgccatcccagggtcgctggactaggatgggggatgggcctgtgacaggaggtaccctgggtgccctctttcggccccatggagtcctcacccatcccccagtcatcagggaactcttccactttggggagggtccctcaaaccccaggtccctctactgccagtggggtcccggaggtggggctacgggatgttgcttcggaatctgtggccctcttcttcatgctcctgctggacttgactgctgtggctggcaatgccgctgtgatggccgtgatcgccaagacgcctgccctccgaaaatttgtcttcgtcttccacctctgcctggtggacctgctggctgccctgaccctcatgcccctggccatgctctccagctctgccctctttgaccacgccctctttggggaggtggcctgccgcctctacttgtttctgagcgtgtgctttgtcagcctggccatcctctcggtgtcagccatcaatgtggagcgctactattacgtagtccaccccatgcgctacgaggtgcgcatgacgctggggctggtggcctctgtgctggtgggtgtgtgggtgaaggccttggccatggcttctgtgccagtgttgggaagggtctcctgggaggaaggagctcccagtgtccccccaggctgttcactccagtggagccacagtgcctactgccagctttttgtggtggtctttgctgtcctttactttctgttgcccctgctcctcatacttgtggtctactgcagcatgttccgagtggcccgcgtggctgccatgcagcacgggccgctgcccacgtggatggagacaccccggcaacgctccgaatctctcagcagccgctccacgatggtcaccagctcgggggccccccagaccaccccacaccggacgtttgggggagggaaagcagcagtggttctcctggctgtggggggacagttcctgctctgttggttgccctacttctctttccacctctatgttgccctgagtgctcagcccatttcaactgggcaggtggagagtgtggtcacctggattggctacttttgcttcacttccaaccctttcttctatggatgtctcaaccggcagatccggggggagctcagcaagcagtttgtctgcttcttcaagccagctccagaggaggagctgaggctgcctagccgggagggctccattgaggagaacttcctgcagttccttcaggggactggctgtccttctgagtcctgggtttcccgacccctacccagccccaagcaggagccacctgctgttgactttcgaatcccaggccagatagctgaggagacctctgagttcctggagcagcaactcaccagcgacatcatcatgtcagacagctacctccgtcctgccgcctcaccccggctggagtcatgatgggccgctggacactcggagggatatggggctggggccagttatgattgcaaggaccaccttgtgggatcaccttttcccagctggctagggctgaggctggggtctctgcacacagcttttgcttagtgtttcctgggtcaggaacagagccaacaggatgaacgtgtgcaaaagccttggacttggctgtgatctttgactgctaggggagggaacctgggtatggtgagacggtgacgagagaaaagggtcacaaaggactggcctccctgatctctctcctcatggcagcgacccacctccagtcccctggacaatcgggtacaagagacttaaggttgggcatgggaagggtggggtttccatgatccattaaatgccttcctactcccattcatcgctctcaaaattagcttcagtgacaaagacttaaatctctctcctatctgcagcactgggttggagagagggcacgggagttggtcttggctgttcattgattgagactgtaggaactgtgttggttggtattggtggtggtattttcaacaaacagggaataactgcaaactggacaggacacccatctgggaccacctgtccatcctacttccctcaattgaatcaggtaacactaacggatcaaggcagggccagagggtggtgtggtctctatttgaacaaattcctggctcactgagcatcaaaaggggaaatgggctggtgggagtgggatagtctcccatttaagcagctaataaataatttttatgataaaaggttatactgata

SEQ ID NO: 11628 - DNA, 2557 bp, Homo sapiens
  source 1..2557: mol_type = unassigned DNA
ctatcacatgggagccgggactgctcagcaaagatggatttatgaggaaactgaaattcagaagattcacagagttagtaatgcccagaactgggactagaaactaaattttgtgctccttctactccccagcagctcttgccattctgaggagacaagaaatcaggaaatttacataaggaaccctaaaactgaggcactatcccagagatcagcaggaccctgggaaggagaaacaggatttagaatccccggctaacagttctggaaagggtagaagggtatggagaacaagaatggcagaaaggagatggaaaaggaagaggtgaaggccattccgaaagcggagtgttgagtgggtcaggctcctgcacctctcacgtctcctgcttcttagcagtcaccaaggcagaccctgcagctacctccggccagaaaggggatgagcttctgatccttcagctgcctggcctggcgctctgtacgcagacaaacctgcccaagaggctccagtgggaggtgccccctacgaaaccaggaagcctgggcctgggctcgccatcccagggtcgctggactaggatgggggatgggcctgtgacaggaggtaccctgggtgccctctttcggccccatggagtcctcacccatcccccagtcatcagggaactcttccactttggggagggtccctcaaaccccaggtccctctactgccagtggggtcccggaggtggggctacgggatgttgcttcggaatctgtggccctcttcttcatgctcctgctggacttgactgctgtggctggcaatgccgctgtgatggccgtgatcgccaagacgcctgccctccgaaaatttgtcttcgtcttccacctctgcctggtggacctgctggctgccctgaccctcatgcccctggccatgctctccagctctgccctctttgaccacgccctctttggggaggtggcctgccgcctctacttgtttctgagcgtgtgctttgtcagcctggccatcctctcggtgtcagccatcaatgtggagcgctactattacgtagtccaccccatgcgctacgaggtgcgcatgacgctggggctggtggcctctgtgctggtgggtgtgtgggtgaaggccttggccatggcttctgtgccagtgttgggaagggtctcctgggaggaaggagctcccagtgtccccccaggctgttcactccagtggagccacagtgcctactgccagctttttgtggtggtctttgctgtcctttactttctgttgcccctgctcctcatacttgtggtctactgcagcatgttccgagtggcccgcgtggctgccatgcagcacgggccgctgcccacgtggatggagacaccccggcaacgctccgaatctctcagcagccgctccacgatggtcaccagctcgggggccccccagaccaccccacaccggacgtttgggggagggaaagcagcagtggttctcctggctgtggggggacagttcctgctctgttggttgccctacttctctttccacctctatgttgccctgagtgctcagcccatttcaactgggcaggtggagagtgtggtcacctggattggctacttttgcttcacttccaaccctttcttctatggatgtctcaaccggcagatccggggggagctcagcaagcagtttgtctgcttcttcaagccagctccagaggaggagctgaggctgcctagccgggagggctccattgaggagaacttcctgcagttccttcaggggactggctgtccttctgagtcctgggtttcccgacccctacccagccccaagcaggagccacctgctgttgactttcgaatcccaggccagatagctgaggagacctctgagttcctggagcagcaactcaccagcgacatcatcatgtcagacagctacctccgtcctgccgcctcaccccggctggagtcatgatgggccgctggacactcggagggatatggggctggggccagttatgattgcaaggaccaccttgtgggatcaccttttcccagctggctagggctgaggctggggtctctgcacacagcttttgcttagtgtttcctgggtcaggaacagagccaacaggatgaacgtgtgcaaaagccttggacttggctgtgatctttgactgctaggggagggaacctgggtatggtgagacggtgacgagagaaaagggtcacaaaggactggcctccctgatctctctcctcatggcagcgacccacctccagtcccctggacaatcgggtacaagagacttaaggagtggatcatgaaggaaataaaaatttctcttttattatgctgagaactttcccaacaatttctgctatgaccaccttccaggagttttctagtcaccagatgccttggtaaagttcaatacgtaatctttggctctgaaagctgttcctggacaaaatctgagctaactcactgaagaatcaacagattgaggcaaccatccggtagccgaaaggtaaatgaggc

SEQ ID NO: 11629 - DNA, 4921 bp, Homo sapiens
  source 1..4921: mol_type = unassigned DNA
gcagtgcttcaggcttcagcagccttggagaagcatcagctgagaggagctatcacatgggagccgggactgctcagcaaagatggatttatgaggaaactgaaattcagaagattcacagagttagtaatgcccagaactgggactagaaactaaattttgtgctccttctactccccagcagctcttgccattctgaggagacaagaaatcaggaaatttacataaggaaccctaaaactgaggcactatcccagagatcagcaggaccctgggaaggagaaacaggatttagaatccccggctaacagttctggaaagggtagaagggtatggagaacaagaatggcagaaaggagatggaaaaggaagaggtgaaggccattccgaaagcggagtgttgagtgggtcaggctcctgcacctctcacgtctcctgcttcttagcagtcaccaaggcagaccctgcagctacctccggccagaaaggggatgagcttctgatccttcagctgcctggcctggcgctctgtacgcagacaaacctgcccaagaggctccagtgggaggtgccccctacgaaaccaggaagcctgggcctgggctcgccatcccagggtcgctggactaggatgggggatgggcctgtgacaggaggtaccctgggtgccctctttcggccccatggagtcctcacccatcccccagtcatcagggaactcttccactttggggagggtccctcaaaccccaggtccctctactgccagtggggtcccggaggtggggctacgggatgttgcttcggaatctgtggccctcttcttcatgctcctgctggacttgactgctgtggctggcaatgccgctgtgatggccgtgatcgccaagacgcctgccctccgaaaatttgtcttcgtcttccacctctgcctggtggacctgctggctgccctgaccctcatgcccctggccatgctctccagctctgccctctttgaccacgccctctttggggaggtggcctgccgcctctacttgtttctgagcgtgtgctttgtcagcctggccatcctctcggtgtcagccatcaatgtggagcgctactattacgtagtccaccccatgcgctacgaggtgcgcatgacgctggggctggtggcctctgtgctggtgggtgtgtgggtgaaggccttggccatggcttctgtgccagtgttgggaagggtctcctgggaggaaggagctcccagtgtccccccaggctgttcactccagtggagccacagtgcctactgccagctttttgtggtggtctttgctgtcctttactttctgttgcccctgctcctcatacttgtggtctactgcagcatgttccgagtggcccgcgtggctgccatgcagcacgggccgctgcccacgtggatggagacaccccggcaacgctccgaatctctcagcagccgctccacgatggtcaccagctcgggggccccccagaccaccccacaccggacgtttgggggagggaaagcagcagtggttctcctggctgtggggggacagttcctgctctgttggttgccctacttctctttccacctctatgttgccctgagtgctcagcccatttcaactgggcaggtggagagtgtggtcacctggattggctacttttgcttcacttccaaccctttcttctatggatgtctcaaccggcagatccggggggagctcagcaagcagtttgtctgcttcttcaagccagctccagaggaggagctgaggctgcctagccgggagggctccattgaggagaacttcctgcagttccttcaggggactggctgtccttctgagtcctgggtttcccgacccctacccagccccaagcaggagccacctgctgttgactttcgaatcccaggccagatagctgaggagacctctgagttcctggagcagcaactcaccagcgacatcatcatgtcagacagctacctccgtcctgccgcctcaccccggctggagtcatgatgggccgctggacactcggagggatatggggctggggccagttatgattgcaaggaccaccttgtgggatcaccttttcccagctggctagggctgaggctggggtctctgcacacagcttttgcttagtgtttcctgggtcaggaacagagccaacaggatgaacgtgtgcaaaagccttggacttggctgtgatctttgactgctaggggagggaacctgggtatggtgagacggtgacgagagaaaagggtcacaaaggtgaggtgaaacctctcaattggtgaaatttccatgcttccagaagcagggaattctctaagggtaggagttggaggatacagggcagcaggccaggtttggagttattctaggggccatttaggatattttatttttcagtgtaattgtccagggcagtaattgcacccaagcaaggtaagaaaatgacccatgttttctcatttccttgctaggtttaaaaagaactaaattatagccaagtgtttccacttgagttaatagatcatttttctggttttatacctgagatttccttaaaatgagaggaccagtagggtgtattcctttactgagtttggccagaaacaaggcaaaatagaaattagggtacatggagtagaagataggaaagctgactgcagctctctctctcccacccttcaggaaaagcccttctgttctatttttctgtctctctcctgcacacaggagatcaagggtagagcctgatcttagcagagacaagaataaggcaggatggctttcctctcttttaggaggaagaattagaatgactgggggtcagacgggcgagggtggaggttagcatttgaattggtaaagtagctggaaacagagaggccaggtaatcagcctgatcaataatactgcgaatcttttctttccaggactggcctccctgatctctctcctcatggcagcgacccacctccagtcccctggacaatcgggtacaagagacttaaggttgggcatgggaagggtggggtttccatgatccattaaatgccttcctactcccattcatcgctctcaaaattagcttcagtgacaaagacttaaatctctctcctatctgcagcactgggttggagagagggcacgggagttggtcttggctgttcattgattgagactgtaggaactgtgttggttggtattggtggtggtattttcaacaaacagggaataactgcaaactggacaggacacccatctgggaccacctgtccatcctacttccctcaattgaatcaggtaacactaacggatcaaggcagggccagagggtggtgtggtctctatttgaacaaattcctggctcactgagcatcaaaaggggaaatgggctggtgggagtgggatagtctcccatttaagcagctaataaataatttttatgataaaaggttatactgataacaacattgactcctttagttcaattcagtgcataatagttgaacacccactagtccctgggacccacacagggcgtgtggtcattgcttttaaggagttcatagtctaagttgatgagataccttatattttcacaaagcactttgatttgataaagcactacagaatgtgcttgagaaatatattggagaatatgtccatggctctaacttctgagagttcagcccgtggcagcaagatgcataccttgaagcttcctgcagattgtggaaagcataggggttgtaaatgaaactctctaatgaagaaaaaaaattaaatgaaactgggcaaacagctttccccctttgttctaggaaaatttctaggttgtcttcctaccactagattattataccagtctagtgcctattacattgtggaagttccctaaaaacatagtatatatagggaggagagtcctttgtgattgaaaaacatgttcacctctcctccctattaaaataaatgcatacagaggaatcaatcattcctagacagggaaaaaactcttctttcaaacaccactgatcagctattagatccaaggaattgccagcaggtggcagtgtgagcccaatggaaggaggaaaggcgagtgtacgtggtgggaggaggaaggggagggcattaaacattgcctggcagccattttgttaatttattttgccttttcctttgactttgccctccagcccttccttcacatacatcaaagaagaaagttttaagagcaagggtatctttaattcaggctgaaatttcctgacactgtgatctcactggtgtttattacagagtttgacatacatgggttcatttgccatttatttttccctgtaggagtggatcatgaaggaaataaaaatttctcttttattatgctgagaactttcccaacaatttctgctatgaccaccttccaggagttttctagtcaccagatgccttggtaaagttcaatacgtaatctttggctctgaaagctgttcctggacaaaatctgagctaactcactgaagaatcaacagattgaggcaaccatccggtcagttactttttcctgcatcctgctggtgttggggtaactcccaatcctagatgaaaaccttagactttctgttgtcaggtgtccccaggcaatatcctacgggggcatgatagaaaagggtaactctggggtcagatagatgtacttactcactgtgtgaagttgggaaagctgcttaatttctctgagcctacttcctcacctgtaaaaatggggatcattattacctacctcacagggttgttgtgaggattaagagatgggatgtgggagcacctagccgtatctggcaaataggtactcaataaatactggttttacttcc

SEQ ID NO: 11630 - DNA, 2180 bp, Homo sapiens
  source 1..2180: mol_type = unassigned DNA
cagggggctggcgccaggccctgcccctcccttgccagccgtgtgtggcaacatcagagtgacagccagtaccatctccgacaggggctgagttgctggagctgggctggggcaggggagaaagacagcagactcatccttgcacccctccatgggcctggccaagcccccaagaggatggcagcctgggcgtcggagccacctcctgggcagccaatgaggtgaggggccggaggagcaagggacaagaggagcagaggacaggtgatggaaatcctgcagctttaggctccattctgccatctacatcccagcgcagggtgaagcctgagagcccaaatggccaactccacagggctgaacgcctcagaagtcgcaggctcgttggggttgatcctggcagctgtcgtggaggtgggggcactgctgggcaacggcgcgctgctggtcgtggtgctgcgcacgccgggactgcgcgacgcgctctacctggcgcacctgtgcgtcgtggacctgctggcggccgcctccatcatgccgctgggcctgctggccgcaccgccgcccgggctgggccgcgtgcgcctgggccccgcgccatgccgcgccgctcgcttcctctccgccgctctgctgccggcctgcacgctcggggtggccgcacttggcctggcacgctaccgcctcatcgtgcacccgctgcggccaggctcgcggccgccgcctgtgctcgtgctcaccgccgtgtgggccgcggcgggactgctgggcgcgctctccctgctcggcacgccgcccgcaccgccccctgctcctgctcgctgctcggtcctggctgggggcctcgggcccttccggccgctctgggccctgctggccttcgcgctgcccgccctcctgctgctcggcgcctacggcggcatcttcgtggtggcgcgtcgcgctgccctgaggcccccacggccggcgcgcgggtcccgactccactcggactctctggatagccgcctttccatcttgccgccgctccggcctcgcctgcccgggggcaaggcggccctggccccagcgctggccgtgggccaatttgcagcctgctggctgccttatggctgcgcgtgcctggcgcccgcagcgcgggccgcggaagccgaagcggctgtcacctgggtcgcctactcggccttcgcggctcaccccttcctgtacgggctgctgcagcgccccgtgcgcttggcactgggccgcctctctcgccgtgcactgcctggacctgtgcgggcctgcactccgcaagcctggcacccgcgggcactcttgcaatgcctccagagacccccagagggccctgccgtaggcccttctgaggctccagaacagacccccgagttggcaggagggcggagccccgcataccaggggccacctgagagttctctctcctgagcaggagaaaggagggtggtttccgtgggggctcatccaacccctgcacaggtcacagcaggtgccctgctggatatctgggtctggaacaggaggagaaagggtgtctgctgcctggtgaggcccacggacttctgagagccaggaatcctgcggtctgggcccaacactgcatagcactgtgcataggccgacccttccttaggcctcagctttcccatctgcaccctgcagcatctctaagggcccctccagcataggtggtttgtgaaactcacaggtggtccccaggccaagatgggcaggtgtcacaaagaagagggccctaagggctcacaaccaaagtgatccgccaagcagggcagtatctgggttacagccacagcaggaagaaccactggagagacactcagaaggacttccctgacatctgcaccaaggagagtctggacaaagctactgaaactcctccacctgcttctaaaatgcccagaagacaactggaccagtttggtattagaagtaggaggctggacgacttcacccccaaagggtcctgaagccccagaactggcatgtggaaggggctgaggcctaattgaggttggtggattcacacatgggggtcctccaggacctcagctgcacccattttctggaggttttgctgcccacaacaccagtatttcacaacttcctggtcgctgagaatatttattcaaaaacagggattg

SEQ ID NO: 11631 - DNA, 2080 bp, Homo sapiens
  source 1..2080: mol_type = unassigned DNA
actttcagctccagctcccgccaccgccgcctgtatcgccgccgccgccaccacctcctcttcgttgtcctccttcctcctccgcctggcagcgttgttctctgcagcggaggagagaagtgctatgtcaggaaagttccgggagggactacatggagccatgctccctgggctcttccgcgggcgcccgcgcgctgcccttcgcttgaggcaaaaggactcttgtggaagatggaactcattgtccattttccagaatgtatttccaagcccatcaatgggacctgatactgctgttctgtgttgaaatgcttgaagaactcctgcatctctgcttgcatcttccatcctactgaaaccatggtcttctcggcagtgttgactgcgttccataccgggacatccaacacaacatttgtcgtgtatgaaaacacctacatgaatattacactccctccaccattccagcatcctgacctcagtccattgcttagatatagttttgaaaccatggctcccactggtttgagttccttgaccgtgaatagtacagctgtgcccacaacaccagcagcatttaagagcctaaacttgcctcttcagatcaccctttctgctataatgatattcattctgtttgtgtcttttcttgggaacttggttgtttgcctcatggtttaccaaaaagctgccatgaggtctgcaattaacatcctccttgccagcctagcttttgcagacatgttgcttgcagtgctgaacatgccctttgccctggtaactattcttactacccgatggatttttgggaaattcttctgtagggtatctgctatgtttttctggttatttgtgatagaaggagtagccatcctgctcatcattagcatagataggttccttattatagtccagaggcaggataagctaaacccatatagagctaaggttctgattgcagtttcttgggcaacttccttttgtgtagcttttcctttagccgtaggaaaccccgacctgcagataccttcccgagctccccagtgtgtgtttgggtacacaaccaatccaggctaccaggcttatgtgattttgatttctctcatttctttcttcatacccttcctggtaatactgtactcatttatgggcatactcaacacccttcggcacaatgccttgaggatccatagctaccctgaaggtatatgcctcagccaggccagcaaactgggtctcatgagtctgcagagacctttccagatgagcattgacatgggctttaaaacacgtgccttcaccactattttgattctctttgctgtcttcattgtctgctgggccccattcaccacttacagccttgtggcaacattcagtaagcacttttactatcagcacaacttttttgagattagcacctggctactgtggctctgctacctcaagtctgcattgaatccgctgatctactactggaggattaagaaattccatgatgcttgcctggacatgatgcctaagtccttcaagtttttgccgcagctccctggtcacacaaagcgacggatacgtcctagtgctgtctatgtgtgtggggaacatcggacggtggtgtgaatattggaactggctgacattttgggtgatgcttgttctttattgacattgaattctctttctcatagcctctccactttatttttttttatagggtttgtgtatgtatgtgtgtgagcagtgtaaagaaagaatggtaattatagttctgttaccaagaataaataataggaaagtgattacaaatattacctccagggttcaatagaaatcctcaatttagggtgaggagacttttttttggttttggggtttttccttgattgattttgttttcatagtgggaatcaggattgtgctttattgagcctgcagttacattgaattgtaggtgtttcgtgtgctgctaaggtatgcttatttgagtttatcaagactttttttttctggaagacactgctgcttttaccatcacattggagccaaacatctcaatcaatatatatttagttttatttta

SEQ ID NO: 11632 - DNA, 1801 bp, Homo sapiens
  source 1..1801: mol_type = unassigned DNA
ttcaggcaaaaggactcttgtggaagatggaactcattgtccattttccagaatgtatttccaagcccatcaatgggacctgatactgctgttctgtgttgaaatgcttgaagaactcctgcatctctgcttgcatcttccatcctactgaaaccatggtcttctcggcagtgttgactgcgttccataccgggacatccaacacaacatttgtcgtgtatgaaaacacctacatgaatattacactccctccaccattccagcatcctgacctcagtccattgcttagatatagttttgaaaccatggctcccactggtttgagttccttgaccgtgaatagtacagctgtgcccacaacaccagcagcatttaagagcctaaacttgcctcttcagatcaccctttctgctataatgatattcattctgtttgtgtcttttcttgggaacttggttgtttgcctcatggtttaccaaaaagctgccatgaggtctgcaattaacatcctccttgccagcctagcttttgcagacatgttgcttgcagtgctgaacatgccctttgccctggtaactattcttactacccgatggatttttgggaaattcttctgtagggtatctgctatgtttttctggttatttgtgatagaaggagtagccatcctgctcatcattagcatagataggttccttattatagtccagaggcaggataagctaaacccatatagagctaaggttctgattgcagtttcttgggcaacttccttttgtgtagcttttcctttagccgtaggaaaccccgacctgcagataccttcccgagctccccagtgtgtgtttgggtacacaaccaatccaggctaccaggcttatgtgattttgatttctctcatttctttcttcatacccttcctggtaatactgtactcatttatgggcatactcaacacccttcggcacaatgccttgaggatccatagctaccctgaaggtatatgcctcagccaggccagcaaactgggtctcatgagtctgcagagacctttccagatgagcattgacatgggctttaaaacacgtgccttcaccactattttgattctctttgctgtcttcattgtctgctgggccccattcaccacttacagccttgtggcaacattcagtaagcacttttactatcagcacaacttttttgagattagcacctggctactgtggctctgctacctcaagtctgcattgaatccgctgatctactactggaggattaagaaattccatgatgcttgcctggacatgatgcctaagtccttcaagtttttgccgcagctccctggtcacacaaagcgacggatacgtcctagtgctgtctatgtgtgtggggaacatcggacggtggtgtgaatattggaactggctgacattttgggtgatgcttgttctttattgacattgaattctctttctcatagcctctccactttatttttttttatagggtttgtgtatgtatgtgtgtgagcagtgtaaagaaagaatggtaattatagttctgttaccaagaataaataataggaaagtgattacaaatattacctccagggttcaatagaaatcctcaatttagggtgaggagacttttttttggttttggggtttttccttgattgattttgttttcatagtgggaatcaggattgtgctttattgagcctgcagttacattgaattgtaggtgtttcgtgtgctgctaaggtatgcttatttgagtttatcaagacttttttttt

SEQ ID NO: 11633 - DNA, 2198 bp, Homo sapiens
  source 1..2198: mol_type = unassigned DNA
actttcagctccagctcccgccaccgccgcctgtatcgccgccgccgccaccacctcctcttcgttgtcctccttcctcctccgcctggcagcgttgttctctgcagcggaggagagaagtgctatgtcaggaaagttccgggagggactacatggagccatgctccctgggctcttccgcgggcgcccgcgcgctgcccttcgcttgagagtctcaccgtgttgcccaggctggaatgcagtggcgcgatctcggctcacagcaacctccgcctcccgggttcaagcgattctcatgcttcagcctcctgagtacctgggattactggcaaaaggactcttgtggaagatggaactcattgtccattttccagaatgtatttccaagcccatcaatgggacctgatactgctgttctgtgttgaaatgcttgaagaactcctgcatctctgcttgcatcttccatcctactgaaaccatggtcttctcggcagtgttgactgcgttccataccgggacatccaacacaacatttgtcgtgtatgaaaacacctacatgaatattacactccctccaccattccagcatcctgacctcagtccattgcttagatatagttttgaaaccatggctcccactggtttgagttccttgaccgtgaatagtacagctgtgcccacaacaccagcagcatttaagagcctaaacttgcctcttcagatcaccctttctgctataatgatattcattctgtttgtgtcttttcttgggaacttggttgtttgcctcatggtttaccaaaaagctgccatgaggtctgcaattaacatcctccttgccagcctagcttttgcagacatgttgcttgcagtgctgaacatgccctttgccctggtaactattcttactacccgatggatttttgggaaattcttctgtagggtatctgctatgtttttctggttatttgtgatagaaggagtagccatcctgctcatcattagcatagataggttccttattatagtccagaggcaggataagctaaacccatatagagctaaggttctgattgcagtttcttgggcaacttccttttgtgtagcttttcctttagccgtaggaaaccccgacctgcagataccttcccgagctccccagtgtgtgtttgggtacacaaccaatccaggctaccaggcttatgtgattttgatttctctcatttctttcttcatacccttcctggtaatactgtactcatttatgggcatactcaacacccttcggcacaatgccttgaggatccatagctaccctgaaggtatatgcctcagccaggccagcaaactgggtctcatgagtctgcagagacctttccagatgagcattgacatgggctttaaaacacgtgccttcaccactattttgattctctttgctgtcttcattgtctgctgggccccattcaccacttacagccttgtggcaacattcagtaagcacttttactatcagcacaacttttttgagattagcacctggctactgtggctctgctacctcaagtctgcattgaatccgctgatctactactggaggattaagaaattccatgatgcttgcctggacatgatgcctaagtccttcaagtttttgccgcagctccctggtcacacaaagcgacggatacgtcctagtgctgtctatgtgtgtggggaacatcggacggtggtgtgaatattggaactggctgacattttgggtgatgcttgttctttattgacattgaattctctttctcatagcctctccactttatttttttttatagggtttgtgtatgtatgtgtgtgagcagtgtaaagaaagaatggtaattatagttctgttaccaagaataaataataggaaagtgattacaaatattacctccagggttcaatagaaatcctcaatttagggtgaggagacttttttttggttttggggtttttccttgattgattttgttttcatagtgggaatcaggattgtgctttattgagcctgcagttacattgaattgtaggtgtttcgtgtgctgctaaggtatgcttatttgagtttatcaagactttttttttctggaagacactgctgcttttaccatcacattggagccaaacatctcaatcaatatatatttagttttatttta

SEQ ID NO: 11634 - DNA, 2080 bp, Homo sapiens; identical to SEQ ID NO: 11631
  source 1..2080: mol_type = unassigned DNA

SEQ ID NO: 11635 - DNA, 3594 bp, Homo sapiens
  source 1..3594: mol_type = unassigned DNA
tgcacagaggttctccactttgttttctgaactcgcggtcaggatggttttctctgtcaggcagtgtggccatgttggcagaactgaagaagttttactgacgttcaagatattccttgtcatcatttgtcttcatgtcgttctggtaacatccctggaagaagatactgataattccagtttgtcaccaccacctgaggttgaaacaacaagcctcaatgatgttactttaagcttactcccttcaaacgaaacaggcgtcaaaccccagagaaatatctgcaatttgtcatctatttgcaatgactcagcattttttagaggtgagatcatgtttcaatatgataaagaaagcactgttccccagaatcaacatataacgaatggcaccttaactggagtcctgtctctaagtgaattaaaacgctcagagctcaacaaaaccctgcaaaccctaagtgagacttactttataatgtgtgctacagcagaggcccaaagcacattaaattgtacattcacaataaaactgaataatacaatgaatgcatgtgctgtaatagctgctttggaaagagtaaagattcgaccaatggaacactgctgctgttctgtcaggataccctgcccttcctccccagaagagttggaaaagcttcagtgtgacctgcaggatcccattgtctgtcttgctgaccatccacgtggcccaccattttcttccagccaatccatcccagtggtgcctcgggccactgtgctttcccaggtccccaaagctacctcttttgctgagcctccagattattcacctgtgacccacaatgttccctctccaataggggagattcaacccctttcaccccagccttcagctcccatagcttccagccctgccattgacatgcccccacagtctgaaacgatctcttcccctatgccccaaacccatgtctccggcaccccacctcctgtgaaagcctcattttcctctcccaccgtgtctgcccctgcgaatgtcaacactaccagcgcacctcctgtccagacagacatcgtcaacaccagcagtatttctgatcttgagaaccaagtgttgcagatggagaaggctctgtccttgggcagcctggagcctaacctcgcaggagaaatgatcaaccaagtcagcagactccttcattccccgcctgacatgctggcccctctggctcaaagattgctgaaagtagtggatgacattggcctacagctgaacttttcaaacacgactataagtctaacctccccttctttggctctggctgtgatcagagtgaatgccagtagtttcaacacaactacctttgtggcccaagaccctgcaaatcttcaggatgagttaacagtgagatgtgtattttgggacttgggcagaaatggtggcagaggaggctggtcagacaatggctgctctgtcaaagacaggagattgaatgaaaccatctgtacctgtagccatctaacaagcttcggcgttctgctggacctatctaggacatctgtgctgcctgctcaaatgatggctctgacgttcattacatatattggttgtgggctttcatcaatttttctgtcagtgactcttgtaacctacatagcttttgaaaagatccggagggattacccttccaaaatcctcatccagctgtgtgctgctctgcttctgctgaacctggtcttcctcctggactcgtggattgctctgtataagatgcaaggcctctgcatctcagtggctgtatttcttcattattttctcttggtctcattcacatggatgggcctagaagcattccatatgtacctggcccttgtcaaagtatttaatacttacatccgaaaatacatccttaaattctgcattgtcggttggggggtaccagctgtggttgtgaccatcatcctgactatatccccagataactatgggcttggatcctatgggaaattccccaatggttcaccggatgacttctgctggatcaacaacaatgcagtattctacattacggtggtgggatatttctgtgtgatatttttgctgaacgtcagcatgttcattgtggtcctggttcagctctgtcgaattaaaaagaagaagcaactgggagcccagcgaaaaaccagtattcaagacctcaggagtatcgctggccttacatttttactgggaataacttggggctttgccttctttgcctggggaccagttaacgtgaccttcatgtatctgtttgccatctttaataccttacaaggatttttcatattcatcttttactgtgtggccaaagaaaatgtcaggaagcaatggaggcggtatctttgttgtggaaagttacggctggctgaaaattctgactggagtaaaactgctactaatggtttaaagaagcagactgtaaaccaaggagtgtccagctcttcaaattccttacagtcaagcagtaactccactaactccaccacactgctagtgaataatgattgctcagtacacgcaagcgggaatggaaatgcttctacagagaggaatggggtctcttttagtgttcagaatggagatgtgtgccttcacgatttcactggaaaacagcacatgtttaacgagaaggaagattcctgcaatgggaaaggccgtatggctctcagaaggacttcaaagcggggaagcttacactttattgagcaaatgtgattcctttcttctaaaatcaaagcatgatgcttgacagtgtgaaatgtccaattttaccttttacacaatgtgagatgtatgaaaatcaactcattttattctcggcaacatctggagaagcataagctaattaagggcgatgattattattacaagaagaaaccaagacattacaccatggtttttagacatttctgatttggtttcttatctttcattttataagaaggttggttttaaacaatacactaagaatgactcctataaagaaaacaaaaaaaggtagtgaactttcagctaccttttaaagaggctaagttatctttgataacatcatataaagcaactgttgacttcagcctgttggtgagtttagttgtgcatgcctttgttgtatataagctaaattctagtgacccatgtgtcaaaaatcttacttctacatttttttgtatttattttctactgtgtaaatgtattcctttgtagaatcatggttgttttgtctcacgtgataattcagaaaatccttgctcgttccgcaaatcctaaagctccttttggagatgatataggatgtgaaatacagaaacctcagtgaaatcaagaaataatgatcccagccagactgagaaaatgtaagcagacagtgccacagttagctcatacagtgcctttgagcaagttaggaaaagatgcccccactgggcagacacagccctatgggctcatggtttgacaaacagagtggagagaccatattttagccccactcaccctcttgggtgcacgacctgtacagccaaacacagcatccaatatgaatacccatcccctgaccgcatccccagtag

SEQ ID NO: 11636 - DNA, 4803 bp, Homo sapiens
  source 1..4803: mol_type = unassigned DNA
gcgcccagcctcgccgccgccgagcgcccgacgcgccacgccgcgctgggcagctggagagctggcggcggagcgggccgggagcggcgggggcggcgccgaggccgcgggcggggggaggagggccgcagccccggagaggggaaaaggcgggccggacggcgccagcagccagccccgaggacgcgagcggcaggtgtgcacagaggttctccactttgttttctgaactcgcggtcaggatggttttctctgtcaggcagtgtggccatgttggcagaactgaagaagttttactgacgttcaagatattccttgtcatcatttgtcttcatgtcgttctggtaacatccctggaagaagatactgataattccagtttgtcaccaccacctgatgaggaaactggggcttgttcagatgttactttaagcttactcccttcaaacgaaacagaaaaaactaaaatcactatagtaaaaaccttcaatgcatcaggcgtcaaaccccagagaaatatctgcaatttgtcatctatttgcaatgactcagcattttttagaggtgagatcatgtttcaatatgataaagaaagcactgttccccagaatcaacatataacgaatggcaccttaactggagtcctgtctctaagtgaattaaaacgctcagagctcaacaaaaccctgcaaaccctaagtgagacttactttataatgtgtgctacagcagaggcccaaagcacattaaattgtacattcacaataaaactgaataatacaatgaatgcatgtgctgtaatagctgctttggaaagagtaaagattcgaccaatggaacactgctgctgttctgtcaggataccctgcccttcctccccagaagagttggaaaagcttcagtgtgacctgcaggatcccattgtctgtcttgctgaccatccacgtggcccaccattttcttccagccaatccatcccagtggtgcctcgggccactgtgctttcccaggtccccaaagctacctcttttgctgagcctccagattattcacctgtgacccacaatgttccctctccaataggggagattcaacccctttcaccccagccttcagctcccatagcttccagccctgccattgacatgcccccacagtctgaaacgatctcttcccctatgccccaaacccatgtctccggcaccccacctcctgtgaaagcctcattttcctctcccaccgtgtctgcccctgcgaatgtcaacactaccagcgcacctcctgtccagacagacatcgtcaacaccagcagtatttctgatcttgagaaccaagtgttgcagatggagaaggctctgtccttgggcagcctggagcctaacctcgcaggagaaatgatcaaccaagtcagcagactccttcattccccgcctgacatgctggcccctctggctcaaagattgctgaaagtagtggatgacattggcctacagctgaacttttcaaacacgactataagtctaacctccccttctttggctctggctgtgatcagagtgaatgccagtagtttcaacacaactacctttgtggcccaagaccctgcaaatcttcaggtttctctggaaacccaagctcctgagaacagtattggcacaattactcttccttcatcgctgatgaataatttaccagctcatgacatggagctagcttccagggttcagttcaatttttttgaaacacctgctttgtttcaggatccttccctggagaacctctctctgatcagctacgtcatatcatcgagtgttgcaaacctgaccgtcaggaacttgacaagaaacgtgacagtcacattaaagcacatcaacccgagccaggatgagttaacagtgagatgtgtattttgggacttgggcagaaatggtggcagaggaggctggtcagacaatggctgctctgtcaaagacaggagattgaatgaaaccatctgtacctgtagccatctaacaagcttcggcgttctgctggacctatctaggacatctgtgctgcctgctcaaatgatggctctgacgttcattacatatattggttgtgggctttcatcaatttttctgtcagtgactcttgtaacctacatagcttttgaaaagatccggagggattacccttccaaaatcctcatccagctgtgtgctgctctgcttctgctgaacctggtcttcctcctggactcgtggattgctctgtataagatgcaaggcctctgcatctcagtggctgtatttcttcattattttctcttggtctcattcacatggatgggcctagaagcattccatatgtacctggcccttgtcaaagtatttaatacttacatccgaaaatacatccttaaattctgcattgtcggttggggggtaccagctgtggttgtgaccatcatcctgactatatccccagataactatgggcttggatcctatgggaaattccccaatggttcaccggatgacttctgctggatcaacaacaatgcagtattctacattacggtggtgggatatttctgtgtgatatttttgctgaacgtcagcatgttcattgtggtcctggttcagctctgtcgaattaaaaagaagaagcaactgggagcccagcgaaaaaccagtattcaagacctcaggagtatcgctggccttacatttttactgggaataacttggggctttgccttctttgcctggggaccagttaacgtgaccttcatgtatctgtttgccatctttaataccttacaaggatttttcatattcatcttttactgtgtggccaaagaaaatgtcaggaagcaatggaggcggtatctttgttgtggaaagttacggctggctgaaaattctgactggagtaaaactgctactaatggtttaaagaagcagactgtaaaccaaggagtgtccagctcttcaaattccttacagtcaagcagtaactccactaactccaccacactgctagtgaataatgattgctcagtacacgcaagcgggaatggaaatgcttctacagagaggaatggggtctcttttagtgttcagaatggagatgtgtgccttcacgatttcactggaaaacagcacatgtttaacgagaaggaagattcctgcaatgggaaaggccgtatggctctcagaaggacttcaaagcggggaagcttacactttattgagcaaatgtgattcctttcttctaaaatcaaagcatgatgcttgacagtgtgaaatgtccaattttaccttttacacaatgtgagatgtatgaaaatcaactcattttattctcggcaacatctggagaagcataagctaattaagggcgatgattattattacaagaagaaaccaagacattacaccatggtttttagacatttctgatttggtttcttatctttcattttataagaaggttggttttaaacaatacactaagaatgactcctataaagaaaacaaaaaaaggtagtgaactttcagctaccttttaaagaggctaagttatctttgataacatcatataaagcaactgttgacttcagcctgttggtgagtttagttgtgcatgcctttgttgtatataagctaaattctagtgacccatgtgtcaaaaatcttacttctacatttttttgtatttattttctactgtgtaaatgtattcctttgtagaatcatggttgttttgtctcacgtgataattcagaaaatccttgctcgttccgcaaatcctaaagctccttttggagatgatataggatgtgaaatacagaaacctcagtgaaatcaagaaataatgatcccagccagactgagaaaatgtaagcagacagtgccacagttagctcatacagtgcctttgagcaagttaggaaaagatgcccccactgggcagacacagccctatgggctcatggtttgacaaacagagtggagagaccatattttagccccactcaccctcttgggtgcacgacctgtacagccaaacacagcatccaatatgaatacccatcccctgaccgcatccccagtagtcagattatagaatctgcaccaagatgtttagctttataccttggccacagagagggatgaactgtcatccagaccatgtgtcaggaaaattgtgaacgtagatgaggtacatacactgccgcttctcaaatccccagagcctttaggaacaggagagtagactaggattccttctcttaaaaaggtacatatatatggaaaaaaatcatattgccgttctttaaaaggcaactgcatggtacattgttgattgttatgactggtacactctggcccagccagagctataattgttttttaaatgtgtcttgaagaatgcacagtgacaaggggagtagctattgggaacagggaactgtcctacactgctattgttgctacatgtatcgagccttgattgctcctagttatatacagggtctatcttgcttcctacctacatctgcttgagcagtgcctcaagtacatccttattaggaacatttcaaaccccttttagttaagtctttcactaaggttctcttgcatatatttcaagtgaatgttggatctcagactaaccatagtaataatacacatttctgtgagtgctgacttgtctttgcaatatttcttttctgatttatttaattttcttgtatttatatgttaaaatcaaaaatgttaaaatcaatgaaataaatttgcagttaagatcttt

SEQ ID NO: 11637 - DNA, 4630 bp, Homo sapiens
  source 1..4630: mol_type = unassigned DNA
agccccgaggacgcgagcggcaggtgtgcacagaggttctccactttgttttctgaactcgcggtcaggatggttttctctgtcaggcagtgtggccatgttggcagaactgaagaagttttactgacgttcaagatattccttgtcatcatttgtcttcatgtcgttctggtaacatccctggaagaagatactgataattccagtttgtcaccaccacctgctaaattatctgttgtcagttttgccccctcctccaatggtactccagaggttgaaacaacaagcctcaatgatgttactttaagcttactcccttcaaacgaaacaggcgtcaaaccccagagaaatatctgcaatttgtcatctatttgcaatgactcagcattttttagaggtgagatcatgtttcaatatgataaagaaagcactgttccccagaatcaacatataacgaatggcaccttaactggagtcctgtctctaagtgaattaaaacgctcagagctcaacaaaaccctgcaaaccctaagtgagacttactttataatgtgtgctacagcagaggcccaaagcacattaaattgtacattcacaataaaactgaataatacaatgaatgcatgtgctgtaatagctgctttggaaagagtaaagattcgaccaatggaacactgctgctgttctgtcaggataccctgcccttcctccccagaagagttggaaaagcttcagtgtgacctgcaggatcccattgtctgtcttgctgaccatccacgtggcccaccattttcttccagccaatccatcccagtggtgcctcgggccactgtgctttcccaggtccccaaagctacctcttttgctgagcctccagattattcacctgtgacccacaatgttccctctccaataggggagattcaacccctttcaccccagccttcagctcccatagcttccagccctgccattgacatgcccccacagtctgaaacgatctcttcccctatgccccaaacccatgtctccggcaccccacctcctgtgaaagcctcattttcctctcccaccgtgtctgcccctgcgaatgtcaacactaccagcgcacctcctgtccagacagacatcgtcaacaccagcagtatttctgatcttgagaaccaagtgttgcagatggagaaggctctgtccttgggcagcctggagcctaacctcgcaggagaaatgatcaaccaagtcagcagactccttcattccccgcctgacatgctggcccctctggctcaaagattgctgaaagtagtggatgacattggcctacagctgaacttttcaaacacgactataagtctaacctccccttctttggctctggctgtgatcagagtgaatgccagtagtttcaacacaactacctttgtggcccaagaccctgcaaatcttcaggtttctctggaaacccaagctcctgagaacagtattggcacaattactcttccttcatcgctgatgaataatttaccagctcatgacatggagctagcttccagggttcagttcaatttttttgaaacacctgctttgtttcaggatccttccctggagaacctctctctgatcagctacgtcatatcatcgagtgttgcaaacctgaccgtcaggaacttgacaagaaacgtgacagtcacattaaagcacatcaacccgagccaggatgagttaacagtgagatgtgtattttgggacttgggcagaaatggtggcagaggaggctggtcagacaatggctgctctgtcaaagacaggagattgaatgaaaccatctgtacctgtagccatctaacaagcttcggcgttctgctggacctatctaggacatctgtgctgcctgctcaaatgatggctctgacgttcattacatatattggttgtgggctttcatcaatttttctgtcagtgactcttgtaacctacatagcttttgaaaagatccggagggattacccttccaaaatcctcatccagctgtgtgctgctctgcttctgctgaacctggtcttcctcctggactcgtggattgctctgtataagatgcaaggcctctgcatctcagtggctgtatttcttcattattttctcttggtctcattcacatggatgggcctagaagcattccatatgtacctggcccttgtcaaagtatttaatacttacatccgaaaatacatccttaaattctgcattgtcggttggggggtaccagctgtggttgtgaccatcatcctgactatatccccagataactatgggcttggatcctatgggaaattccccaatggttcaccggatgacttctgctggatcaacaacaatgcagtattctacattacggtggtgggatatttctgtgtgatatttttgctgaacgtcagcatgttcattgtggtcctggttcagctctgtcgaattaaaaagaagaagcaactgggagcccagcgaaaaaccagtattcaagacctcaggagtatcgctggccttacatttttactgggaataacttggggctttgccttctttgcctggggaccagttaacgtgaccttcatgtatctgtttgccatctttaataccttacaaggatttttcatattcatcttttactgtgtggccaaagaaaatgtcaggaagcaatggaggcggtatctttgttgtggaaagttacggctggctgaaaattctgactggagtaaaactgctactaatggtttaaagaagcagactgtaaaccaaggagtgtccagctcttcaaattccttacagtcaagcagtaactccactaactccaccacactgctagtgaataatgattgctcagtacacgcaagcgggaatggaaatgcttctacagagaggaatggggtctcttttagtgttcagaatggagatgtgtgccttcacgatttcactggaaaacagcacatgtttaacgagaaggaagattcctgcaatgggaaaggccgtatggctctcagaaggacttcaaagcggggaagcttacactttattgagcaaatgtgattcctttcttctaaaatcaaagcatgatgcttgacagtgtgaaatgtccaattttaccttttacacaatgtgagatgtatgaaaatcaactcattttattctcggcaacatctggagaagcataagctaattaagggcgatgattattattacaagaagaaaccaagacattacaccatggtttttagacatttctgatttggtttcttatctttcattttataagaaggttggttttaaacaatacactaagaatgactcctataaagaaaacaaaaaaaggtagtgaactttcagctaccttttaaagaggctaagttatctttgataacatcatataaagcaactgttgacttcagcctgttggtgagtttagttgtgcatgcctttgttgtatataagctaaattctagtgacccatgtgtcaaaaatcttacttctacatttttttgtatttattttctactgtgtaaatgtattcctttgtagaatcatggttgttttgtctcacgtgataattcagaaaatccttgctcgttccgcaaatcctaaagctccttttggagatgatataggatgtgaaatacagaaacctcagtgaaatcaagaaataatgatcccagccagactgagaaaatgtaagcagacagtgccacagttagctcatacagtgcctttgagcaagttaggaaaagatgcccccactgggcagacacagccctatgggctcatggtttgacaaacagagtggagagaccatattttagccccactcaccctcttgggtgcacgacctgtacagccaaacacagcatccaatatgaatacccatcccctgaccgcatccccagtagtcagattatagaatctgcaccaagatgtttagctttataccttggccacagagagggatgaactgtcatccagaccatgtgtcaggaaaattgtgaacgtagatgaggtacatacactgccgcttctcaaatccccagagcctttaggaacaggagagtagactaggattccttctcttaaaaaggtacatatatatggaaaaaaatcatattgccgttctttaaaaggcaactgcatggtacattgttgattgttatgactggtacactctggcccagccagagctataattgttttttaaatgtgtcttgaagaatgcacagtgacaaggggagtagctattgggaacagggaactgtcctacactgctattgttgctacatgtatcgagccttgattgctcctagttatatacagggtctatcttgcttcctacctacatctgcttgagcagtgcctcaagtacatccttattaggaacatttcaaaccccttttagttaagtctttcactaaggttctcttgcatatatttcaagtgaatgttggatctcagactaaccatagtaataatacacatttctgtgagtgctgacttgtctttgcaatatttcttttctgatttatttaattttcttgtatttatatgttaaaatcaaaaatgttaaaatcaatgaaataaatttgcagttaag

SEQ ID NO: 11638 - DNA, 4678 bp, Homo sapiens
  source 1..4678: mol_type = unassigned DNA
cgggagcggcgggggcggcgccgaggccgcgggcggggggaggagggccgcagccccggagaggggaaaaggcgggccggacggcgccagcagccagccccgaggacgcgagcggcaggtgtgcacagaggttctccactttgttttctgaactcgcggtcaggatggttttctctgtcaggcagtgtggccatgttggcagaactgaagaagttttactgacgttcaagatattccttgtcatcatttgtcttcatgtcgttctggtaacatccctggaagaagatactgataattccagtttgtcaccaccacctgaggttgaaacaacaagcctcaatgatgttactttaagcttactcccttcaaacgaaacaggcgtcaaaccccagagaaatatctgcaatttgtcatctatttgcaatgactcagcattttttagaggtgagatcatgtttcaatatgataaagaaagcactgttccccagaatcaacatataacgaatggcaccttaactggagtcctgtctctaagtgaattaaaacgctcagagctcaacaaaaccctgcaaaccctaagtgagacttactttataatgtgtgctacagcagaggcccaaagcacattaaattgtacattcacaataaaactgaataatacaatgaatgcatgtgctgtaatagctgctttggaaagagtaaagattcgaccaatggaacactgctgctgttctgtcaggataccctgcccttcctccccagaagagttggaaaagcttcagtgtgacctgcaggatcccattgtctgtcttgctgaccatccacgtggcccaccattttcttccagccaatccatcccagtggtgcctcgggccactgtgctttcccaggtccccaaagctacctcttttgctgagcctccagattattcacctgtgacccacaatgttccctctccaataggggagattcaacccctttcaccccagccttcagctcccatagcttccagccctgccattgacatgcccccacagtctgaaacgatctcttcccctatgccccaaacccatgtctccggcaccccacctcctgtgaaagcctcattttcctctcccaccgtgtctgcccctgcgaatgtcaacactaccagcgcacctcctgtccagacagacatcgtcaacaccagcagtatttctgatcttgagaaccaagtgttgcagatggagaaggctctgtccttgggcagcctggagcctaacctcgcaggagaaatgatcaaccaagtcagcagactccttcattccccgcctgacatgctggcccctctggctcaaagattgctgaaagtagtggatgacattggcctacagctgaacttttcaaacacgactataagtctaacctccccttctttggctctggctgtgatcagagtgaatgccagtagtttcaacacaactacctttgtggcccaagaccctgcaaatcttcaggtttctctggaaacccaagctcctgagaacagtattggcacaattactcttccttcatcgctgatgaataatttaccagctcatgacatggagctagcttccagggttcagttcaatttttttgaaacacctgctttgtttcaggatccttccctggagaacctctctctgatcagctacgtcatatcatcgagtgttgcaaacctgaccgtcaggaacttgacaagaaacgtgacagtcacattaaagcacatcaacccgagccaggatgagttaacagtgagatgtgtattttgggacttgggcagaaatggtggcagaggaggctggtcagacaatggctgctctgtcaaagacaggagattgaatgaaaccatctgtacctgtagccatctaacaagcttcggcgttctgctggacctatctaggacatctgtgctgcctgctcaaatgatggctctgacgttcattacatatattggttgtgggctttcatcaatttttctgtcagtgactcttgtaacctacatagcttttgaaaagatccggagggattacccttccaaaatcctcatccagctgtgtgctgctctgcttctgctgaacctggtcttcctcctggactcgtggattgctctgtataagatgcaaggcctctgcatctcagtggctgtatttcttcattattttctcttggtctcattcacatggatgggcctagaagcattccatatgtacctggcccttgtcaaagtatttaatacttacatccgaaaatacatccttaaattctgcattgtcggttggggggtaccagctgtggttgtgaccatcatcctgactatatccccagataactatgggcttggatcctatgggaaattccccaatggttcaccggatgacttctgctggatcaacaacaatgcagtattctacattacggtggtgggatatttctgtgtgatatttttgctgaacgtcagcatgttcattgtggtcctggttcagctctgtcgaattaaaaagaagaagcaactgggagcccagcgaaaaaccagtattcaagacctcaggagtatcgctggccttacatttttactgggaataacttggggctttgccttctttgcctggggaccagttaacgtgaccttcatgtatctgtttgccatctttaataccttacaaggatttttcatattcatcttttactgtgtggccaaagaaaatgtcaggaagcaatggaggcggtatctttgttgtggaaagttacggctggctgaaaattctgactggagtaaaactgctactaatggtttaaagaagcagactgtaaaccaaggagtgtccagctcttcaaattccttacagtcaagcagtaactccactaactccaccacactgctagtgaataatgattgctcagtacacgcaagcgggaatggaaatgcttctacagagaggaatggggtctcttttagtgttcagaatggagatgtgtgccttcacgatttcactggaaaacagcacatgtttaacgagaaggaagattcctgcaatgggaaaggccgtatggctctcagaaggacttcaaagcggggaagcttacactttattgagcaaatgtgattcctttcttctaaaatcaaagcatgatgcttgacagtgtgaaatgtccaattttaccttttacacaatgtgagatgtatgaaaatcaactcattttattctcggcaacatctggagaagcataagctaattaagggcgatgattattattacaagaagaaaccaagacattacaccatggtttttagacatttctgatttggtttcttatctttcattttataagaaggttggttttaaacaatacactaagaatgactcctataaagaaaacaaaaaaaggtagtgaactttcagctaccttttaaagaggctaagttatctttgataacatcatataaagcaactgttgacttcagcctgttggtgagtttagttgtgcatgcctttgttgtatataagctaaattctagtgacccatgtgtcaaaaatcttacttctacatttttttgtatttattttctactgtgtaaatgtattcctttgtagaatcatggttgttttgtctcacgtgataattcagaaaatccttgctcgttccgcaaatcctaaagctccttttggagatgatataggatgtgaaatacagaaacctcagtgaaatcaagaaataatgatcccagccagactgagaaaatgtaagcagacagtgccacagttagctcatacagtgcctttgagcaagttaggaaaagatgcccccactgggcagacacagccctatgggctcatggtttgacaaacagagtggagagaccatattttagccccactcaccctcttgggtgcacgacctgtacagccaaacacagcatccaatatgaatacccatcccctgaccgcatccccagtagtcagattatagaatctgcaccaagatgtttagctttataccttggccacagagagggatgaactgtcatccagaccatgtgtcaggaaaattgtgaacgtagatgaggtacatacactgccgcttctcaaatccccagagcctttaggaacaggagagtagactaggattccttctcttaaaaaggtacatatatatggaaaaaaatcatattgccgttctttaaaaggcaactgcatggtacattgttgattgttatgactggtacactctggcccagccagagctataattgttttttaaatgtgtcttgaagaatgcacagtgacaaggggagtagctattgggaacagggaactgtcctacactgctattgttgctacatgtatcgagccttgattgctcctagttatatacagggtctatcttgcttcctacctacatctgcttgagcagtgcctcaagtacatccttattaggaacatttcaaaccccttttagttaagtctttcactaaggttctcttgcatatatttcaagtgaatgttggatctcagactaaccatagtaataatacacatttctgtgagtgctgacttgtctttgcaatatttcttttctgatttatttaattttcttgtatttatatgttaaaatcaaaaatgttaaaatcaatgaaataaatttgcagttaaga

SEQ ID NO: 11639 - DNA, 4661 bp, Homo sapiens
  source 1..4661: mol_type = unassigned DNA
cccgaggacgcgagcggcaggtgtgcacagaggttctccactttgttttctgaactcgcggtcaggatggttttctctgtcaggcagtgtggccatgttggcagaactgaagaagttttactgacgttcaagatattccttgtcatcatttgtcttcatgtcgttctggtaacatccctggaagaagatactgataattccagtttgtcaccaccacctgctaaattatctgttgtcagttttgccccctcctccaatgaggttgaaacaacaagcctcaatgatgttactttaagcttactcccttcaaacgaaacagaaaaaactaaaatcactatagtaaaaaccttcaatgcatcaggcgtcaaaccccagagaaatatctgcaatttgtcatctatttgcaatgactcagcattttttagaggtgagatcatgtttcaatatgataaagaaagcactgttccccagaatcaacatataacgaatggcaccttaactggagtcctgtctctaagtgaattaaaacgctcagagctcaacaaaaccctgcaaaccctaagtgagacttactttataatgtgtgctacagcagaggcccaaagcacattaaattgtacattcacaataaaactgaataatacaatgaatgcatgtgctgtaatagctgctttggaaagagtaaagattcgaccaatggaacactgctgctgttctgtcaggataccctgcccttcctccccagaagagttggaaaagcttcagtgtgacctgcaggatcccattgtctgtcttgctgaccatccacgtggcccaccattttcttccagccaatccatcccagtggtgcctcgggccactgtgctttcccaggtccccaaagctacctcttttgctgagcctccagattattcacctgtgacccacaatgttccctctccaataggggagattcaacccctttcaccccagccttcagctcccatagcttccagccctgccattgacatgcccccacagtctgaaacgatctcttcccctatgccccaaacccatgtctccggcaccccacctcctgtgaaagcctcattttcctctcccaccgtgtctgcccctgcgaatgtcaacactaccagcgcacctcctgtccagacagacatcgtcaacaccagcagtatttctgatcttgagaaccaagtgttgcagatggagaaggctctgtccttgggcagcctggagcctaacctcgcaggagaaatgatcaaccaagtcagcagactccttcattccccgcctgacatgctggcccctctggctcaaagattgctgaaagtagtggatgacattggcctacagctgaacttttcaaacacgactataagtctaacctccccttctttggctctggctgtgatcagagtgaatgccagtagtttcaacacaactacctttgtggcccaagaccctgcaaatcttcaggtttctctggaaacccaagctcctgagaacagtattggcacaattactcttccttcatcgctgatgaataatttaccagctcatgacatggagctagcttccagggttcagttcaatttttttgaaacacctgctttgtttcaggatccttccctggagaacctctctctgatcagctacgtcatatcatcgagtgttgcaaacctgaccgtcaggaacttgacaagaaacgtgacagtcacattaaagcacatcaacccgagccaggatgagttaacagtgagatgtgtattttgggacttgggcagaaatggtggcagaggaggctggtcagacaatggctgctctgtcaaagacaggagattgaatgaaaccatctgtacctgtagccatctaacaagcttcggcgttctgctggacctatctaggacatctgtgctgcctgctcaaatgatggctctgacgttcattacatatattggttgtgggctttcatcaatttttctgtcagtgactcttgtaacctacatagcttttgaaaagatccggagggattacccttccaaaatcctcatccagctgtgtgctgctctgcttctgctgaacctggtcttcctcctggactcgtggattgctctgtataagatgcaaggcctctgcatctcagtggctgtatttcttcattattttctcttggtctcattcacatggatgggcctagaagcattccatatgtacctggcccttgtcaaagtatttaatacttacatccgaaaatacatccttaaattctgcattgtcggttggggggtaccagctgtggttgtgaccatcatcctgactatatccccagataactatgggcttggatcctatgggaaattccccaatggttcaccggatgacttctgctggatcaacaacaatgcagtattctacattacggtggtgggatatttctgtgtgatatttttgctgaacgtcagcatgttcattgtggtcctggttcagctctgtcgaattaaaaagaagaagcaactgggagcccagcgaaaaaccagtattcaagacctcaggagtatcgctggccttacatttttactgggaataacttggggctttgccttctttgcctggggaccagttaacgtgaccttcatgtatctgtttgccatctttaataccttacaaggatttttcatattcatcttttactgtgtggccaaagaaaatgtcaggaagcaatggaggcggtatctttgttgtggaaagttacggctggctgaaaattctgactggagtaaaactgctactaatggtttaaagaagcagactgtaaaccaaggagtgtccagctcttcaaattccttacagtcaagcagtaactccactaactccaccacactgctagtgaataatgattgctcagtacacgcaagcgggaatggaaatgcttctacagagaggaatggggtctcttttagtgttcagaatggagatgtgtgccttcacgatttcactggaaaacagcacatgtttaacgagaaggaagattcctgcaatgggaaaggccgtatggctctcagaaggacttcaaagcggggaagcttacactttattgagcaaatgtgattcctttcttctaaaatcaaagcatgatgcttgacagtgtgaaatgtccaattttaccttttacacaatgtgagatgtatgaaaatcaactcattttattctcggcaacatctggagaagcataagctaattaagggcgatgattattattacaagaagaaaccaagacattacaccatggtttttagacatttctgatttggtttcttatctttcattttataagaaggttggttttaaacaatacactaagaatgactcctataaagaaaacaaaaaaaggtagtgaactttcagctaccttttaaagaggctaagttatctttgataacatcatataaagcaactgttgacttcagcctgttggtgagtttagttgtgcatgcctttgttgtatataagctaaattctagtgacccatgtgtcaaaaatcttacttctacatttttttgtatttattttctactgtgtaaatgtattcctttgtagaatcatggttgttttgtctcacgtgataattcagaaaatccttgctcgttccgcaaatcctaaagctccttttggagatgatataggatgtgaaatacagaaacctcagtgaaatcaagaaataatgatcccagccagactgagaaaatgtaagcagacagtgccacagttagctcatacagtgcctttgagcaagttaggaaaagatgcccccactgggcagacacagccctatgggctcatggtttgacaaacagagtggagagaccatattttagccccactcaccctcttgggtgcacgacctgtacagccaaacacagcatccaatatgaatacccatcccctgaccgcatccccagtagtcagattatagaatctgcaccaagatgtttagctttataccttggccacagagagggatgaactgtcatccagaccatgtgtcaggaaaattgtgaacgtagatgaggtacatacactgccgcttctcaaatccccagagcctttaggaacaggagagtagactaggattccttctcttaaaaaggtacatatatatggaaaaaaatcatattgccgttctttaaaaggcaactgcatggtacattgttgattgttatgactggtacactctggcccagccagagctataattgttttttaaatgtgtcttgaagaatgcacagtgacaaggggagtagctattgggaacagggaactgtcctacactgctattgttgctacatgtatcgagccttgattgctcctagttatatacagggtctatcttgcttcctacctacatctgcttgagcagtgcctcaagtacatccttattaggaacatttcaaaccccttttagttaagtctttcactaaggttctcttgcatatatttcaagtgaatgttggatctcagactaaccatagtaataatacacatttctgtgagtgctgacttgtctttgcaatatttcttttctgatttatttaattttcttgtatttatatgttaaaatcaaaaatgttaaaatcaatgaaataaatttgcagttaaga

SEQ ID NO: 11640 - DNA, 4702 bp, Homo sapiens
  source 1..4702: mol_type = unassigned DNA
cgggagcggcgggggcggcgccgaggccgcgggcggggggaggagggccgcagccccggagaggggaaaaggcgggccggacggcgccagcagccagccccgaggacgcgagcggcaggtgtgcacagaggttctccactttgttttctgaactcgcggtcaggatggttttctctgtcaggcagtgtggccatgttggcagaactgaagaagttttactgacgttcaagatattccttgtcatcatttgtcttcatgtcgttctggtaacatccctggaagaagatactgataattccagtttgtcaccaccacctgctaaattatctgttgtcagttttgccccctcctccaatggtactccagatgttactttaagcttactcccttcaaacgaaacaggcgtcaaaccccagagaaatatctgcaatttgtcatctatttgcaatgactcagcattttttagaggtgagatcatgtttcaatatgataaagaaagcactgttccccagaatcaacatataacgaatggcaccttaactggagtcctgtctctaagtgaattaaaacgctcagagctcaacaaaaccctgcaaaccctaagtgagacttactttataatgtgtgctacagcagaggcccaaagcacattaaattgtacattcacaataaaactgaataatacaatgaatgcatgtgctgtaatagctgctttggaaagagtaaagattcgaccaatggaacactgctgctgttctgtcaggataccctgcccttcctccccagaagagttggaaaagcttcagtgtgacctgcaggatcccattgtctgtcttgctgaccatccacgtggcccaccattttcttccagccaatccatcccagtggtgcctcgggccactgtgctttcccaggtccccaaagctacctcttttgctgagcctccagattattcacctgtgacccacaatgttccctctccaataggggagattcaacccctttcaccccagccttcagctcccatagcttccagccctgccattgacatgcccccacagtctgaaacgatctcttcccctatgccccaaacccatgtctccggcaccccacctcctgtgaaagcctcattttcctctcccaccgtgtctgcccctgcgaatgtcaacactaccagcgcacctcctgtccagacagacatcgtcaacaccagcagtatttctgatcttgagaaccaagtgttgcagatggagaaggctctgtccttgggcagcctggagcctaacctcgcaggagaaatgatcaaccaagtcagcagactccttcattccccgcctgacatgctggcccctctggctcaaagattgctgaaagtagtggatgacattggcctacagctgaacttttcaaacacgactataagtctaacctccccttctttggctctggctgtgatcagagtgaatgccagtagtttcaacacaactacctttgtggcccaagaccctgcaaatcttcaggtttctctggaaacccaagctcctgagaacagtattggcacaattactcttccttcatcgctgatgaataatttaccagctcatgacatggagctagcttccagggttcagttcaatttttttgaaacacctgctttgtttcaggatccttccctggagaacctctctctgatcagctacgtcatatcatcgagtgttgcaaacctgaccgtcaggaacttgacaagaaacgtgacagtcacattaaagcacatcaacccgagccaggatgagttaacagtgagatgtgtattttgggacttgggcagaaatggtggcagaggaggctggtcagacaatggctgctctgtcaaagacaggagattgaatgaaaccatctgtacctgtagccatctaacaagcttcggcgttctgctggacctatctaggacatctgtgctgcctgctcaaatgatggctctgacgttcattacatatattggttgtgggctttcatcaatttttctgtcagtgactcttgtaacctacatagcttttgaaaagatccggagggattacccttccaaaatcctcatccagctgtgtgctgctctgcttctgctgaacctggtcttcctcctggactcgtggattgctctgtataagatgcaaggcctctgcatctcagtggctgtatttcttcattattttctcttggtctcattcacatggatgggcctagaagcattccatatgtacctggcccttgtcaaagtatttaatacttacatccgaaaatacatccttaaattctgcattgtcggttggggggtaccagctgtggttgtgaccatcatcctgactatatccccagataactatgggcttggatcctatgggaaattccccaatggttcaccggatgacttctgctggatcaacaacaatgcagtattctacattacggtggtgggatatttctgtgtgatatttttgctgaacgtcagcatgttcattgtggtcctggttcagctctgtcgaattaaaaagaagaagcaactgggagcccagcgaaaaaccagtattcaagacctcaggagtatcgctggccttacatttttactgggaataacttggggctttgccttctttgcctggggaccagttaacgtgaccttcatgtatctgtttgccatctttaataccttacaaggatttttcatattcatcttttactgtgtggccaaagaaaatgtcaggaagcaatggaggcggtatctttgttgtggaaagttacggctggctgaaaattctgactggagtaaaactgctactaatggtttaaagaagcagactgtaaaccaaggagtgtccagctcttcaaattccttacagtcaagcagtaactccactaactccaccacactgctagtgaataatgattgctcagtacacgcaagcgggaatggaaatgcttctacagagaggaatggggtctcttttagtgttcagaatggagatgtgtgccttcacgatttcactggaaaacagcacatgtttaacgagaaggaagattcctgcaatgggaaaggccgtatggctctcagaaggacttcaaagcggggaagcttacactttattgagcaaatgtgattcctttcttctaaaatcaaagcatgatgcttgacagtgtgaaatgtccaattttaccttttacacaatgtgagatgtatgaaaatcaactcattttattctcggcaacatctggagaagcataagctaattaagggcgatgattattattacaagaagaaaccaagacattacaccatggtttttagacatttctgatttggtttcttatctttcattttataagaaggttggttttaaacaatacactaagaatgactcctataaagaaaacaaaaaaaggtagtgaactttcagctaccttttaaagaggctaagttatctttgataacatcatataaagcaactgttgacttcagcctgttggtgagtttagttgtgcatgcctttgttgtatataagctaaattctagtgacccatgtgtcaaaaatcttacttctacatttttttgtatttattttctactgtgtaaatgtattcctttgtagaatcatggttgttttgtctcacgtgataattcagaaaatccttgctcgttccgcaaatcctaaagctccttttggagatgatataggatgtgaaatacagaaacctcagtgaaatcaagaaataatgatcccagccagactgagaaaatgtaagcagacagtgccacagttagctcatacagtgcctttgagcaagttaggaaaagatgcccccactgggcagacacagccctatgggctcatggtttgacaaacagagtggagagaccatattttagccccactcaccctcttgggtgcacgacctgtacagccaaacacagcatccaatatgaatacccatcccctgaccgcatccccagtagtcagattatagaatctgcaccaagatgtttagctttataccttggccacagagagggatgaactgtcatccagaccatgtgtcaggaaaattgtgaacgtagatgaggtacatacactgccgcttctcaaatccccagagcctttaggaacaggagagtagactaggattccttctcttaaaaaggtacatatatatggaaaaaaatcatattgccgttctttaaaaggcaactgcatggtacattgttgattgttatgactggtacactctggcccagccagagctataattgttttttaaatgtgtcttgaagaatgcacagtgacaaggggagtagctattgggaacagggaactgtcctacactgctattgttgctacatgtatcgagccttgattgctcctagttatatacagggtctatcttgcttcctacctacatctgcttgagcagtgcctcaagtacatccttattaggaacatttcaaaccccttttagttaagtctttcactaaggttctcttgcatatatttcaagtgaatgttggatctcagactaaccatagtaataatacacatttctgtgagtgctgacttgtctttgcaatatttcttttctgatttatttaattttcttgtatttatatgttaaaatcaaaaatgttaaaatcaatgaaataaatttgcagttaaga

SEQ ID NO: 11641 - DNA, 4768 bp, Homo sapiens
  source 1..4768: mol_type = unassigned DNA
cgggagcggcgggggcggcgccgaggccgcgggcggggggaggagggccgcagccccggagaggggaaaaggcgggccggacggcgccagcagccagccccgaggacgcgagcggcaggtgtgcacagaggttctccactttgttttctgaactcgcggtcaggatggttttctctgtcaggcagtgtggccatgttggcagaactgaagaagttttactgacgttcaagatattccttgtcatcatttgtcttcatgtcgttctggtaacatccctggaagaagatactgataattccagtttgtcaccaccacctgctaaattatctgttgtcagttttgccccctcctccaatggtactccagaggttgaaacaacaagcctcaatgatgttactttaagcttactcccttcaaacgaaacagaaaaaactaaaatcactatagtaaaaaccttcaatgcatcaggcgtcaaaccccagagaaatatctgcaatttgtcatctatttgcaatgactcagcattttttagaggtgagatcatgtttcaatatgataaagaaagcactgttccccagaatcaacatataacgaatggcaccttaactggagtcctgtctctaagtgaattaaaacgctcagagctcaacaaaaccctgcaaaccctaagtgagacttactttataatgtgtgctacagcagaggcccaaagcacattaaattgtacattcacaataaaactgaataatacaatgaatgcatgtgctgtaatagctgctttggaaagagtaaagattcgaccaatggaacactgctgctgttctgtcaggataccctgcccttcctccccagaagagttggaaaagcttcagtgtgacctgcaggatcccattgtctgtcttgctgaccatccacgtggcccaccattttcttccagccaatccatcccagtggtgcctcgggccactgtgctttcccaggtccccaaagctacctcttttgctgagcctccagattattcacctgtgacccacaatgttccctctccaataggggagattcaacccctttcaccccagccttcagctcccatagcttccagccctgccattgacatgcccccacagtctgaaacgatctcttcccctatgccccaaacccatgtctccggcaccccacctcctgtgaaagcctcattttcctctcccaccgtgtctgcccctgcgaatgtcaacactaccagcgcacctcctgtccagacagacatcgtcaacaccagcagtatttctgatcttgagaaccaagtgttgcagatggagaaggctctgtccttgggcagcctggagcctaacctcgcaggagaaatgatcaaccaagtcagcagactccttcattccccgcctgacatgctggcccctctggctcaaagattgctgaaagtagtggatgacattggcctacagctgaacttttcaaacacgactataagtctaacctccccttctttggctctggctgtgatcagagtgaatgccagtagtttcaacacaactacctttgtggcccaagaccctgcaaatcttcaggtttctctggaaacccaagctcctgagaacagtattggcacaattactcttccttcatcgctgatgaataatttaccagctcatgacatggagctagcttccagggttcagttcaatttttttgaaacacctgctttgtttcaggatccttccctggagaacctctctctgatcagctacgtcatatcatcgagtgttgcaaacctgaccgtcaggaacttgacaagaaacgtgacagtcacattaaagcacatcaacccgagccaggatgagttaacagtgagatgtgtattttgggacttgggcagaaatggtggcagaggaggctggtcagacaatggctgctctgtcaaagacaggagattgaatgaaaccatctgtacctgtagccatctaacaagcttcggcgttctgctggacctatctaggacatctgtgctgcctgctcaaatgatggctctgacgttcattacatatattggttgtgggctttcatcaatttttctgtcagtgactcttgtaacctacatagcttttgaaaagatccggagggattacccttccaaaatcctcatccagctgtgtgctgctctgcttctgctgaacctggtcttcctcctggactcgtggattgctctgtataagatgcaaggcctctgcatctcagtggctgtatttcttcattattttctcttggtctcattcacatggatgggcctagaagcattccatatgtacctggcccttgtcaaagtatttaatacttacatccgaaaatacatccttaaattctgcattgtcggttggggggtaccagctgtggttgtgaccatcatcctgactatatccccagataactatgggcttggatcctatgggaaattccccaatggttcaccggatgacttctgctggatcaacaacaatgcagtattctacattacggtggtgggatatttctgtgtgatatttttgctgaacgtcagcatgttcattgtggtcctggttcagctctgtcgaattaaaaagaagaagcaactgggagcccagcgaaaaaccagtattcaagacctcaggagtatcgctggccttacatttttactgggaataacttggggctttgccttctttgcctggggaccagttaacgtgaccttcatgtatctgtttgccatctttaataccttacaaggatttttcatattcatcttttactgtgtggccaaagaaaatgtcaggaagcaatggaggcggtatctttgttgtggaaagttacggctggctgaaaattctgactggagtaaaactgctactaatggtttaaagaagcagactgtaaaccaaggagtgtccagctcttcaaattccttacagtcaagcagtaactccactaactccaccacactgctagtgaataatgattgctcagtacacgcaagcgggaatggaaatgcttctacagagaggaatggggtctcttttagtgttcagaatggagatgtgtgccttcacgatttcactggaaaacagcacatgtttaacgagaaggaagattcctgcaatgggaaaggccgtatggctctcagaaggacttcaaagcggggaagcttacactttattgagcaaatgtgattcctttcttctaaaatcaaagcatgatgcttgacagtgtgaaatgtccaattttaccttttacacaatgtgagatgtatgaaaatcaactcattttattctcggcaacatctggagaagcataagctaattaagggcgatgattattattacaagaagaaaccaagacattacaccatggtttttagacatttctgatttggtttcttatctttcattttataagaaggttggttttaaacaatacactaagaatgactcctataaagaaaacaaaaaaaggtagtgaactttcagctaccttttaaagaggctaagttatctttgataacatcatataaagcaactgttgacttcagcctgttggtgagtttagttgtgcatgcctttgttgtatataagctaaattctagtgacccatgtgtcaaaaatcttacttctacatttttttgtatttattttctactgtgtaaatgtattcctttgtagaatcatggttgttttgtctcacgtgataattcagaaaatccttgctcgttccgcaaatcctaaagctccttttggagatgatataggatgtgaaatacagaaacctcagtgaaatcaagaaataatgatcccagccagactgagaaaatgtaagcagacagtgccacagttagctcatacagtgcctttgagcaagttaggaaaagatgcccccactgggcagacacagccctatgggctcatggtttgacaaacagagtggagagaccatattttagccccactcaccctcttgggtgcacgacctgtacagccaaacacagcatccaatatgaatacccatcccctgaccgcatccccagtagtcagattatagaatctgcaccaagatgtttagctttataccttggccacagagagggatgaactgtcatccagaccatgtgtcaggaaaattgtgaacgtagatgaggtacatacactgccgcttctcaaatccccagagcctttaggaacaggagagtagactaggattccttctcttaaaaaggtacatatatatggaaaaaaatcatattgccgttctttaaaaggcaactgcatggtacattgttgattgttatgactggtacactctggcccagccagagctataattgttttttaaatgtgtcttgaagaatgcacagtgacaaggggagtagctattgggaacagggaactgtcctacactgctattgttgctacatgtatcgagccttgattgctcctagttatatacagggtctatcttgcttcctacctacatctgcttgagcagtgcctcaagtacatccttattaggaacatttcaaaccccttttagttaagtctttcactaaggttctcttgcatatatttcaagtgaatgttggatctcagactaaccatagtaataatacacatttctgtgagtgctgacttgtctttgcaatatttcttttctgatttatttaattttcttgtatttatatgttaaaatcaaaaatgttaaaatcaatgaaataaatttgcagttaaga

SEQ ID NO: 11642 - DNA, 4698 bp, Homo sapiens
  source 1..4698: mol_type = unassigned DNA
gcgcccagcctcgccgccgccgagcgcccgacgcgccacgccgcgctgggcagctggagagctggcggcggagcgggccgggagcggcgggggcggcgccgaggccgcgggcggggggaggagggccgcagccccggagaggggaaaaggcgggccggacggcgccagcagccagccccgaggacgcgagcggcaggtgtgcacagaggttctccactttgttttctgaactcgcggtcaggatggttttctctgtcaggcagtgtggccatgttggcagaactgaagaagttttactgacgttcaagatattccttgtcatcatttgtcttcatgtcgttctggtaacatccctggaagaagatactgataattccagtttgtcaccaccacctgctaaattatctgttgtcagttttgccccctcctccaatggtactccagaggttgaaacaacaagcctcaatgatgttactttaagcttactcccttcaaacgaaacagaaaaaactaaaatcactatagtaaaaaccttcaatgcatcaggcgtcaaaccccagagaaatatctgcaatttgtcatctatttgcaatgactcagcattttttagaggtgagatcatgtttcaatatgataaagaaagcactgttccccagaatcaacatataacgaatggcaccttaactggagtcctgtctctaagtgaattaaaacgctcagagctcaacaaaaccctgcaaaccctaagtgagacttactttataatgtgtgctacagcagaggcccaaagcacattaaattgtacattcacaataaaactgaataatacaatgaatgcatgtgctgtaatagctgctttggaaagagtaaagattcgaccaatggaacactgctgctgttctgtcaggataccctgcccttcctccccagaagagttggaaaagcttcagtgtgacctgcaggatcccattgtctgtcttgctgaccatccacgtggcccaccattttcttccagccaatccatcccagtggtgcctcgggccactgtgctttcccaggtccccaaagctacctcttttgctgagcctccagattattcacctgtgacccacaatgttccctctccaataggggagattcaacccctttcaccccagccttcagctcccatagcttccagccctgccattgacatgcccccacagtctgaaacgatctcttcccctatgccccaaacccatgtctccggcaccccacctcctgtgaaagcctcattttcctctcccaccgtgtctgcccctgcgaatgtcaacactaccagcgcacctcctgtccagacagacatcgtcaacaccagcagtatttctgatcttgagaaccaagtgttgcagatggagaaggctctgtccttgggcagcctggagcctaacctcgcaggagaaatgatcaaccaagtcagcagactccttcattccccgcctgacatgctggcccctctggctcaaagattgctgaaagtagtggatgacattggcctacagctgaacttttcaaacacgactataagtctaacctccccttctttggctctggctgtgatcagagtgaatgccagtagtttcaacacaactacctttgtggcccaagaccctgcaaatcttcaggtttctctggaaacccaagctcctgagaacagtattggcacaattactcttccttcatcgctgatgaataatttaccagctcatgacatggagctagcttccagggttcagttcaatttttttgaaacacctgctttgtttcaggatccttccctggagaacctctctctgatcagctacgtcatatcatcgagtgttgcaaacctgaccgtcaggaacttgacaagaaacgtgacagtcacattaaagcacatcaacccgagccaggatgagttaacagtgagatgtgtattttgggacttgggcagaaatggtggcagaggaggctggtcagacaatggctgctctgtcaaagacaggagattgaatgaaaccatctgtacctgtagccatctaacaagcttcggcgttctgctggacctatctaggacatctgtgctgcctgctcaaatgatggctctgacgttcattacatatattggttgtgggctttcatcaatttttctgtcagtgactcttgtaacctacatagcttttgaaaagatccggagggattacccttccaaaatcctcatccagctgtgtgctgctctgcttctgctgaacctggtcttcctcctggactcgtggattgctctgtataagatgcaaggcctctgcatctcagtggctgtatttcttcattattttctcttggtctcattcacatggatgggcctagaagcattccatatgtacctggcccttgtcaaagtatttaatacttacatccgaaaatacatccttaaattctgcattgtcggttggggggtaccagctgtggttgtgaccatcatcctgactatatccccagataactatgggcttggatcctatgggaaattccccaatggttcaccggatgacttctgctggatcaacaacaatgcagtattctacattacggtggtgggatatttctgtgtgatatttttgctgaacgtcagcatgttcattgtggtcctggttcagctctgtcgaattaaaaagaagaagcaactgggagcccagcgaaaaaccagtattcaagacctcaggagtatcgctggccttacatttttactgggaataacttggggctttgccttctttgcctggggaccagttaacgtgaccttcatgtatctgtttgccatctttaataccttacaaggatttttcatattcatcttttactgtgtggccaaagaaaatgtcaggaagcaatggaggcggtatctttgttgtggaaagttacggctggctgaaaattctggaaatgcttctacagagaggaatggggtctcttttagtgttcagaatggagatgtgtgccttcacgatttcactggaaaacagcacatgtttaacgagaaggaagattcctgcaatgggaaaggccgtatggctctcagaaggacttcaaagcggggaagcttacactttattgagcaaatgtgattcctttcttctaaaatcaaagcatgatgcttgacagtgtgaaatgtccaattttaccttttacacaatgtgagatgtatgaaaatcaactcattttattctcggcaacatctggagaagcataagctaattaagggcgatgattattattacaagaagaaaccaagacattacaccatggtttttagacatttctgatttggtttcttatctttcattttataagaaggttggttttaaacaatacactaagaatgactcctataaagaaaacaaaaaaaggtagtgaactttcagctaccttttaaagaggctaagttatctttgataacatcatataaagcaactgttgacttcagcctgttggtgagtttagttgtgcatgcctttgttgtatataagctaaattctagtgacccatgtgtcaaaaatcttacttctacatttttttgtatttattttctactgtgtaaatgtattcctttgtagaatcatggttgttttgtctcacgtgataattcagaaaatccttgctcgttccgcaaatcctaaagctccttttggagatgatataggatgtgaaatacagaaacctcagtgaaatcaagaaataatgatcccagccagactgagaaaatgtaagcagacagtgccacagttagctcatacagtgcctttgagcaagttaggaaaagatgcccccactgggcagacacagccctatgggctcatggtttgacaaacagagtggagagaccatattttagccccactcaccctcttgggtgcacgacctgtacagccaaacacagcatccaatatgaatacccatcccctgaccgcatccccagtagtcagattatagaatctgcaccaagatgtttagctttataccttggccacagagagggatgaactgtcatccagaccatgtgtcaggaaaattgtgaacgtagatgaggtacatacactgccgcttctcaaatccccagagcctttaggaacaggagagtagactaggattccttctcttaaaaaggtacatatatatggaaaaaaatcatattgccgttctttaaaaggcaactgcatggtacattgttgattgttatgactggtacactctggcccagccagagctataattgttttttaaatgtgtcttgaagaatgcacagtgacaaggggagtagctattgggaacagggaactgtcctacactgctattgttgctacatgtatcgagccttgattgctcctagttatatacagggtctatcttgcttcctacctacatctgcttgagcagtgcctcaagtacatccttattaggaacatttcaaaccccttttagttaagtctttcactaaggttctcttgcatatatttcaagtgaatgttggatctcagactaaccatagtaataatacacatttctgtgagtgctgacttgtctttgcaatatttcttttctgatttatttaattttcttgtatttatatgttaaaatcaaaaatgttaaaatcaatgaaataaatttgcagttaagatcttt

SEQ ID NO: 11643 - DNA, 4779 bp, Homo sapiens
  source 1..4779: mol_type = unassigned DNA
gcgcccagcctcgccgccgccgagcgcccgacgcgccacgccgcgctgggcagctggagagctggcggcggagcgggccgggagcggcgggggcggcgccgaggccgcgggcggggggaggagggccgcagccccggagaggggaaaaggcgggccggacggcgccagcagccagccccgaggacgcgagcggcaggtgtgcacagaggttctccactttgttttctgaactcgcggtcaggatggttttctctgtcaggcagtgtggccatgttggcagaactgaagaagttttactgacgttcaagatattccttgtcatcatttgtcttcatgtcgttctggtaacatccctggaagaagatactgataattccagtttgtcaccaccacctgatgttactttaagcttactcccttcaaacgaaacagaaaaaactaaaatcactatagtaaaaaccttcaatgcatcaggcgtcaaaccccagagaaatatctgcaatttgtcatctatttgcaatgactcagcattttttagaggtgagatcatgtttcaatatgataaagaaagcactgttccccagaatcaacatataacgaatggcaccttaactggagtcctgtctctaagtgaattaaaacgctcagagctcaacaaaaccctgcaaaccctaagtgagacttactttataatgtgtgctacagcagaggcccaaagcacattaaattgtacattcacaataaaactgaataatacaatgaatgcatgtgctgtaatagctgctttggaaagagtaaagattcgaccaatggaacactgctgctgttctgtcaggataccctgcccttcctccccagaagagttggaaaagcttcagtgtgacctgcaggatcccattgtctgtcttgctgaccatccacgtggcccaccattttcttccagccaatccatcccagtggtgcctcgggccactgtgctttcccaggtccccaaagctacctcttttgctgagcctccagattattcacctgtgacccacaatgttccctctccaataggggagattcaacccctttcaccccagccttcagctcccatagcttccagccctgccattgacatgcccccacagtctgaaacgatctcttcccctatgccccaaacccatgtctccggcaccccacctcctgtgaaagcctcattttcctctcccaccgtgtctgcccctgcgaatgtcaacactaccagcgcacctcctgtccagacagacatcgtcaacaccagcagtatttctgatcttgagaaccaagtgttgcagatggagaaggctctgtccttgggcagcctggagcctaacctcgcaggagaaatgatcaaccaagtcagcagactccttcattccccgcctgacatgctggcccctctggctcaaagattgctgaaagtagtggatgacattggcctacagctgaacttttcaaacacgactataagtctaacctccccttctttggctctggctgtgatcagagtgaatgccagtagtttcaacacaactacctttgtggcccaagaccctgcaaatcttcaggtttctctggaaacccaagctcctgagaacagtattggcacaattactcttccttcatcgctgatgaataatttaccagctcatgacatggagctagcttccagggttcagttcaatttttttgaaacacctgctttgtttcaggatccttccctggagaacctctctctgatcagctacgtcatatcatcgagtgttgcaaacctgaccgtcaggaacttgacaagaaacgtgacagtcacattaaagcacatcaacccgagccaggatgagttaacagtgagatgtgtattttgggacttgggcagaaatggtggcagaggaggctggtcagacaatggctgctctgtcaaagacaggagattgaatgaaaccatctgtacctgtagccatctaacaagcttcggcgttctgctggacctatctaggacatctgtgctgcctgctcaaatgatggctctgacgttcattacatatattggttgtgggctttcatcaatttttctgtcagtgactcttgtaacctacatagcttttgaaaagatccggagggattacccttccaaaatcctcatccagctgtgtgctgctctgcttctgctgaacctggtcttcctcctggactcgtggattgctctgtataagatgcaaggcctctgcatctcagtggctgtatttcttcattattttctcttggtctcattcacatggatgggcctagaagcattccatatgtacctggcccttgtcaaagtatttaatacttacatccgaaaatacatccttaaattctgcattgtcggttggggggtaccagctgtggttgtgaccatcatcctgactatatccccagataactatgggcttggatcctatgggaaattccccaatggttcaccggatgacttctgctggatcaacaacaatgcagtattctacattacggtggtgggatatttctgtgtgatatttttgctgaacgtcagcatgttcattgtggtcctggttcagctctgtcgaattaaaaagaagaagcaactgggagcccagcgaaaaaccagtattcaagacctcaggagtatcgctggccttacatttttactgggaataacttggggctttgccttctttgcctggggaccagttaacgtgaccttcatgtatctgtttgccatctttaataccttacaaggatttttcatattcatcttttactgtgtggccaaagaaaatgtcaggaagcaatggaggcggtatctttgttgtggaaagttacggctggctgaaaattctgactggagtaaaactgctactaatggtttaaagaagcagactgtaaaccaaggagtgtccagctcttcaaattccttacagtcaagcagtaactccactaactccaccacactgctagtgaataatgattgctcagtacacgcaagcgggaatggaaatgcttctacagagaggaatggggtctcttttagtgttcagaatggagatgtgtgccttcacgatttcactggaaaacagcacatgtttaacgagaaggaagattcctgcaatgggaaaggccgtatggctctcagaaggacttcaaagcggggaagcttacactttattgagcaaatgtgattcctttcttctaaaatcaaagcatgatgcttgacagtgtgaaatgtccaattttaccttttacacaatgtgagatgtatgaaaatcaactcattttattctcggcaacatctggagaagcataagctaattaagggcgatgattattattacaagaagaaaccaagacattacaccatggtttttagacatttctgatttggtttcttatctttcattttataagaaggttggttttaaacaatacactaagaatgactcctataaagaaaacaaaaaaaggtagtgaactttcagctaccttttaaagaggctaagttatctttgataacatcatataaagcaactgttgacttcagcctgttggtgagtttagttgtgcatgcctttgttgtatataagctaaattctagtgacccatgtgtcaaaaatcttacttctacatttttttgtatttattttctactgtgtaaatgtattcctttgtagaatcatggttgttttgtctcacgtgataattcagaaaatccttgctcgttccgcaaatcctaaagctccttttggagatgatataggatgtgaaatacagaaacctcagtgaaatcaagaaataatgatcccagccagactgagaaaatgtaagcagacagtgccacagttagctcatacagtgcctttgagcaagttaggaaaagatgcccccactgggcagacacagccctatgggctcatggtttgacaaacagagtggagagaccatattttagccccactcaccctcttgggtgcacgacctgtacagccaaacacagcatccaatatgaatacccatcccctgaccgcatccccagtagtcagattatagaatctgcaccaagatgtttagctttataccttggccacagagagggatgaactgtcatccagaccatgtgtcaggaaaattgtgaacgtagatgaggtacatacactgccgcttctcaaatccccagagcctttaggaacaggagagtagactaggattccttctcttaaaaaggtacatatatatggaaaaaaatcatattgccgttctttaaaaggcaactgcatggtacattgttgattgttatgactggtacactctggcccagccagagctataattgttttttaaatgtgtcttgaagaatgcacagtgacaaggggagtagctattgggaacagggaactgtcctacactgctattgttgctacatgtatcgagccttgattgctcctagttatatacagggtctatcttgcttcctacctacatctgcttgagcagtgcctcaagtacatccttattaggaacatttcaaaccccttttagttaagtctttcactaaggttctcttgcatatatttcaagtgaatgttggatctcagactaaccatagtaataatacacatttctgtgagtgctgacttgtctttgcaatatttcttttctgatttatttaattttcttgtatttatatgttaaaatcaaaaatgttaaaatcaatgaaataaatttgcagttaagatcttt

SEQ ID NO: 11644 - DNA, 4803 bp, Homo sapiens
  source 1..4803: mol_type = unassigned DNA
gcgcccagcctcgccgccgccgagcgcccgacgcgccacgccgcgctgggcagctggagagctggcggcggagcgggccgggagcggcgggggcggcgccgaggccgcgggcggggggaggagggccgcagccccggagaggggaaaaggcgggccggacggcgccagcagccagccccgaggacgcgagcggcaggtgtgcacagaggttctccactttgttttctgaactcgcggtcaggatggttttctctgtcaggcagtgtggccatgttggcagaactgaagaagttttactgacgttcaagatattccttgtcatcatttgtcttcatgtcgttctggtaacatccctggaagaagatactgataattccagtttgtcaccaccacctgaggttgaaacaacaagcctcaatgatgttactttaagcttactcccttcaaacgaaacagaaaaaactaaaatcactatagtaaaaaccttcaatgcatcaggcgtcaaaccccagagaaatatctgcaatttgtcatctatttgcaatgactcagcattttttagaggtgagatcatgtttcaatatgataaagaaagcactgttccccagaatcaacatataacgaatggcaccttaactggagtcctgtctctaagtgaattaaaacgctcagagctcaacaaaaccctgcaaaccctaagtgagacttactttataatgtgtgctacagcagaggcccaaagcacattaaattgtacattcacaataaaactgaataatacaatgaatgcatgtgctgtaatagctgctttggaaagagtaaagattcgaccaatggaacactgctgctgttctgtcaggataccctgcccttcctccccagaagagttggaaaagcttcagtgtgacctgcaggatcccattgtctgtcttgctgaccatccacgtggcccaccattttcttccagccaatccatcccagtggtgcctcgggccactgtgctttcccaggtccccaaagctacctcttttgctgagcctccagattattcacctgtgacccacaatgttccctctccaataggggagattcaacccctttcaccccagccttcagctcccatagcttccagccctgccattgacatgcccccacagtctgaaacgatctcttcccctatgccccaaacccatgtctccggcaccccacctcctgtgaaagcctcattttcctctcccaccgtgtctgcccctgcgaatgtcaacactaccagcgcacctcctgtccagacagacatcgtcaacaccagcagtatttctgatcttgagaaccaagtgttgcagatggagaaggctctgtccttgggcagcctggagcctaacctcgcaggagaaatgatcaaccaagtcagcagactccttcattccccgcctgacatgctggcccctctggctcaaagattgctgaaagtagtggatgacattggcctacagctgaacttttcaaacacgactataagtctaacctccccttctttggctctggctgtgatcagagtgaatgccagtagtttcaacacaactacctttgtggcccaagaccctgcaaatcttcaggtttctctggaaacccaagctcctgagaacagtattggcacaattactcttccttcatcgctgatgaataatttaccagctcatgacatggagctagcttccagggttcagttcaatttttttgaaacacctgctttgtttcaggatccttccctggagaacctctctctgatcagctacgtcatatcatcgagtgttgcaaacctgaccgtcaggaacttgacaagaaacgtgacagtcacattaaagcacatcaacccgagccaggatgagttaacagtgagatgtgtattttgggacttgggcagaaatggtggcagaggaggctggtcagacaatggctgctctgtcaaagacaggagattgaatgaaaccatctgtacctgtagccatctaacaagcttcggcgttctgctggacctatctaggacatctgtgctgcctgctcaaatgatggctctgacgttcattacatatattggttgtgggctttcatcaatttttctgtcagtgactcttgtaacctacatagcttttgaaaagatccggagggattacccttccaaaatcctcatccagctgtgtgctgctctgcttctgctgaacctggtcttcctcctggactcgtggattgctctgtataagatgcaaggcctctgcatctcagtggctgtatttcttcattattttctcttggtctcattcacatggatgggcctagaagcattccatatgtacctggcccttgtcaaagtatttaatacttacatccgaaaatacatccttaaattctgcattgtcggttggggggtaccagctgtggttgtgaccatcatcctgactatatccccagataactatgggcttggatcctatgggaaattccccaatggttcaccggatgacttctgctggatcaacaacaatgcagtattctacattacggtggtgggatatttctgtgtgatatttttgctgaacgtcagcatgttcattgtggtcctggttcagctctgtcgaattaaaaagaagaagcaactgggagcccagcgaaaaaccagtattcaagacctcaggagtatcgctggccttacatttttactgggaataacttggggctttgccttctttgcctggggaccagttaacgtgaccttcatgtatctgtttgccatctttaataccttacaaggatttttcatattcatcttttactgtgtggccaaagaaaatgtcaggaagcaatggaggcggtatctttgttgtggaaagttacggctggctgaaaattctgactggagtaaaactgctactaatggtttaaagaagcagactgtaaaccaaggagtgtccagctcttcaaattccttacagtcaagcagtaactccactaactccaccacactgctagtgaataatgattgctcagtacacgcaagcgggaatggaaatgcttctacagagaggaatggggtctcttttagtgttcagaatggagatgtgtgccttcacgatttcactggaaaacagcacatgtttaacgagaaggaagattcctgcaatgggaaaggccgtatggctctcagaaggacttcaaagcggggaagcttacactttattgagcaaatgtgattcctttcttctaaaatcaaagcatgatgcttgacagtgtgaaatgtccaattttaccttttacacaatgtgagatgtatgaaaatcaactcattttattctcggcaacatctggagaagcataagctaattaagggcgatgattattattacaagaagaaaccaagacattacaccatggtttttagacatttctgatttggtttcttatctttcattttataagaaggttggttttaaacaatacactaagaatgactcctataaagaaaacaaaaaaaggtagtgaactttcagctaccttttaaagaggctaagttatctttgataacatcatataaagcaactgttgacttcagcctgttggtgagtttagttgtgcatgcctttgttgtatataagctaaattctagtgacccatgtgtcaaaaatcttacttctacatttttttgtatttattttctactgtgtaaatgtattcctttgtagaatcatggttgttttgtctcacgtgataattcagaaaatccttgctcgttccgcaaatcctaaagctccttttggagatgatataggatgtgaaatacagaaacctcagtgaaatcaagaaataatgatcccagccagactgagaaaatgtaagcagacagtgccacagttagctcatacagtgcctttgagcaagttaggaaaagatgcccccactgggcagacacagccctatgggctcatggtttgacaaacagagtggagagaccatattttagccccactcaccctcttgggtgcacgacctgtacagccaaacacagcatccaatatgaatacccatcccctgaccgcatccccagtagtcagattatagaatctgcaccaagatgtttagctttataccttggccacagagagggatgaactgtcatccagaccatgtgtcaggaaaattgtgaacgtagatgaggtacatacactgccgcttctcaaatccccagagcctttaggaacaggagagtagactaggattccttctcttaaaaaggtacatatatatggaaaaaaatcatattgccgttctttaaaaggcaactgcatggtacattgttgattgttatgactggtacactctggcccagccagagctataattgttttttaaatgtgtcttgaagaatgcacagtgacaaggggagtagctattgggaacagggaactgtcctacactgctattgttgctacatgtatcgagccttgattgctcctagttatatacagggtctatcttgcttcctacctacatctgcttgagcagtgcctcaagtacatccttattaggaacatttcaaaccccttttagttaagtctttcactaaggttctcttgcatatatttcaagtgaatgttggatctcagactaaccatagtaataatacacatttctgtgagtgctgacttgtctttgcaatatttcttttctgatttatttaattttcttgtatttatatgttaaaatcaaaaatgttaaaatcaatgaaataaatttgcagttaagatcttt

SEQ ID NO: 11645 - DNA, 2977 bp, Homo sapiens
  source 1..2977: mol_type = unassigned DNA
attctcttgacaatgcagcacataaacacgggcattgacatgcttaaccagctgggttgtgttttctttgcaggcgtcaaaccccagagaaatatctgcaatttgtcatctatttgcaatgactcagcattttttagaggtgagatcatgtttcaatatgataaagaaagcactgttccccagaatcaacatataacgaatggcaccttaactggagtcctgtctctaagtgaattaaaacgctcagagctcaacaaaaccctgcaaaccctaagtgagacttactttataatgtgtgctacagcagaggcccaaaggcacattaaattgtacattcacaataaaactgaataatacaatgaatgcatgtgctgtaatagctgctttggaaagagtaaagattcgaccaatggaacactgctgctgttctgtcaggataccctgcccttcctccccagaagagttggaaaagcttcagtgtgacctgcaggatcccattgtctgtcttgctgaccatccacgtggcccaccattttcttccagccaatccatcccagtggtgcctcgggccactgtgctttcccaggtccccaaagctacctcttttgctgagcctccagattattcacctgtgacccacaatgttccctctccaataggggagattcaacccctttcaccccagccttcagctcccatagcttccagccctgccattgacatgcccccacagtctgaaacgatctcttcccctatgccccaaacccatgtctccggcaccccacctcctgtgaaagcctcattttcctctcccaccgtgtctgcccctgcgaatgtcaacactaccagcgcacctcctgtccagacagacatcgtcaacaccagcagtatttctgatcttgagaaccaagtgttgcagatggagaaggctctgtccttgggcagcctggagcctaacctcgcaggagaaatgatcaaccaagtcagcagactccttcattccccgcctgacatgctggcccctctggctcaaagattgctgaaagtagtggatgacattggcctacagctgaacttttcaaacacgactataagtctaacctccccttctttggctctggctgtgatcagagtgaatgccagtagtttcaacacaactacctttgtggcccaagaccctgcaaatcttcaggtttctctggaaacccaagctcctgagaacagtattggcacaattactcttccttcatcgctgatgaataatttaccagctcatgacatggagctagcttccagggttcagttcaatttttttgaaacacctgctttgtttcaggatccttccctggagaacctctctctgatcagctacgtcatatcatcgagtgttgcaaacctgaccgtcaggaacttgacaagaaacgtgacagtcacattaaagcacatcaacccgagccaggatgagttaacagtgagatgtgtattttgggacttgggcagaaatggtggcagaggaggctggtcagacaatggctgctctgtcaaagacaggagattgaatgaaaccatctgtacctgtagccatctaacaagcttcggcgttctgctggacctatctaggacatctgtgctgcctgctcaaatgatggctctgacgttcattacatatattggttgtgggctttcatcaatttttctgtcagtgactcttgtaacctacatagcttttgaaaagatccggagggattacccttccaaaatcctcatccagctgtgtgctgctctgcttctgctgaacctggtcttcctcctggactcgtggattgctctgtataagatgcaaggcctctgcatctcagtggctgtatttcttcattattttctcttggtctcattcacatggatgggcctagaagcattccatatgtacctggcccttgtcaaagtatttaatacttacatccgaaaatacatccttaaattctgcattgtcggttggggggtaccagctgtggttgtgaccatcatcctgactatatccccagataactatgggcttggatcctatgggaaattccccaatggttcaccggatgacttctgctggatcaacaacaatgcagtattctacattacggtggtgggatatttctgtgtgatatttttgctgaacgtcagcatgttcattgtggtcctggttcagctctgtcgaattaaaaagaagaagcaactgggagcccagcgaaaaaccagtattcaagacctcaggagtatcgctggccttacatttttactgggaataacttggggctttgccttctttgcctggggaccagttaacgtgaccttcatgtatctgtttgccatctttaataccttacaaggatttttcatattcatcttttactgtgtggccaaagaaaatgtcaggaagcaatggaggcggtatctttgttgtggaaagttacggctggctgaaaattctgactggagtaaaactgctactaatggtttaaagaagcagactgtaaaccaaggagtgtccagctcttcaaattccttacagtcaagcagtaactccactaactccaccacactgctagtgaataatgattgctcagtacacgcaagcgggaatggaaatgcttctacagagaggaatggggtctcttttagtgttcagaatggagatgtgtgccttcacgatttcactggaaaacagcacatgtttaacgagaaggaagattcctgcaatgggaaaggccgtatggctctcagaaggacttcaaagcggggaagcttacactttattgagcaaatgtgattcctttcttctaaaatcaaagcatgatgcttgacagtgtgaaatgtccaattttaccttttacacaatgtgagatgtatgaaaatcaactcattttattctcggcaacatctggagaagcataagctaattaagggcgatgattattattac

SEQ ID NO: 11646 - DNA, 1786 bp, Homo sapiens
  source 1..1786: mol_type = unassigned DNA
cctgtcccctcagcagtgttggtttctcttcttgacttgatgcaggcacagatttatcaagctcctcagtcaacaaacacatcaccggaagaaatatggaaggaaaggaattttaaaaggaaataccaatctctgtgcaaacaaagccttgtatattcatgtttgcaccaatctactgtgagatttatgaagaaaaacaaattgcggacaactctctatgtacacttacaaatgcctcagttgatgcttgtgggctgtttgtcagcgttctgtgataatgaacacatggacttctgtttattaaattcagttgacccctttagccaattgccaggagcctggatttttacttccaactgctgatatctgtgtaaaaattgatctacatccaccctttaaaagcattgatgaattaattagaactttagacaacaaagaaaaattgaaaaagaattctcagtaaaagcgaattcgatgttcaaaacaaactacaaagagacaagacttctctgtttactttctaagaactaatataattgctaccttaaaaaggaaaaaatgaacagcacatgtattgaagaacagcatgacctggatcactatttgtttcccattgtttacatctttgtgattatagtcagcattccagccaatattggatctctgtgtgtgtctttcctgcaagcaaagaaggaaagtgaactaggaatttacctcttcagtttgtcactatcagatttactctatgcattaactctccctttatggattgattatacctggaataaagacaactggactttctctcctgccttgtgcaaagggagtgcttttctcatgtacatgaatttttacagcagcacagcattcctcacctgcattgccgttgatcggtatttggctgttgtctaccctttgaagttttttttcctaaggacaagaagatttgcactcatggtcagcctgtccatctggatattggaaaccatcttcaatgctgtcatgttgtgggaagatgaaacagttgttgaatattgcgatgccgaaaagtctaattttactttatgctatgacaaataccctttagagaaatggcaaatcaacctcaacttgttcaggacgtgtacaggctatgcaatacctttggtcaccatcctgatctgcaaccggaaagtctaccaagctgtgcggcacaataaagccacggaaaacaaggaaaagaagagaatcataaaactacttgtcagcatcacagttacttttgtcttatgctttactccctttcatgtgatgttgctgattcgctgcattttagagcatgctgtgaacttcgaagaccacagcaattctgggaagcgaacttacacaatgtatagaatcacggttgcattaacaagtttaaattgtgttgctgatccaattctgtactgttttgtaaccgaaacaggaagatatgatatgtggaatatattaaaattctgcactgggaggtgtaatacatcacaaagacaaagaaaacgcatactttctgtgtctacaaaagatactatggaattagaggtccttgagtagaaccaaggatgttttgaagggaagggaagtttaagttatgcattattatatcatcaagattacattttgaaaaggaaatctagcatgtgaggggactaagtgttctcagagtgatgttttaatccagtccaataaaaatatcttaaaactgcattgtacagctccctccctgcgttttattaaatgatgtatattaaacaaagatcaatatttt

SEQ ID NO: 11647 - DNA, 2115 bp, Homo sapiens
  source 1..2115: mol_type = unassigned DNA
gtgactgcgcctctgcgcccgcgtcttgccgcggctcccgggatgcgcggaggcggtggcgatggcgatgatgcctctagtcctgcatcatccagagcggcaggcggagctggggtccggactgcgagatggaggaggggcggcgctgcggccacccggcaggcttatctgtcttgggcctcttttgtcacatattgctcatctgtgagctgaggccctgactcactgagtatttttggggagcagaagaaggagacatttctctccgaaaatgaactcaacaggccaccttcaggatgcccccaatgccacctcgctccatgtgcctcactcacaggaaggaaacagcacctctctccaggagggtcttcaggatctcatccacacagccaccttggtgacctgtacttttctactggcggtcatcttctgcctgggttcctatggcaacttcattgtcttcttgtccttcttcgatccagccttcaggaaattcagaaccaactttgatttcatgatcctgaacctgtccttctgtgacctcttcatttgtggagtgacagcccccatgttcacctttgtgttattcttcagctcagccagtagtatcccggatgctttctgcttcactttccatctcaccagttcaggcttcatcatcatgtctctgaagacagtggcagtgatcgccctgcaccggctccggatggtgttggggaaacagcctaatcgcacggcctcctttccctgcaccgtactcctcaccctgcttctctgggccaccagtttcacccttgccaccttggctaccttgaaaaccagcaagtcccacctctgtcttcccatgtccagtctgattgctggaaaagggaaagccattttgtctctctatgtggtcgacttcaccttctgtgttgctgtggtctctgtctcttacatcatgattgctcagaccctgcggaagaacgctcaagtcagaaagtgcccccctgtaatcacagtcgatgcttccagaccacagcctttcatgggggtccctgtgcagggaggtggagatcccatccagtgtgccatgccggctctgtataggaaccagaattacaacaaactgcagcacgttcagacccgtggatataccaagagtcccaaccaactggtcacccctgcagcaagccgactccagctcgtatcagccatcaacctctccactgccaaggattccaaagccgtggtcacctgtgtgatcattgtgctgtcagtcctggtgtgctgtcttccactggggatttccttggtacaggtggttctctccagcaatgggagcttcattctttaccagtttgaattgtttggatttactcttatatttttcaagtcaggattaaacccttttatatattctcggaacagtgcagggctgagaaggaaagtgctctggtgcctccaatacataggcctgggttttttctgctgcaaacaaaagactcgacttcgagccatgggaaaagggaacctcgaagtcaacagaaacaaatcctcccatcatgaaacaaactctgcctacatgttatctccaaagccacagaagaaatttgtggaccaggcttgtggcccaagtcattcaaaagaaagtatggtgagtcccaagatctctgctggacatcaacactgtggtcagagcagctcgacccccatcaacactcggattgaaccttactacagcatctataacagcagcccttcccaggaggagagcagcccatgtaacttacagccagtaaactcttttggatttgccaattcatatattgccatgcattatcacaccactaatgacttagtgcaggaatatgacagcacttcagccaagcagattccagtcccctccgtttaaagtcatggaggctataggatcttatgtaaacagtttttgtttctgatagtaatggactttattctaacttgagatcagtggcggatcaaaacctacaagattcaactgaaaagttggcagttatggttttctttcatctgatgtgtcagtatctgttgatttgctttgtagtttgttgacatcttaagatttgatgtgaaagttttagattttttaccctg

SEQ ID NO: 11648 - DNA, 1694 bp, Homo sapiens
  source 1..1694: mol_type = unassigned DNA
agaagcgcgcagagtcccatcctgccacgccacgaggagagaagaaggaaagatacagtgttaggaaagagacctccctcgcccctacgccccgcgcccctgcgcctcgcttcagcctcaggacagtcctgccgggacggtgagcgcattcagcaccctggacagcaccgcggttgcgctgcctccagggcggccccgggctgctcctgctccgcagagctacgccctccccccgggtgccccggaccctgcacttgccgccgctttcctcgcgctgctctggaccttgctagccggctctgcacctcccagaagccgtgggcgcgccgctcagctgctccatcgcctcactttcccaggctcgcgcccgaagcagagccatgagaaccccagggtgcctggcgagccgctagcgccatgggccccggcgaggcgctgctggcgggtctcctggtgatggtactggccgtggcgctgctatccaacgcactggtgctgctttgttgcgcctacagcgctgagctccgcactcgagcctcaggcgtcctcctggtgaatctgtctctgggccacctgctgctggcggcgctggacatgcccttcacgctgctcggtgtgatgcgcgggcggacaccgtcggcgcccggcgcatgccaagtcattggcttcctggacaccttcctggcgtccaacgcggcgctgagcgtggcggcgctgagcgcagaccagtggctggcagtgggcttcccactgcgctacgccggacgcctgcgaccgcgctatgccggcctgctgctgggctgtgcctggggacagtcgctggccttctcaggcgctgcacttggctgctcgtggcttggctacagcagcgccttcgcgtcctgttcgctgcgcctgccgcccgagcctgagcgtccgcgcttcgcagccttcaccgccacgctccatgccgtgggcttcgtgctgccgctggcggtgctctgcctcacctcgctccaggtgcaccgggtggcacgcagacactgccagcgcatggacaccgtcaccatgaaggcgctcgcgctgctcgccgacctgcaccccagtgtgcggcagcgctgcctcatccagcagaagcggcgccgccaccgcgccaccaggaagattggcattgctattgcgaccttcctcatctgctttgccccgtatgtcatgaccaggctggcggagctcgtgcccttcgtcaccgtgaacgcccagtggggcatcctcagcaagtgcctgacctacagcaaggcggtggccgacccgttcacgtactctctgctccgccggccgttccgccaagtcctggccggcatggtgcaccggctgctgaagagaaccccgcgcccagcatccacccatgacagctctctggatgtggccggcatggtgcaccagctgctgaagagaaccccgcgcccagcgtccacccacaacggctctgtggacacagagaatgattcctgcctgcagcagacacactgagggcctggcagggctcatcgcccccaccttctaagaagccctgtggaaagggcactggccctgccacagagatgccactggggacccccagacaccagtggcttgactttgagctaaggctgaagtacaggaggaggaggaggagagggccggatgtgggtgtggacagcagtagtggcggagga

SEQ ID NO: 11649 - DNA, 3349 bp, Homo sapiens
  source 1..3349: mol_type = unassigned DNA
agttggtgtcatgcaagaatctattcacactgactaaagatattggaagagtgaagatcagagaattttaagtctgaaatttggcatcactgccctgaacaatataaccttagttggcataaactactcatacagacaaaggcattatccatcacaataagtaactttttgtctttatttcaaccggacaatcgtgattagaaaagctcctgtgacaaaattcaagaaaacctgacataaatgaacaacaatacaacatgtattcaaccatctatgatctcttccatggctttaccaatcatttacatcctcctttgtattgttggtgtttttggaaacactctctctcaatggatatttttaacaaaaataggtaaaaaaacatcaacgcacatctacctgtcacaccttgtgactgcaaacttacttgtgtgcagtgccatgcctttcatgagtatctatttcctgaaaggtttccaatgggaatatcaatctgctcaatgcagagtggtcaattttctgggaactctatccatgcatgcaagtatgtttgtcagtctcttaattttaagttggattgccataagccgctatgctaccttaatgcaaaaggattcctcgcaagagactacttcatgctatgagaaaatattttatggccatttactgaaaaaatttcgccagcccaactttgctagaaaactatgcatttacatatggggagttgtactgggcataatcattccagttaccgtatactactcagtcatagaggctacagaaggagaagagagcctatgctacaatcggcagatggaactaggagccatgatctctcagattgcaggtctcattggaaccacatttattggattttcctttttagtagtactaacatcatactactcttttgtaagccatctgagaaaaataagaacctgtacgtccattatggagaaagatttgacttacagttctgtgaaaagacatcttttggtcatccagattctactaatagtttgcttccttccttatagtatttttaaacccattttttatgttctacaccaaagagataactgtcagcaattgaattatttaatagaaacaaaaaacattctcacctgtcttgcttcggccagaagtagcacagaccccattatatttcttttattagataaaacattcaagaagacactatataatctctttacaaagtctaattcagcacatatgcaatcatatggttgacttttgaatggaaaaccccacaatattaagaaaagcattcatgtgactttattagggacactaaactacatcattaacatgtcacagcttggttgacaataatcaccaagaaaatctctttggtttttaaaaataaataaacatatattcataaaactcaaaaaacagttatactgaacgttgagatggcagaaactttcagaagcaaaaattaagcatattgaaaggatcccactcatatgaaactaacaggctgttttctgtttaaactcaactgtcagtgcttctgttcagaacacgttatttcatgactaggataaagaagcaaatggtttatgacttgtctgctttctggtagttagaatacaagggtcaatctatggctagtgtttattggtaattttaaaatctttaaaaataagtagctgggcacagtggcttacgcctgtaatcccagcactttgggaggctgaggtgggtggatcattttgaggtcaggagttcaagaccagcctgggcaacatggtgaaaccctgtctctactaaaaatacaaaaatcagctggacatggtggtgggcgcctgtaatcccagctactcgggaggctgaggcaggagaatcgcttgagcccgggacggaggttgcagtgagcggagatcgtgccactgcactacagcctgggaggcagagcgagactctgtctcataaaacaaaacaaaaaaataaaaataagtaaaaaaataaataagaaatatcctcattcacatcttacctaaatgcatgaataatacagtgaaaaaaatccaaggttttataaacatattatttatttgaaattatctggctcatgttattggggagaagcaatattcattgactatatttttaaagcagatgatacttataaaaatgcttaaatatttggattaggctttgtcaaagtaaaaagctatgtcattatatgcccatcttcatcacattgtgcatattttcttctgtattcaatataaataatgttattagtgacaaacagtacctggcagttaattttttgtgaaataaatgaatgaataataagggagtgtaatagtattgcagttaagagattgatctctgaagttatacttcttgggttcaatctggctctactttttatttagctggacaatcttaggcaaattaacttatcctctgtacgtgttaatttcttcatttgtagagcagaaaatactatcttatttacagatcctattattaaatcagctgttactattatgagtagctaacgcttagtaagcacttgctgtttgccaagcattctacttatatgctttacatatattattttaatcaccacaactctaaagtatactaatttactgatgaaaatattgaagtgggctgggtgcggtggctcatgcctgtaatcccagcactctgggaggccgaggtgggcagatcacctgaggtcaggagttcgagactagcctggccaacatggcgaaacccacctctactaaaaatacaaaaattagctgggcgtggtggtgtgtgcctgtagtcccagctacttgggaggctgaggcagaagaatcacttgaactcgggaggctgaggcaggagaatcacttgaactcaggaggcggaggttgcagtgagccaagatcatgccattgcactccagcctgggcgacagagtgagactctgtctcaaaaaaaaaaaaaaaaaaaaaaaaaaaaaaaaatatatatatatatatatatatatatgtatgtatgtatgtatatgtgcatagttaagtaaatcaccccaattttttctaatatttaagtgaacatttaaagataagcatttcttaatgttaatttcttttctttcatgtaatcttgtcagtagacaaatgatggtgactatattctgtaataagtacatatattatgattaaaaaaaaaagcgtgtactatctgcccaaagagatcataagcactttggagctataaacttcttgtctatttctacttccatggtactgatattctcttctcagataaccaaacaaaaacagctgaataaaatcaaccattaatagtaacttgc

SEQ ID NO: 11650 - DNA, 4282 bp, Homo sapiens
  source 1..4282: mol_type = unassigned DNA
gtgccgaccgcgggctggtggcgggcggcgcggtgctccgcgcgtccgggctccctggctcctcgggacggccttgtatgctgtgcgccccgcaccccggctgcgcgctccgatcccagcgggaggggacgcccggcccgcaggctcccaggggaggggtggctcctgcaaaatggtccctcacctcttgctgctctgtctcctccccttggtgcgagccaccgagccccacgagggccgggccgacgagcagagcgcggaggcggccctggccgtgcccaatgcctcgcacttcttctcttggaacaactacaccttctccgactggcagaactttgtgggcaggaggcgctacggcgctgagtcccagaaccccacggtgaaagccctgctcattgtggcttactccttcatcattgtcttctcactctttggcaacgtcctggtctgtcatgtcatcttcaagaaccagcgaatgcactcggccaccagcctcttcatcgtcaacctggcagttgccgacataatgatcacgctgctcaacacccccttcactttggttcgctttgtgaacagcacatggatatttgggaagggcatgtgccatgtcagccgctttgcccagtactgctcactgcacgtctcagcactgacactgacagccattgcggtggatcgccaccaggtcatcatgcaccccttgaaaccccggatctcaatcacaaagggtgtcatctacatcgctgtcatctggaccatggctacgttcttttcactcccacatgctatctgccagaaattatttaccttcaaatacagtgaggacattgtgcgctccctctgcctgccagacttccctgagccagctgacctcttctggaagtacctggacttggccaccttcatcctgctctacatcctgcccctcctcatcatctctgtggcctacgctcgtgtggccaagaaactgtggctgtgtaatatgattggcgatgtgaccacagagcagtactttgccctgcggcgcaaaaagaagaagaccatcaagatgttgatgctggtggtagtcctctttgccctctgctggttccccctcaactgctacgtcctcctcctgtccagcaaggtcatccgcaccaacaatgccctctactttgccttccactggtttgccatgagcagcacctgctataaccccttcatatactgctggctgaacgagaacttcaggattgagctaaaggcattactgagcatgtgtcaaagacctcccaagcctcaggaggacaggccaccctccccagttccttccttcagggtggcctggacagagaagaatgatggccagagggctccccttgccaataacctcctgcccacctcccaactccagtctgggaagacagacctgtcatctgtggaacccattgtgacgatgagttagaagaggttgggaagagggagtgggaggggtctgtctccacctgaggcagggaaagagagcctattctcacacatgatcttcagagtgctggaaacacactcctgcagaagctgtaggactcttgaattcctaggaaactgtccagcctcctagccccatgtgatgtgaaaactaaaaggcaccaccaactagacatgtgttcataaattcccatctaagaaacactgggaggcacagcagcctgtatctctgaggaagaggagcgaggacaacgttggcccagatgggggctgaatcattcaactgcctccatctgtggggcagctgctgccttacagcccttcctactgctgagcatccctaagggagacctaaatcatactttgggtgtggtgacccagatgcacagagctctgcttgaaacaggtacacgggccagggaaatgccagcaagccagagcgggcgtggagatttttatgcctcactttctggagtcactgggccatgatgaatcataagtcttcagtggcctagcaatatccagataagaaaggaccaacttgggttccttaaaacaaagggaaattattattgccacttagaaaaattcagaaaagcacacactcacatacacacacacaaaatcactctcttatcccatccatttgtgataacatctgtgaacatgctgtggctctatttgcaacattttccttcgtgtgtgtgattgtgtgcatgtgtgcatgaccttttttttttctttttttttttttttttgagatggaatctcgctctgtcacccaggttggagttcagtggcacaatctcggctcactgcaagctctgcctcccaggttcatgccgttctcctgcctcagcctccctagtagctgggactacaggtgcccgccaccatgcccggctaatcttttgcatttttagtagagacggggtttcaccgtgttagccaggatggtctcgatctcctgacctcgtgatccacctgcctaggcctcccaaagtgttgggattacaggcgtgagccaccccgcccggcccttttttttcatttatactttttcatttagattgtaatgattaacagaaacaggggtacctttcccaggggtgtccaccagaagagttgaagaagaggtgagaagatcccaaggtgaagcctgtcaccacgcagacagaactgccccctattgtagacagtggtgggaagggcctggctcacatgcccctccttagaggcagcctcaagatgaaccagggaatcaaactcaaccaggaggcatgattccttctctcctgcaattgcacaaaaacaagtggtggtgaaacattgttctgttttcacaagagatgagggagcaggctttccaatatgctggaagtaattgtgcttagacacctcatcctcccaagctgtctagaaaggccatttcgctgtgttgtctaaataatgagggttttttcacaccatttctcaaaaggagattcgctgtcaacatcattttggtggttcaggtgtaactttcacttacagaaacttatgcatccttaagagatctcaattcttaagggtctaacttgccagagaaatctcattccagggactgattgtttttatcaccttctgtctggtcctgagtgactcactgtgtcacccagaaaagagacctgtcaggcagaatcgagcttaattcacctgctctaaacaattgttactgacacactgcttttaggttttcttctagcaccagataaactctgaaatcaaagcatggatatgagctcagtaggaaactaaggtttgagggagaaagagtttgtcacttagacctcttggctgttaactgaaactgaacttgctcacatcatctgcttccctgtaatgaactatgagggttctttatcctagtttctatttatgaagatggttgaaaattttcaagacacaagattttgaaaactcactgaattatgggcaaaaccatgactttcattgggcagacagagtcttctaagcccacagggatccccagatggatttttcaggacaaatggctcatgtgcctgtacttattgtctctgtggtgtgtcaagaagtagctaatggtttcatctgaaagctgccatagaaattctgtgaaccagaatgagacaaggcagcaggcatacagaaggtttgtcctgctctgggaagcatggaggatgttgtacttcactcctctctgagggtgtctaggaatacagaagctccttgacttacatctcaataaacccatcgtaagtccaaaatattggaagttgaaaatgcattgaatacacccaacctactgaacatcgtagcttagccaagcctaccttaaatgctctgagaacacttatattagcctacagctgggaaaaatcatttaacacaaagcctatcttctaatgaagtatggaatatctcatgtaatttattgaatactgtactgaaggtgaaaaccagaatggttgtatggatatgcgaagtatggtttctactgaatgtgtattgctttcccatcatcataaaatttttaaaaatcctaagttgaatcattgttagtccgggaccttcagtactgccaagtcccagagaaaacccttttactctggggagaacccactgatggctcattagatctgtcccttccccgaggtccgtgtgtgactttgagcaaaaagtgacttctttttgtgaatgtaaaatttgtgaaacttgagtttttccaatgtgctgtaaagtgttttattgtaaattgctcatctcaataaaatttacttcaggtttgtggactgtg

SEQ ID NO: 11651 - DNA, 1497 bp, Homo sapiens
  source 1..1497: mol_type = unassigned DNA
taactgtccaccagaaaggactgctctttgggtgagttgaacttcttccattatagaaagaattgaaggctgagaaactcagcctctatcatgtggaacagctctgacgccaacttctcctgctaccatgagtctgtgctgggctatcgttatgttgcagttagctggggggtggtggtggctgtgacaggcaccgtgggcaatgtgctcaccctactggccttggccatccagcccaagctccgtacccgattcaacctgctcatagccaacctcacactggctgatctcctctactgcacgctccttcagcccttctctgtggacacctacctccacctgcactggcgcaccggtgccaccttctgcagggtatttgggctcctcctttttgcctccaattctgtctccatcctgaccctctgcctcatcgcactgggacgctacctcctcattgcccaccctaagctttttccccaagttttcagtgccaaggggatagtgctggcactggtgagcacctgggttgtgggcgtggccagctttgctcccctctggcctatttatatcctggtacctgtagtctgcacctgcagctttgaccgcatccgaggccggccttacaccaccatcctcatgggcatctactttgtgcttgggctcagcagtgttggcatcttctattgcctcatccaccgccaggtcaaacgagcagcacaggcactggaccaatacaagttgcgacaggcaagcatccactccaaccatgtggccaggactgatgaggccatgcctggtcgtttccaggagctggacagcaggttagcatcaggaggacccagtgaggggatttcatctgagccagtcagtgctgccaccacccagaccctggaaggggactcatcagaagtgggagaccagatcaacagcaagagagctaagcagatggcagagaaaagccctccagaagcatctgccaaagcccagccaattaaaggagccagaagagctccggattcttcatcggaatttgggaaggtgactcgaatgtgttttgctgtgttcctctgctttgccctgagctacatccccttcttgctgctcaacattctggatgccagagtccaggctccccgggtggtccacatgcttgctgccaacctcacctggctcaatggttgcatcaaccctgtgctctatgcagccatgaaccgccaattccgccaagcatatggctccattttaaaaagagggccccggagtttccataggctccattagaactgtgaccctagtcaccagaattcaggactgtctcctccaggaccaaagtggccaggtaataggagaataggtgaaataacacatgtgggcattttcacaacaatctctccccagcctcccaaatcaagtctctccatcacttgatcaatgtttcagccctagactgcccaaggagtattattaattattaataaatgaattctgtgcttttaa

SEQ ID NO: 11652 - DNA, 2041 bp, Homo sapiens
  source 1..2041: mol_type = unassigned DNA
cctgcttgaagcctaactgtccaccagaaaggactgctctttgggtgagttgaacttcttccattatagaaagaattgaaggctgagaaactcaggtaagcacttttgttgtgggtatacttttaccttcttggtctcctcatctcccaggtggtaacaaacagaaatgactaaagcctatatgtgtgtgtagtggaaaggagcagagggaactgaatacagagaggatcctgaatacacgatgctgaatagagagaggggactcctgggggtctttggggatggggaaggaattaaaaaagttggagggcactgggtttactgagagcagcgggatggatatagaagaggactgaggtttggagcagaataagactaagatatttaggcaagagatatttagataaaaacttggggaaatatttgagaatgggaaaggactaagagaacctaaggagagagttagggatcttgagatgaagaggcctgggaatggttcaggaggatactgaattaaggtgaggtccaggaacagtttagatgtccagggtcccagaactgttcaagagatctaagttgaatgctaggttctgattccctcttcctcttccaccctctgcctctttagcctctatcatgtggaacagctctgacgccaacttctcctgctaccatgagtctgtgctgggctatcgttatgttgcagttagctggggggtggtggtggctgtgacaggcaccgtgggcaatgtgctcaccctactggccttggccatccagcccaagctccgtacccgattcaacctgctcatagccaacctcacactggctgatctcctctactgcacgctccttcagcccttctctgtggacacctacctccacctgcactggcgcaccggtgccaccttctgcagggtatttgggctcctcctttttgcctccaattctgtctccatcctgaccctctgcctcatcgcactgggacgctacctcctcattgcccaccctaagctttttccccaagttttcagtgccaaggggatagtgctggcactggtgagcacctgggttgtgggcgtggccagctttgctcccctctggcctatttatatcctggtacctgtagtctgcacctgcagctttgaccgcatccgaggccggccttacaccaccatcctcatgggcatctactttgtgcttgggctcagcagtgttggcatcttctattgcctcatccaccgccaggtcaaacgagcagcacaggcactggaccaatacaagttgcgacaggcaagcatccactccaaccatgtggccaggactgatgaggccatgcctggtcgtttccaggagctggacagcaggttagcatcaggaggacccagtgaggggatttcatctgagccagtcagtgctgccaccacccagaccctggaaggggactcatcagaagtgggagaccagatcaacagcaagagagctaagcagatggcagagaaaagccctccagaagcatctgccaaagcccagccaattaaaggagccagaagagctccggattcttcatcggaatttgggaaggtgactcgaatgtgttttgctgtgttcctctgctttgccctgagctacatccccttcttgctgctcaacattctggatgccagagtccaggctccccgggtggtccacatgcttgctgccaacctcacctggctcaatggttgcatcaaccctgtgctctatgcagccatgaaccgccaattccgccaagcatatggctccattttaaaaagagggccccggagtttccataggctccattagaactgtgaccctagtcaccagaattcaggactgtctcctccaggaccaaagtggccaggtaataggagaataggtgaaataacacatgtgggcattttcacaacaatctctccccagcctcccaaatcaagtctctccatcacttgatcaatgtttcagccctagactgcccaaggagtattattaattattaataaatgaattctgtgctttt

SEQ ID NO: 11653 - DNA, 3045 bp, Homo sapiens
  source 1..3045: mol_type = unassigned DNA
tattttactgctgtctcaagatcagattattactgtagagaagatttttattttttgtttcattaacagattattataaagcaaaaagcatgcagaaaaagaagcagacgttttacattgggaattaatgaaagcgtgtctgctagttttgggtaggagaactgggaagttgttgcttaaaattttatatcacctccacaaacaaaactcttcggaaatggtaaaataagaaaatgcatgattctagaggcattcctaagcacccacgtgtcaggctttgtggtgtctgtggtatcatccgaccgtttggactggttagggcttactgagagctccatttctggaaagccttacaagactgaggaatatcagactgcgaatcaccgggaacggttcctttgcagcacagaagcaatctctctccccatcttcgcatattctgatggcaaaacaagtggaagaaaagaggaagcatgactgcagatcagatcagttctctttgtggattatattttcagtaaaatgtatggatctatcttttccttgttcttatatctagatcatgagacttgactgaggctgtatccttatcctccatccatctatggcgaactatagccatgcagctgacaacattttgcaaaatctctcgcctctaacagcctttctgaaactgacttccttgggtttcataataggagtcagcgtggtgggcaacctcctgatctccattttgctagtgaaagataagaccttgcatagagcaccttactacttcctgttggatctttgctgttcagatatcctcagatctgcaatttgtttcccatttgtgttcaactctgtcaaaaatggttctacctggacttatgggactctgacttgcaaagtgattgcctttctgggggttttgtcctgtttccacactgctttcatgctcttctgcatcagtgtcaccagatatttagctatcgcccatcaccgcttctatacaaagaggctgaccttttggacgtgtctggctgtgatctgtatggtgtggactctgtctgtggccatggcatttcccccggttttagacgtgggcacttactcattcattagggaggaagatcaatgcaccttccaacaccgctccttcagggctaatgattccttaggatttatgctgcttcttgctctcatcctcctagccacacagcttgtctacctcaagctgatatttttcgtccacgatcgaagaaaaatgaagccagtccagtttgtagcagcagtcagccagaactggacttttcatggtcctggagccagtggccaggcagctgccaattggctagcaggatttggaaggggtcccacaccacccaccttgctgggcatcaggcaaaatgcaaacaccacaggcagaagaaggctattggtcttagacgagttcaaaatggagaaaagaatcagcagaatgttctatataatgacttttctgtttctaaccttgtggggcccctacctggtggcctgttattggagagtttttgcaagagggcctgtagtaccagggggatttctaacagctgctgtctggatgagttttgcccaagcaggaatcaatccttttgtctgcattttctcaaacagggagctgaggcgctgtttcagcacaacccttctttactgcagaaaatccaggttaccaagggaaccttactgtgttatatgagggagcatctgtaaatctttagccttgtgaaaactaaccttctctgctgagcaattgtggcccatagccatattttgagaagaaattcaagaatggaatcagcagttttaaggatttgggcaacattctgcagtctttgcaatagttcacctataatcctattttaaatctcagagtgatcctgctgactgccagcaaaggtttgtaattaagaagggactgaaccactgccctaagtttctttatgtggtcaaaaactagataatgaaagtagcaggtgctaagtatcagtgctaaatgctctgtatgtcactacatatgaaaaaacatcaaaaaacaattagcattggacatcttaataaattaagttgacatgaggtaaatgtgttgataaaaactaattttagaagtttgaagactttaaaacatttcatactactattgttttgcaaagactaaaatatttggggacttaaagtactgtaatccactaaagacgtgccaatgaattattggaatatcacactttaaaaaccgccttgtaagttctggggagcattccaaagcagtatattggttccaattagagtttactttttttgtattaatacattgctatttctaaataccactttcctcatctactagtaagattgctagcattgaactgtattatgtggtttttgttgatttggtataaagtttttccaattcatttatattttacaaatgctagatattggtctgggaggcaacattaatggtaccagcctgtcacaactgagcagttctaataatgcagaataaatacatgttgccttaaagggttatctagtatccttcatcttatttagcactggagcaaatagccaagggaaatcaaatcagtaactggtcatggtcatgcatctaaaagtgcatggaagatcatttattactttttccttttttctcacatggtttgaaacttaaagtgcacatcactgaaataatgagattttcttctacggtgtgctaccctttctaaactgttctaagaagcaggcagttgatgtatgtttatattttaagtcagctgtcaaggggagaccacagccttagtatgacatcctgcacaatttgtgaagcatttattctactgaaggcacagtcttgtttatactttctgcacattcagtgtattggtaatttaaattatttcagttttaacttgtgaaagcttatattatgatttctggtattttagaaatacattagagtctgtgagtctcattctttaagatacagatgtgtgaacttcaatataaagttgcatttgccaaaattta

SEQ ID NO: 11654 - DNA, 2895 bp, Homo sapiens
  source 1..2895: mol_type = unassigned DNA
cgccgccgagccctgcctggatgctcagtcaaggcactaaggcaaaaaaaaaaaaaaaaaaaacaaaaaacaaaaaaaaaaaaaaaaaaaagaaaaagaaaaaaagaaaaaaatcagcaatttatagaaagaagctatagtctgtcgggatatccaacaccaacagtagggcttactgagagctccatttctggaaagccttacaagactgaggaatatcagactgcgaatcaccgggaacggttcctttgcagcacagaagcaatctctctccccatcttcgcatattctgatggcaaaacaagtggaagaaaagaggaagcatgactgcagatcagatcagttctctttgtggattatattttcagtaaaatgtatggatctatcttttccttgttcttatatctagatcatgagacttgactgaggctgtatccttatcctccatccatctatggcgaactatagccatgcagctgacaacattttgcaaaatctctcgcctctaacagcctttctgaaactgacttccttgggtttcataataggagtcagcgtggtgggcaacctcctgatctccattttgctagtgaaagataagaccttgcatagagcaccttactacttcctgttggatctttgctgttcagatatcctcagatctgcaatttgtttcccatttgtgttcaactctgtcaaaaatggttctacctggacttatgggactctgacttgcaaagtgattgcctttctgggggttttgtcctgtttccacactgctttcatgctcttctgcatcagtgtcaccagatatttagctatcgcccatcaccgcttctatacaaagaggctgaccttttggacgtgtctggctgtgatctgtatggtgtggactctgtctgtggccatggcatttcccccggttttagacgtgggcacttactcattcattagggaggaagatcaatgcaccttccaacaccgctccttcagggctaatgattccttaggatttatgctgcttcttgctctcatcctcctagccacacagcttgtctacctcaagctgatatttttcgtccacgatcgaagaaaaatgaagccagtccagtttgtagcagcagtcagccagaactggacttttcatggtcctggagccagtggccaggcagctgccaattggctagcaggatttggaaggggtcccacaccacccaccttgctgggcatcaggcaaaatgcaaacaccacaggcagaagaaggctattggtcttagacgagttcaaaatggagaaaagaatcagcagaatgttctatataatgacttttctgtttctaaccttgtggggcccctacctggtggcctgttattggagagtttttgcaagagggcctgtagtaccagggggatttctaacagctgctgtctggatgagttttgcccaagcaggaatcaatccttttgtctgcattttctcaaacagggagctgaggcgctgtttcagcacaacccttctttactgcagaaaatccaggttaccaagggaaccttactgtgttatatgagggagcatctgtaaatctttagccttgtgaaaactaaccttctctgctgagcaattgtggcccatagccatattttgagaagaaattcaagaatggaatcagcagttttaaggatttgggcaacattctgcagtctttgcaatagttcacctataatcctattttaaatctcagagtgatcctgctgactgccagcaaaggtttgtaattaagaagggactgaaccactgccctaagtttctttatgtggtcaaaaactagataatgaaagtagcaggtgctaagtatcagtgctaaatgctctgtatgtcactacatatgaaaaaacatcaaaaaacaattagcattggacatcttaataaattaagttgacatgaggtaaatgtgttgataaaaactaattttagaagtttgaagactttaaaacatttcatactactattgttttgcaaagactaaaatatttggggacttaaagtactgtaatccactaaagacgtgccaatgaattattggaatatcacactttaaaaaccgccttgtaagttctggggagcattccaaagcagtatattggttccaattagagtttactttttttgtattaatacattgctatttctaaataccactttcctcatctactagtaagattgctagcattgaactgtattatgtggtttttgttgatttggtataaagtttttccaattcatttatattttacaaatgctagatattggtctgggaggcaacattaatggtaccagcctgtcacaactgagcagttctaataatgcagaataaatacatgttgccttaaagggttatctagtatccttcatcttatttagcactggagcaaatagccaagggaaatcaaatcagtaactggtcatggtcatgcatctaaaagtgcatggaagatcatttattactttttccttttttctcacatggtttgaaacttaaagtgcacatcactgaaataatgagattttcttctacggtgtgctaccctttctaaactgttctaagaagcaggcagttgatgtatgtttatattttaagtcagctgtcaaggggagaccacagccttagtatgacatcctgcacaatttgtgaagcatttattctactgaaggcacagtcttgtttatactttctgcacattcagtgtattggtaatttaaattatttcagttttaacttgtgaaagcttatattatgatttctggtattttagaaatacattagagtctgtgagtctcattctttaagatacagatgtgtgaacttcaatataaagttgcatttgccaaaattta

SEQ ID NO: 11655 - DNA, 591 bp, Homo sapiens
  source 1..591: mol_type = unassigned DNA
aaaaaaaaaaaaaaaaaagaaaaagaaaaaaagaaaaaaatcagcaatttatagaaagaagctatagtctgtcgggatatccaacaccaacagggcttactgagagctccatttctggaaagccttacaagactgaggaatatcagactgcgaatcaccgggaacggttcctttgcagcacagaagcaatctctctccccatcttcgcatattctgatggcaaaacaagtggaagaaaagaggaagcatgactgcagatcagatcagttctctttgtggattatattttcagtaaaatgtatggatctatcttttccttgttcttatatctagatcatgagacttgactgaggctgtatccttatcctccatccatctatggcgaactatagccatgcagctgacaacattttgcaaaatctctcgcctctaacagcctttctgaaactgacttccttgggtttcataataggagtcagcgtggtgggcaacctcctgatctccattttgctagtgaaagataagaccttgcatagagcaccttactacttcctgttggatctttgctgttcagatatcctcagatctgca

SEQ ID NO: 11656 - DNA, 1630 bp, Homo sapiens
  source 1..1630: mol_type = unassigned DNA
atatccaacaccaacaggtaggaggatatactcttggttaagtttgggggatgtgggggaatgcacagtgttgatgaaactgcaggttcaccgagaaagagccctccctcaggttgtgtgtgtgtgtgtgtgtgtgtgtgtctctgtgtgtgtgtgtgtgtgtgtgtgtgtatgtgttttgtgacaataaactgcataatggaagtacattcagacaatgcatcttcagtagggcttactgagagctccatttctggaaagccttacaagactgaggaatatcagactgcgaatcaccgggaacggttcctttgcagcacagaagcaatctctctccccatcttcgcatattctgatggcaaaacaagtggaagaaaagaggaagcatgactgcagatcagatcagttctctttgtggattatattttcagtaaaatgtatggatctatcttttccttgttcttatatctagatcatgagacttgactgaggctgtatccttatcctccatccatctatggcgaactatagccatgcagctgacaacattttgcaaaatctctcgcctctaacagcctttctgaaactgacttccttgggtttcataataggagtcagcgtggtgggcaacctcctgatctccattttgctagtgaaagataagaccttgcatagagcaccttactacttcctgttggatctttgctgttcagatatcctcagatctgcaatttgtttcccatttgtgttcaactctgtcaaaaatggttctacctggacttatgggactctgacttgcaaagtgattgcctttctgggggttttgtcctgtttccacactgctttcatgctcttctgcatcagtgtcaccagatatttagctatcgcccatcaccgcttctatacaaagaggctgaccttttggacgtgtctggctgtgatctgtatggtgtggactctgtctgtggccatggcatttcccccggttttagacgtgggcacttactcattcattagggaggaagatcaatgcaccttccaacaccgctccttcagggctaatgattccttaggatttatgctgcttcttgctctcatcctcctagccacacagcttgtctacctcaagctgatatttttcgtccacgatcgaagaaaaatgaagccagtccagtttgtagcagcagtcagccagaactggacttttcatggtcctggagccagtggccaggcagctgccaattggctagcaggatttggaaggggtcccacaccacccaccttgctgggcatcaggcaaaatgcaaacaccacaggcagaagaaggctattggtcttagacgagttcaaaatggagaaaagaatcagcagaatgttctatataatgacttttctgtttctaaccttgtggggcccctacctggtggcctgttattggagagtttttgcaagagggcctgtagtaccagggggatttctaacagctgctgtctggatgagttttgcccaagcaggaatcaatccttttgtctgcattttctcaaacagggagctgaggcgctgtttcagcacaacccttctttactgcagaaaatccaggttaccaagggaaccttactgtgttatatga

SEQ ID NO: 11657 - DNA, 582 bp, Homo sapiens
  source 1..582: mol_type = unassigned DNA
aatttatagaaagaagctatagtctgtcgggatatccaacaccaacagatattctgatggcaaaacaagtggaagaaaagaggaagcatgactgcagatcagatcagttctctttgtggattatattttcagtaaaatgtatggatctatcttttccttgttcttatatctagatcatgagacttgactgaggctgtatccttatcctccatccatctatggcgaactatagccatgcagctgacaacattttgcaaaatctctcgcctctaacagcctttctgaaactgacttccttgggtttcataataggagtcagcgtggtgggcaacctcctgatctccattttgctagtgaaagataagaccttgcatagagcaccttactacttcctgttggatctttgctgttcagatatcctcagatctgcaatttgtttcccatttgtgttcaactctgtcaaaaatggttctacctggacttatgggactctgacttgcaaagtgattgcctttctgggggttttgtcctgtttccacactgctttcatgctcttctgcatcagtgtcaccagatatttag

SEQ ID NO: 11658 - DNA, 4933 bp, Homo sapiens
  source 1..4933: mol_type = unassigned DNA
aatctcaccacccagcaatgaggtattttactgctgtctcaagatcagattattactgtagagaagatttttattttttgtttcattaacagattattataaagcaaaaagcatgcagaaaaagaagcagacgttttacattgggaattaatgaaagcgtgtctgctagttttgggtaggagaactgggaagttgttgcttaaaattttatatcacctccacaaacaaaactcttcggaaatggtaaaataagaaaatgcatgattctagaggcattcctaagcacccacgtgtcaggctttgtggtgtctgtggtatcatccgaccgtttggactggtggcttactgagagctccatttctggaaagccttacaagactgaggaatatcagactgcgaatcaccgggaacggttcctttgcagcacagaagcaatctctctccccatcttcgcatattctgatggcaaaacaagtggaagaaaagaggaagcatgactgcagatcagatcagttctctttgtggattatattttcagtaaaatgtatggatctatcttttccttgttcttatatctagatcatgagacttgactgaggctgtatccttatcctccatccatctatggcgaactatagccatgcagctgacaacattttgcaaaatctctcgcctctaacagcctttctgaaactgacttccttgggtttcataataggagtcagcgtggtgggcaacctcctgatctccattttgctagtgaaagataagaccttgcatagagcaccttactacttcctgttggatctttgctgttcagatatcctcagatctgcaatttgtttcccatttgtgttcaactctgtcaaaaatggttctacctggacttatgggactctgacttgcaaagtgattgcctttctgggggttttgtcctgtttccacactgctttcatgctcttctgcatcagtgtcaccagatatttagctatcgcccatcaccgcttctatacaaagaggctgaccttttggacgtgtctggctgtgatctgtatggtgtggactctgtctgtggccatggcatttcccccggttttagacgtgggcacttactcattcattagggaggaagatcaatgcaccttccaacaccgctccttcagggctaatgattccttaggatttatgctgcttcttgctctcatcctcctagccacacagcttgtctacctcaagctgatatttttcgtccacgatcgaagaaaaatgaagccagtccagtttgtagcagcagtcagccagaactggacttttcatggtcctggagccagtggccaggcagctgccaattggctagcaggatttggaaggggtcccacaccacccaccttgctgggcatcaggcaaaatgcaaacaccacaggcagaagaaggctattggtcttagacgagttcaaaatggagaaaagaatcagcagaatgttctatataatgacttttctgtttctaaccttgtggggcccctacctggtggcctgttattggagagtttttgcaagagggcctgtagtaccagggggatttctaacagctgctgtctggatgagttttgcccaagcaggaatcaatccttttgtctgcattttctcaaacagggagctgaggcgctgtttcagcacaacccttctttactgcagaaaatccaggttaccaagggaaccttactgtgttatatgagggagcatctgtaaatctttagccttgtgaaaactaaccttctctgctgagcaattgtggcccatagccatattttgagaagaaattcaagaatggaatcagcagttttaaggatttgggcaacattctgcagtctttgcaatagttcacctataatcctattttaaatctcagagtgatcctgctgactgccagcaaaggtttgtaattaagaagggactgaaccactgccctaagtttctttatgtggtcaaaaactagataatgaaagtagcaggtgctaagtatcagtgctaaatgctctgtatgtcactacatatgaaaaaacatcaaaaaacaattagcattggacatcttaataaattaagttgacatgaggtaaatgtgttgataaaaactaattttagaagtttgaagactttaaaacatttcatactactattgttttgcaaagactaaaatatttggggacttaaagtactgtaatccactaaagacgtgccaatgaattattggaatatcacactttaaaaaccgccttgtaagttctggggagcattccaaagcagtatattggttccaattagagtttactttttttgtattaatacattgctatttctaaataccactttcctcatctactagtaagattgctagcattgaactgtattatgtggtttttgttgatttggtataaagtttttccaattcatttatattttacaaatgctagatattggtctgggaggcaacattaatggtaccagcctgtcacaactgagcagttctaataatgcagaataaatacatgttgccttaaagggttatctagtatccttcatcttatttagcactggagcaaatagccaagggaaatcaaatcagtaactggtcatggtcatgcatctaaaagtgcatggaagatcatttattactttttccttttttctcacatggtttgaaacttaaagtgcacatcactgaaataatgagattttcttctacggtgtgctaccctttctaaactgttctaagaagcaggcagttgatgtatgtttatattttaagtcagctgtcaaggggagaccacagccttagtatgacatcctgcacaatttgtgaagcatttattctactgaaggcacagtcttgtttatactttctgcacattcagtgtattggtaatttaaattatttcagttttaacttgtgaaagcttatattatgatttctggtattttagaaatacattagagtctgtgagtctcattctttaagatacagatgtgtgaacttcaatataaagttgcatttgccaaaatttacccgtgtagcctgttaattttcttgaaataagttttacatttttggcacataacaactttttttttaatttgggaggcaagcacaaactaggaagactagctttattatggttttgctttttgattcttgtagctactacattccagactggaaatgtatgaatgataatcaacataatgctgataaactgacataatattatctgtaaaagcattatttggtagtttattataatcatccctctattattcttaaatgccagtagtatttagagatgtgtacctgcttagttaattggctcagaattttaatataaacatcacactttaatttggagcatagtaccatagaaatttggggttctaaatatacaacttgtaagaagaatggtttacactaacattatgacaaaactagaaaaagttattatttttgtttgctttctgttgttttgtttattggttggtttttgtgaagtttatttttttttggtatttgataattaagattaggaatctaataacacagaattccatattgctatagtacttctgtaaagagaatatcaatataaataaggaaaataaatcaatgaaatgtttcaatgatatatgcaactattcagttttgctcttataaggacagctcaagccatgaattagtgagcattctgacctcatttttactttacaccaaagttgattagatctgagacaaaatttaatgcacaacagtgagttggatctagcaataaagtctccttggtactgaaatcattatctaaaataaaggaaatgttatcaaaagatgttctgataacattgtgattgtaactcaaaaaaatttatagtagaaacgtaattgcaatgatgataataactaactctgcttagaggttcaaatatcaccagcaatcagtaaaaaattcagcaataatcttaaggccagagagaacaggttcaccattgcatagacaagaaaacagatatgggttaagagttggggactgaggagtcaagagcaacggccacgtgaagctgcctgactccacctagctatttggaataaccgattcccacagttttggtaagaaaccagccccagtaatcagtaagtcaggctgaactgcagtgacttttatttaagcctactcctgactaacttggcatttgcaggtcaagcaggaagcagttgacaagacacatcctcagtgaatcaatgccatttgtaactcaactggtaacagtagtaatcatacaaaataaaaacctgcttcagtgtcttaatgaccaaatcacattatctattttagcactcattccaaaattcagtatttaatgtaattaatctttaatccataaaaatacatccccactgtagcggggcagggggtgtccaacttccctgtgagactgattatcaataataatgtgtctccctcttggactgagcacacatctgagctgaacggcctttaaattgtttttcataatagtggtgatatgtttgcgtggatacgtctgtactatttcatctggttcattttgcatgtaatagatttatctgtgagatgcctggctgaagctaggcattcagtctgtgactgtggaatcctatgcaggtattaaccaaggcagaaagaggtgagtaacttgcccatttctccacagagaccccatttaaataacacaaaattgaccacagtgattagatgaaaaaattatttgtagataggataatctattgactgaattatcttttgcagatatcagctggttggatttctcaccaggattgtctatagaagttaactgatttatgattgttaacacataaatatggccacttatccatttgcctcaacttc

SEQ ID NO: 11659 - DNA, 1608 bp, Homo sapiens
  source 1..1608: mol_type = unassigned DNA
agccctctgtgtttccttcaggtgaatcaccatctgattcctgcaggttcaggaaatactcttccccagtcgacaaatctcacctactcttagttatgagtcatttacattagcaagagagcaagttgttccagtagtcgcctggcaggagaatttgaaagggtgccccaaaggacaatctctaaaggggtaagggagatacctaccttgtctggtaggggagatgtttcgttttcatgctttaccagaaaatccacttccctgccgaccttagtttcaaagcttattcttaattagagacaagaaacctgtttcaacttgaagacaccgtatgaggtgaatggacagccagccaccacaatgaaagaaatcaaaccaggaataacctatgctgaacccacgcctcaatcgtccccaagtgtttcctgacacgcatctttgcttacagtgcatcacaactgaagaatggggttcaacttgacgcttgcaaaattaccaaataacgagctgcacggccaagagagtcacaattcaggcaacaggagcgacgggccaggaaagaacaccacccttcacaatgaatttgacacaattgtcttgccggtgctttatctcattatatttgtggcaagcatcttgctgaatggtttagcagtgtggatcttcttccacattaggaataaaaccagcttcatattctatctcaaaaacatagtggttgcagacctcataatgacgctgacatttccatttcgaatagtccatgatgcaggatttggaccttggtacttcaagtttattctctgcagatacacttcagttttgttttatgcaaacatgtatacttccatcgtgttccttgggctgataagcattgatcgctatctgaaggtggtcaagccatttggggactctcggatgtacagcataaccttcacgaaggttttatctgtttgtgtttgggtgatcatggctgttttgtctttgccaaacatcatcctaacaaatggtcagccaacagaggacaatatccatgactgctcaaaacttaaaagtcctttgggggtcaaatggcatacggcagtcacctatgtgaacagctgcttgtttgtggccgtgctggtgattctgatcggatgttacatagccatatccaggtacatccacaaatccagcaggcaattcataagtcagtcaagccgaaagcgaaaacataaccagagcatcagggttgttgtggctgtgttttttacctgctttctaccatatcacttgtgcagaattccttttacttttagtcacttagacaggcttttagatgaatctgcacaaaaaatcctatattactgcaaagaaattacacttttcttgtctgcgtgtaatgtttgcctggatccaataatttactttttcatgtgtaggtcattttcaagaaggctgttcaaaaaatcaaatatcagaaccaggagtgaaagcatcagatcactgcaaagtgtgagaagatcggaagttcgcatatattatgattacactgatgtgtaggccttttattgtttgttggaatcgatatgtacaaagtgtaaataaatgtttcttttcattatcctt

SEQ ID NO: 11660 - DNA, 2120 bp, Homo sapiens
  source 1..2120: mol_type = unassigned DNA
agcttgatggcgtcgggctggagagccgcagtcccggctgcagcacctgggagaaggcagaccgtgtgagggggcctgtggccccagcgtgctgtggcctcggggagtgggaagtggaggcaggagccttccttacacttcgccatgagtttcctcatcgactccagcatcatgattacctcccagatactattttttggatttgggtggcttttcttcatgcgccaattgtttaaagactatgagatacgtcagtatgttgtacaggtgatcttctccgtgacgtttgcattttcttgcaccatgtttgagctcatcatctttgaaatcttaggagtattgaatagcagctcccgttattttcactggaaaatgaacctgtgtgtaattctgctgatcctggttttcatggtgcctttttacattggctattttattgtgagcaatatccgactactgcataaacaacgactgcttttttcctgtctcttatggctgacctttatgtatttcttctggaaactaggagatccctttcccattctcagcccaaaacatgggatcttatccatagaacagctcatcagccgggttggtgtgattggagtgactctcatggctcttctttctggatttggtgctgtcaactgcccatacacttacatgtcttacttcctcaggaatgtgactgacacggatattctagccctggaacggcgactgctgcaaaccatggatatgatcataagcaaaaagaaaaggatggcaatggcacggagaacaatgttccagaagggggaagtgcataacaaaccatcaggtttctggggaatgataaaaagtgttaccacttcagcatcaggaagtgaaaatcttactcttattcaacaggaagtggatgctttggaagaattaagcaggcagctttttctggaaacagctgatctatatgctaccaaggagagaatagaatactccaaaaccttcaaggggaaatattttaattttcttggttactttttctctatttactgtgtttggaaaattttcatggctaccatcaatattgtttttgatcgagttgggaaaacggatcctgtcacaagaggcattgagatcactgtgaattatctgggaatccaatttgatgtgaagttttggtcccaacacatttccttcattcttgttggaataatcatcgtcacatccatcagaggattgctgatcactcttaccaagttcttttatgccatctctagcagtaagtcctccaatgtcattgtcctgctattagcacagataatgggcatgtactttgtctcctctgtgctgctgatccgaatgagtatgcctttagaataccgcaccataatcactgaagtccttggagaactgcagttcaacttctatcaccgttggtttgatgtgatcttcctggtcagcgctctctctagcatactcttcctctatttggctcacaaacaggcaccagagaagcaaatggcaccttgaacttaagcctactacagactgttagaggccagtggtttcaaaatttagatataagaggggggaaaaatggaaccagggcctgacattttataaacaaacaaaatgctatggtagcatttttcaccttcatagcatactccttccccgtcaggtgatactatgaccatgagtagcatcagccagaacatgagagggagaactaactcaagacaatactcagcagagagcatcccgtgtggatatgaggctggtgtagaggcggagaggagccaagaaactaaaggtgaaaaatacactggaactctggggcaagacatgtctatggtagctgagccaaacacgtaggatttccgttttaaggttcacatggaaaaggttatagctttgccttgagattgactcattaaaatcagagactgtaacacttttgccttacgttcattttatcaagcatagcttggtatttattatgcttgtgtgatctaacatcagttagcatcccacacctcctcatctgatcctgccccattaaaataaccaagaaagaggttatctgttcttttccgggaaaggggtggtatgcacctgaaatagattttaccaaaaga

SEQ ID NO: 11661 - DNA, 1982 bp, Homo sapiens
  source 1..1982: mol_type = unassigned DNA
atgtagacgctgattggctgactggggcgcagcttgatggcgtcgggctggagagccgcagtcccggctgcagcacctgggagaaggcagaccgtgtgagggggcctgtggccccagcgtgctgtggcctcggggagtgggaagtggaggcaggagccttccttacacttcgccatgagtttcctcatcgactccagcatcatgattacctcccagatactattttttggatttgggtggcttttcttcatgcgccaattgtttaaagactatgagatacgtcagtatgttgtacaggtgatcttctccgtgacgtttgcattttcttgcaccatgtttgagctcatcatctttgaaatcttaggagtattgaatagcagctcccgttattttcactggaaaatgaacctgtgtgtaattctgctgatcctggttttcatggtgcctttttacattggctattttattgtgagcaatatccgactacttttgtctcctctgtctcagtgcataaacaacgactgcttttttcctgtctcttatggctgacctttatgtatttcttctggaaactaggagatccctttcccattctcagcccaaaacatgggatcttatccatagaacagctcatcagccgggttggtgtgattggagtgactctcatggctcttctttctggatttggtgctgtcaactgcccatacacttacatgtcttacttcctcaggaatgtgactgacacggatattctagccctggaacggcgactgctgcaaaccatggatatgatcataagcaaaaagaaaaggatggcaatggcacggagaacaatgttccagaagggggaagtgcataacaaaccatcaggtttctggggaatgataaaaagtgttaccacttcagcatcaggaagtgaaaatcttactcttattcaacaggaagtggatgctttggaagaattaagcaggcagctttttctggaaacagctgatctatatgctaccaaggagagaatagaatactccaaaaccttcaaggggaaatattttaattttcttggttactttttctctatttactgtgtttggaaaattttcatggctaccatcaatattgtttttgatcgagttgggaaaacggatcctgtcacaagaggcattgagatcactgtgaattatctgggaatccaatttgatgtgaagttttggtcccaacacatttccttcattcttgttggaataatcatcgtcacatccatcagaggattgctgatcactcttaccaagttcttttatgccatctctagcagtaagtcctccaatgtcattgtcctgctattagcacagataatgggcatgtactttgtctcctctgtgctgctgatccgaatgagtatgcctttagaataccgcaccataatcactgaagtccttggagaactgcagttcaacttctatcaccgttggtttgatgtgatcttcctggtcagcgctctctctagcatactcttcctctatttggctcacaaacaggcaccagagaagcaaatggcaccttgaacttaagcctactacagactgttagaggccagtggtttcaaaatttagatataagaggggggaaaaatggaaccagggcctgacattttataaacaaacaaaatgctatggtagcatttttcaccttcatagcatactccttccccgtcaggtgatactatgaccatgagtagcatcagccagaacatgagagggagaactaactcaagacaatactcagcagagagcatcccgtgtggatatgaggctggtgtagaggcggagaggagccaagaaactaaaggtgaaaaatacactggaactctggggcaagacatgtctatggtagctgagccaaacacgtaggatttccgttttaaggttcacatggaaaaggttatagctttgccttgagattgactcattaaaatcagagactgt

SEQ ID NO: 11662 - DNA, 1934 bp, Homo sapiens
  source 1..1934: mol_type = unassigned DNA
agcttgacggcgtcgggctggagagccgcagtcccggctgcagcacctgggagaaggcagaccgtgtgagggggcctgtggccccagcgtgctgtggcctccgggagtgggaagtggaggcaggagccttccttacacttcgccatgagtttcctgatcgactccagcatcatgattacctcccagatactattttttggatttgggtggcttttcttcatgcgccaattgtttaaagactatgagatacgtcagtatgttgtacaggtgatcttctccgtgacgtttgcattttcttgcaccatgtttgagctcatcatctttgaaatcttaggagtattgaatagcagctcccgttattttcactggaaaatgaacctgtgtgtaattctgctgatcctggttttcatggtgcctttttacattggctattttattgtgagcaatatccgactactgcataaacaacgactgcttttttcctgtctcttatggctgacctttatgtatttcttctggaaactaggagatccctttcccattctcagcccaaaacatgggatcttatccatagaacagctcatcagccgggttggtgtgattggagtgactctcatggctcttctttctggatttggtgctgtcaactgcccatacacttacatgtcttacttcctcaggaatgtgactgacacggatattctagccctggaacggcgactgctgcaaaccatggatatgatcataagcaaaaagaaaaggatggcaatggcacggagaacaatgttccagaagggggaagtgcataacaaaccatcaggtttctggggaatgataaaaagtgttaccacttcagcatcaggaagtgaaaatcttactcttattcaacaggaagtggatgctttggaagaattaagcaggcagctttttctggaaacagctgatctatatgctaccaaggagagaatagaatactccaaaaccttcaaggggaaatattttaattttcttggttactttttctctatttactgtgtttggaaaattttcatggctaccatcaatattgtttttgatcgagttgggaaaacggatcctgtcacaagaggcattgagatcactgtgaattatctgggaatccaatttgatgtgaagttttggtcccaacacatttccttcattcttgttggaataatcatcgtcacatccatcagaggattgctgatcactcttaccaagttcttttatgccatctctagcagtaagtcctccaatgtcattgtcctgctattagcacagataatgggcatgtactttgtctcctctgtgctgctgatccgaatgagtatgcctttagaataccgcaccataatcactgaagtccttggagaactgcagttcaacttctatcaccgttggtttgatgtgatcttcctggtcagcgctctctctagcatactcttcctctatttggctcacaaacaggcaccagagaagcaaatggcaccttgaacttaagcctactacagactgttagaggccagtggtttcaaaatttagatataagaggggggaaaaatggaaccagggcctgacattttataaacaaacaaaatgctatggtagcatttttcaccttcatagcatactccttccccctcaggtgatactatgaccatgagtagcatcagccagaacatgagagggagaactaactcaagacaatactcagcagagagcatcccgtgtggatatgaggctggtgtagaggcggagaggagccaagaaactaaaggtgaaaaatacactggaactctggggcaagagatgtctatggtagctgagccaaacacgtaggatttccgttttaaggttcacatggaaaaggttatagctttgccttgagattgactcattaaaatcagagactgtaa

SEQ ID NO: 11663 - DNA, 19237 bp, Homo sapiens
  source 1..19237: mol_type = unassigned DNA
atggacattttcttagttttagggatgccctctgcatctttattagtaaatcttctttcagctttactcatcctatttgtgtttggagaaacagaaataagatttactggacaaactgaatttgttgttaatgaaacaagtacaacagttattcgtcttatcattgaaaggataggagagccagcaaatgttactgcaattgtatcgctgtatggagaggacgctggtgacttttttgacacatatgctgcagcttttatacctgccggagaaacaaacagaacagtgtacatagcagtatgtgatgatgacttaccagagcctgacgaaacttttatttttcacttaacattacagaaaccttcagcaaatgtgaagcttggatggccaaggactgttactgtgacaatattatcaaatgacaatgcatttggaattatttcatttaatatgcttccctcaatcgcagtgagtgagcccaagggcagaaatgagtctatgcctcttactctcatcagggaaaagggaacctatggaatggtcatggtgacttttgaggtagagggtggcccaaatccccctgatgaagatttgagtccagttaaaggaaatatcacctttccccctggcagagcaacagtaatttataacttgacagtactcgatgacgaggtaccagaaaatgatgaaatatttttaattcaactgaaaagtgtagaaggaggagctgagattaacacctctaggaattccattgagatcatcattaagaaaaatgatagtcccgtgagattccttcagagtatttatttggttcctgaggaagaccacatactcataattccagtagttcgtggaaaggacaacaatggaaatctgattggatctgatgaatatgaggtttcaatcagttatgctgtcacaactgggaattccacagcacatgcccagcaaaatctggacttcattgatcttcagccaaacacaactgttgtttttccaccttttattcatgaatctcacttgaaatttcaaatagttgatgacaccataccggagattgctgaatcgtttcacattatgttactaaaagataccttacagggagatgctgtgctaataagcccttctgttgtacaagtcaccattaagccaaatgataaaccttatggagtcctttcattcaacagtgttttgtttgaaaggacagttataattgatgaagatagaatatcaagatatgaagaaatcacagtggttagaaatggaggaacccatgggaatgtctctgcgaattgggtgttgacacggaacagcactgatccctcaccagtaacagcagatatcagaccgagctctggagttctccattttgcacaagggcagatgttggcaacaattcctcttactgtggttgatgatgatcttccagaagaggcagaagcttatctacttcaaattctgcctcatacaatacgaggaggtgcagaagtgagcgagccagcggagcttttgttctacattcaggatagtgatgatgtctatggcctaataacattttttcctatggaaaaccagaagattgaaagcagcccaggtgaacgatacttatccttgagttttacaagactaggagggactaaaggagatgtgaggttgctttattctgtactttacattcctgctggagctgtggaccccttgcaagcaaaagaaggcatcttaaatatatcaaggagaaatgacctcatttttccagagcaaaaaactcaagtcactacaaaattaccaataagaaatgatgcattccttcaaaatggagctcactttctagtacagttggaaactgtggagttgttaaacataattcctctaatcccacccataagccctagatttggggaaatctgcaatatttctttactggttactccagccattgcaaatggagaaattggctttctcagcaatcttccaattattttgcatgaaccagaagattttgctgctgaagtggtatacattcccttacatcgggatggaactgatggccaggctactgtctactggagtttgaagccctctggctttaattcaaaagcagtgaccccggatgatataggcccctttaatggctctgttttgtttttatctgggcaaagtgacacaacaatcaacattactatcaaaggtgatgacataccggaaatgaatgaaactgtaacactttctctagacagggttaacgtggaaaaccaagtgctgaaatctggatatactagccgtgacctaattattttggaaaatgatgaccctgggggagtttttgaattttctcctgcttccagaggaccctatgttataaaagaaggagaatctgtagagctccacatcatccgatcaagggggtcccttgttaagcagtttctacactaccgagtagagccaagagatagcaatgaattctatggaaacacgggagtactagaatttaaacctggagaaagggagatagtgatcaccttgctagcaagattggatgggataccagagttggatgaacactactgggtggtcctcagcagccacggagaacgggaaagcaagttgggaagtgccaccattgtcaatataacgattctgaaaaatgatgatcctcatggcattatagaatttgtttctgatggtctaattgtgatgataaatgaaagcaaaggagatgctatctatagtgctgtttatgatgtagtaagaaatcgaggcaactttggtgatgttagtgtatcatgggtggttagtccagactttacacaagatgtatttcctgtacaagggactgttgtctttggagatcaggaattttcaaaaaatatcaccatttactcccttccagatgagattccagaagaaatggaagaatttaccgttatcctactgaatggcactggaggagctaaagtgggaaatagaacaactgcaactctgaggattagaagaaatgatgaccccatttattttgcagaacctcgtgtagtgagggttcaggaaggtgagactgccaactttacagttctcagaaatggatctgttgatgtgacttgcatggtccagtatgctaccaaggatgggaaggctactgcaagagagagagatttcattcctgttgaaaaaggagaaacgctcatttttgaggttggaagtagacagcagagcatatccatatttgttaatgaagatggtatcccggaaacagatgagcccttttatataatcctcttgaattcaacaggtgatacagtagtatatcaatatggagtagctacagtaataattgaagctaatgatgacccaaatggcattttttctctggagcccatagacaaagcagtggaagaaggaaagactaatgcattttggattttgaggcaccgaggatactttggtagtgtttctgtatcttggcagctctttcagaatgattctgctttgcagcctgggcaggagttctatgaaacttcaggaactgttaacttcatggatggagaagaagcaaaaccaatcattctccatgcttttccagataaaattcctgaattcaatgaattttatttcctaaaacttgtaaacatttcaggtggatccccaggtcctgggggccagctagcagaaaccaacctccaggtgacagtaatggttccattcaatgatgatccctttggagtttttatcttggatccagagtgtttagagagagaagtggcagaagatgtcctgtctgaagatgatatgtcttatattaccaacttcaccattttgaggcagcagggtgtgtttggtgatgtacaactgggctgggaaatactgtccagtgagttccctgctggtttgccaccaatgatagattttttactggttggaattttccccaccaccgtgcatttacaacagcacatgcggcgtcaccacagtggaacggatgctttgtactttaccggactagagggtgcatttgggactgttaatccaaaataccatccctccaggaataatacaattgccaactttacattctcagcttgggtaatgcccaatgccaatacgaatggattcattatagcgaaggatgacggtaatggaagcatctactacggggtaaaaatacaaacaaacgaatcccatgtgacactttcccttcattataaaaccttgggttccaatgctacatacattgccaagacaacagtcatgaaatatttagaagaaagtgtttggcttcatctactaattatcctggaggatggtataatcgaattctacctggatggaaatgcaatgcccaggggaatcaagagtctgaaaggagaagccattactgacggtcctgggatactgagaattggagcagggataaatggcaatgacagatttacaggtctgatgcaggatgtgaggtcctatgagcggaaactgacgcttgaagaaatttatgaacttcatgccatgcccgcaaaaagtgatttacacccaatttctggatatctggagttcagacagggagaaactaacaaatcattcattatttctgcaagagatgacaatgacgaggaaggagaagaattattcattcttaaactagtttctgtatatggaggagctcgtatttcggaagaaaatactactgcaagattaacaatacaaaaaagtgacaatgcaaatggcttgtttggtttcacaggagcttgtataccagagattgcagaggagggatcaaccatttcttgtgtggttgagagaaccagaggagctctggattatgtgcatgttttttacaccatttcacagattgaaactgatggcattaattaccttgttgatgactttgctaatgccagtggaactattacattccttccttggcagagatcagaggttctgaatatatatgttcttgatgatgatattcctgaacttaatgagtatttccgtgtgacattggtttctgcaattcctggagatgggaagctaggctcaactcctaccagtggtgcaagcatagatcctgaaaaggaaacgactgatatcaccatcaaagctagtgatcatccatatggcttgctgcagttctccacagggctgcctcctcagcctaaggacgcaatgaccctgcctgcaagcagcgttccacatatcactgtggaggaggaagatggagaaatcaggttattggtcatccgtgcacagggacttctgggaagggtgactgcggaatttagaacagtgtccttgacagcattcagtcctgaggattaccagaatgttgctggcacattagaatttcaaccaggagaaagatataaatacattttcataaacatcactgataattctattcctgaactggaaaaatcttttaaagttgagttgttaaacttggaaggaggagtagctgaactctttagggttgatggaagtggtagtggtgatggggacatggaattcttccttccaactattcacaaacgtgccagtctaggagtggcttcccaaattctagtgacaattgcagcctctgaccacgctcatggcgtatttgaatttagccctgagtcactctttgtcagtggaactgaaccagaagatgggtatagcactgttacattaaatgttataagacatcatggaactctgtctccagtgactttgcattggaacatagactctgatcctgatggtgatctcgccttcacctctggcaacatcacatttgagattgggcagacgagcgccaatatcactgtggagatattgcctgacgaagacccagaactggataaggcattctctgtgtcagtcctcagtgtttccagtggttctttgggagctcatattaatgccacgttaacagttttggctagtgatgatccatatgggatattcattttttctgagaaaaacagacctgttaaagttgaggaagcaacccagaacatcacactatcaataataaggttgaaaggcctcatgggaaaagtccttgtctcatatgcaacactagatgatatggaaaaaccaccttattttccacctaatttagcgagagcaactcaaggaagagactatataccagcttctggatttgctctttttggagctaatcagagtgaggcaacaatagctatttcaattttggatgatgatgagccagaaaggtccgaatctgtctttatcgaactactcaactctactttagtagcgaaagtacagagtcgttcaattccaaattctccacgtcttgggcctaaggtagaaactattgcgcaactaattatcattgccaatgatgatgcatttggaactcttcagctctcagcaccaattgtccgagtggcagaaaatcatgttggacccattatcaatgtgactagaacaggaggagcatttgcagatgtctctgtgaagtttaaagctgtgccaataactgcaatagctggtgaagattatagtatagcttcatcagatgtggtcttgctagaaggggaaaccagtaaagccgtgccaatatatgtcattaatgatatctatcctgaactggaagaatcttttcttgtgcaactgatgaatgaaacaacaggaggagccagactaggggctttaacagaggcagtcattattattgaggcctctgatgacccctatggattatttggttttcagattactaaacttattgtagaggaacctgagtttaactcagtgaaggtaaacctgccaataattcgaaattctgggacactcggcaatgttactgttcagtgggttgccaccattaatggacagcttgctactggcgacctgcgagttgtctcaggtaatgtgacctttgcccctggggaaaccattcaaaccttgttgttagaggtcctggctgacgacgttccggagattgaagaggttatccaagtgcaactaactgatgcctctggtggaggtactattgggttagatcgaattgcaaatattattattcctgccaatgatgatccttatggtacagtagcctttgctcagatggtttatcgtgttcaagagcctctggaaagaagttcctgtgctaatataactgtcaggcgaagcggagggcactttggtcggctgttgttgttctacagtacttccgacattgatgtagtggctctggcaatggaggaaggtcaagatttactgtcctactatgaatctccaattcaaggggtgcctgacccactttggagaacttggatgaatgtctctgccgtgggggagcccctgtatacctgtgccactttgtgccttaaggaacaagcttgctcagcgttttcatttttcagtgcttctgagggtccccagtgtttctggatgacatcatggatcagcccagctgtcaacaattcagacttctggacctacaggaaaaacatgaccagggtagcatctctttttagtggtcaggctgtggctgggagtgactatgagcctgtgacaaggcaatgggccataatgcaggaaggtgatgaattcgcaaatctcacagtgtctattcttcctgatgatttcccagagatggatgagagttttctaatttctctccttgaagttcacctcatgaacatttcagccagtttgaaaaatcagccaaccataggacagccaaatatttctacagttgtcatagcactaaatggtgatgcctttggagtgtttgtgatctacaatattagtcccaatacttccgaagatggcttatttgttgaagttcaggagcagccccaaaccttggtggagctgatgatacacaggacagggggcagcttaggtcaagtggcagtcgaatggcgtgttgttggtggaacagctactgaaggtttagattttataggtgctggagagattctgacctttgctgaaggtgaaaccaaaaagacagtcattttaaccatcttggatgactctgaaccagaggatgacgaaagtatcatagttagtttggtgtacactgaaggtggaagtagaattttgccaagctccgacactgttagagtgaacattttggccaatgacaatgtggcaggaattgttagctttcagacagcttccagatctgtcataggtcatgaaggagaaattttacaattccatgtgataagaactttccctggtcgaggaaatgttactgttaactggaaaattattgggcaaaatctagaactcaattttgctaactttagcggacaacttttctttcctgaggggtcgttgaatacaacattgtttgtgcatttgttggatgacaacattcctgaggagaaagaagtataccaagtcattctgtatgatgtcaggacacaaggagttccaccagccggaatcgccctgcttgatgctcaaggatatgcagctgtcctcacagtagaagccagtgatgaaccacatggagttttaaattttgctctttcatcaagatttgtgttactacaagaggctaacataacaattcagcttttcatcaacagagaatttggatctctaggagctatcaatgtcacatataccacggttcctggaatgctgagtctgaagaaccaaacagtaggaaacctagcagagccagaagttgattttgtccctatcattggctttctgattttagaagaaggggaaacagcagcagccatcaacattaccattcttgaggatgatgtaccagagctagaagaatatttcctggtgaatttaacttacgttggacttaccatggctgcttcaacttcatttcctcccagactagattcagaaggtttgactgcacaagttattattgatgccaatgatggggcccgaggtgtaattgaatggcaacaaagcaggtttgaagtaaatgaaacccatggaagtttaacattggtagcccagaggagcagagaacctcttggccatgtttccttatttgtgtatgctcagaatttggaagcacaagtggggctggattatatcttcaccccaatgattcttcattttgctgatggagaaaggtataaaaatgtcaatatcatgattcttgatgatgacattccagaaggagatgaaaaatttcagctgattttaacaaatccttctcctggactagagctagggaaaaatacaatagccttaattattgtccttgctaatgatgacggccctggagttctatcatttaacaacagtgagcactttttcctaagagagccaacagctctctacgtccaggagagtgttgcagtattgtacattgttcgggaacctgcacaaggattgtttggaacagtgacagttcagttcattgtgacagaagtgaattcctcaaatgaatctaaagatctgactccttccaaaggctatattgttttagaagaaggtgttcgattcaaggccctacaaatatctgccatattagacacggaaccagaaatggatgagtattttgtttgcaccttgtttaatccaactggaggtgctagactaggggtgcatgttcaaaccctgataacagttttgcaaaaccaggcccctttggggctattcagtatctctgcagttgaaaatagagccacctccatagacatcgaagaagccaataggaccgtgtatttaaatgtatctcgaactaatggcattgatttggctgtgagtgtgcagtgggagacagtatctgaaacagcctttggcatgaggggaatggatgttgtgttttccgtatttcaaagttttttggatgaatcagcttctggctggtgtttctttactttggaaaatttaatatatggtataatgttaagaaaatcatctgttactgtttaccgatggcaggggatttttattccagttgaggatttaaatatagaaaatcctaaaacttgtgaggcctttaatattggtttttctccctactttgtgattactcatgaagaaagaaatgaagaaaagccttctcttaacagtgtgtttacattcacatctggatttaaattattcctggtacaaacaatcattattctggaaagttctcaagtaagatattttacttcagacagccaagattatttaatcattgcaagtcaaagagatgattccgaattaactcaggtcttcaggtggaatggaggaagcttcgtgttgcatcaaaaactccctgtccgaggtgtgctgaccgtggccttgttcaacaagggaggctctgtgttcttagccatttcccaggctaatgccaggctaaactcccttttattcagatggtctggcagtgggtttattaactttcaagaggtgcctgtcagtgggacaacagaagttgaggctttgtcttcagccaatgatatttacctaatatttgccgaaaatgtctttctaggagatcagaattcaattgatattttcatctgggagatgggacagtcttccttcaggtattttcagtctgtagattttgctgctgttaacagaatccactccttcacaccagcctcaggaatagcccacatacttcttattggccaagatatgtctgctctttactgctggaattcggagcgtaatcaattctcttttgttctggaagtaccttctgcttatgatgtggcttctgttacagtaaagtcccttaattcaagcaagaatttaatagctctagtgggagctcattcacatatatatgagctagcctacatttccagccattctgactttattcctagttcaggtgaactgatatttgaacctggtgagagagaagctacaatagcagtaaatatccttgatgatacagttccagaaaaagaagaatccttcaaagttcaacttaaaaatcccaaaggaggagcagagattggcattaatgattctgtaacaataaccattctgtctaatgatgatgcctatggaattgttgcatttgctcagaattcattatataagcaagtggaagaaatggagcaagatagcctagtaaccttgaacgttgaacgcttaaaaggaacatatggccgtataaccatagcatgggaagctgatggaagtattagtgatatatttcctacctcaggagtgattttatttactgaaggccaggtactgtcaacaatcactctaactattcttgctgataatataccagagttatcagaggttgtgattgtaaccctcacccgtatcaccacagaaggggttgaggactcatacaaaggtgctactattgatcaggacagaagcaagtctgttataacaactttgcccaatgactcaccttttggcttggtgggctggcgtgctgcgtctgtcttcattagagtagcagagcctaaagaaaacaccaccactcttcagttacaaatagctcgagataaaggactacttggggatattgccattcacttgagagctcaacccaatttcttactgcatgtcgataatcaagctactgagaatgaagattatgtattgcaagaaacaataataataatgaaagaaaacataaaagaagctcatgccgaagtttccattttgccggatgaccttcctgaattggaggaaggatttattgtcactatcactgaggtgaacctggtgaactctgacttctctacaggacagccaagtgtgcggaggcccggaatggaaatagctgagataatgatagaagaaaatgacgatcccagaggaatttttatgtttcatgttactagaggcgctggggaagttattactgcctatgaggtgcctccacccttgaacgttcttcaagttcctgtagtccggctggctggaagctttggggcagtaaatgtttattggaaagcatcaccagacagtgctggcctggaagactttaaaccatctcatgggattcttgaatttgcagataaacaggttactgcaatgatagaaatcaccataattgatgatgctgaatttgaattgacagagacgttcaatatttccttgatcagtgttgctggaggtggcagacttggtgatgatgttgtggtaactgttgttattccacaaaatgattctccatttggagtatttggatttgaagaaaagactgtaatgattgatgaatccctttcatccgatgaccctgattcatatgtgacattgacggttgtccggtccccaggaggaaaaggaaccgtccgacttgagtggaccatagatgagaaggctaaacataaccttagtcctttgaatgggacccttcattttgatgagactgagtcccagaagaccattgtgttgcacacacttcaagacacagtgttggaggaggacaggcgtttcaccattcagctgatatcaattgatgaggtagaaatatctccagtaaaaggtagtgcatcaataattattcggggtgataagcgagcatcaggagaagttgggatagctccgtcatctaggcacatcctcattggggaaccctcagcaaaatataatggtaccgctattatcagccttgttcgaggcccagggattttgggggaggtcacagtgttctggaggatattccctccttccgtgggggaatttgctgaaacatcaggaaaactgacaatgcgagacgaacagtctgcagtcattgtagtaatacaggctttgaacgatgacattcccgaggaaaaaagcttctatgagtttcagctcactgcagtcagtgagggaggagttctgagtgaatccagcagcactgccaacatcacggtggtggccagcgactctccctatggccgatttgccttttcacatgagcaacttcgagtgtcagaagcacagagggttaacatcacaatcatccgttccagtggagattttggccatgtgcgactctggtacaagacgatgagcgggacagcggaagcaggcttggattttgttcctgcagcaggggagctcctctttgaagcaggggagatgaggaaaagtctgcatgttgaaatccttgatgatgactatcctgaaggcccagaggaattttctctaacaattacaaaggtggaactccagggaagagggtatgattttaccattcaagaaaatggacttcagatagatcaacctcctgaaataggaaacatctccattgttcgcatcataataatgaaaaatgataacgcagaaggcatcattgaatttgacccaaagtatactgccttcgaagtggaggaagatgttgggctgatcatgatcccagtggtgaggctacatggaacttatggctatgtgacagctgatttcatctctcagagctcctctgccagtcccggaggtgttgattacattttgcatggcagtacagtcacctttcagcatgggcaaaacttaagttttataaatatctccatcattgatgacaatgaaagtgaatttgaggagcccattgaaattctactcactggagctactggaggagcggtccttgggcgccacctagtgagcagaatcataatagctaagagtgactctccctttggagttataaggtttctcaatcaaagcaaaatttctattgctaatcccaattccacaatgattttatcactggtgctggagcggactggaggactcttgggagagattcaggtgaactgggagacagtaggacccaactctcaagaagccttactgccacagaatagagacattgcagacccagtgagcgggttgttctattttggagaaggagaaggaggagtgagaaccataattctgacaatctatcctcatgaagaaattgaagttgaagagacattcattattaaacttcatcttgtgaaaggagaagctaaattagactccagagctaaagatgttacattaaccatacaagagtttggtgacccaaatggagttgttcagtttgctcctgaaactttgtctaagaagacttattcagagcctctggctctggaagggcccctgctcattaccttctttgtcagaagagtcaagggcacctttggagagattatggtttactgggaattaagtagtgagtttgacattactgaagactttctttccaccagtggatttttcaccattgctgatggagagagtgaagctagctttgatgttcatttgctaccagatgaggtacctgagatagaggaagattatgtgatccagcttgtttctgtagagggaggagccgaactggatctggagaagagtatcacatggttctctgtttatgcaaatgatgacccacatggagtatttgccctgtattcggatcgccagtcaatacttattgggcagaaccttattagatccatccaaattaacataacccggcttgctggaacatttggagatgtggctgttgggcttcgaatatcatcggatcataaagaacagccgattgttaccgaaaatgcagagaggcagctggtggtcaaagatggtgccacatataaagtggacgtggtgccaataaagaatcaggtcttcctatcactgggctctaatttcactttgcaactggtgactgtgatgcttgtcggtggacgtttctatggaatgccaacaattcttcaggaagcaaaatctgctgtccttccagtctctgagaaagctgccaattctcaggtcggatttgaatccactgcttttcaactcatgaacatcactgctggcacaagccacgttatgatttctaggagaggcacatatggagctctctcggttgcctggaccactggatatgctcctgggttagaaattcctgaattcattgttgttggcaacatgaccccaacactggggagcctttcattttcccacggtgaacaaaggaaaggagttttcctgtggacgtttcctagccctggttggccagaggcctttgttcttcacctatcaggagtgcagagcagtgctcctggcggagctcaactccgatcaggtttcattgttgctgaaattgaaccaatgggcgtcttccaattttccactagctcaagaaatatcatagtgtcagaagatacacagatgatcagattacatgtacaaagactatttgggttccacagcgatcttattaaagtttcttatcagaccactgcaggaagcgccaagccactggaagattttgagcctgttcagaatggggaactgttttttcaaaaattccaaactgaggttgattttgaaataaccattattaatgatcagctttctgagatagaagaatttttttacattaaccttacttcagtagaaattaggggattacaaaagtttgatgttaattggagcccacgcctgaatctagatttcagtgttgcagtgattacaatattggataatgatgacctggcaggaatggatatttccttccccgagacaactgtggctgtagcagttgacacaactctcattcctgtagaaactgaatccaccacatacctcagcacaagcaagacgactaccattctgcagccaaccaacgtggttgccattgttactgaggcaactggtgtatctgccatccctgagaaacttgtcacccttcatggcacacctgctgtgtctgaaaagcctgatgtggccactgtaactgccaatgtttccattcatggaacattcagccttgggccatccattgtttatattgaagaggagatgaagaatggcacattcaacactgcagaagttcttatccgaagaactggtgggtttactggcaatgtcagcataacagttaaaactttcggtgaaagatgtgctcagatggaaccaaatgcattgccctttcgtggtatctatgggatttccaacctaacatgggcagttgaagaagaagactttgaagaacaaactcttacccttatattcctagatggagaaagagaacgtaaagtatcagttcaaattttggatgatgatgagcctgaggggcaggaattcttctacgtgtttctcacaaaccctcaagggggagcacagattgtggaggagaaggatgatactggatttgcagcttttgccatggttattattacagggagtgaccttcacaatggcatcataggattcagtgaggagtcccagagtggactagaactcagggaaggagctgttatgagaagattgcaccttattgtcacaagacagccaaacagggcctttgaagatgtcaaggtcttttggcgagtcacacttaacaaaacagtcgtcgtgctccagaaggatggggtaaacctggtggaggaacttcagtctgtgtcagggaccacaacctgtacaatgggtcaaacaaaatgctttatcagcattgaactcaaaccagaaaaggtaccacaggttgaagtgtatttttttgtggaactatatgaagctactgctggagcagcaataaacaacagtgccagattcgcacagattaaaatcttagaaagtgatgaatctcaaagccttgtgtatttttctgtgggttctcggctggcagtggctcacaagaaggccactttaatcagtctgcaggtggccagagattctgggacaggactaatgatgtctgttaactttagtacccaggagttgaggagtgctgaaacaattggtcgtaccatcatatctccagctatttctggaaaggattttgtgataactgaaggcacattggtctttgaacctggccagagaagcactgtattggatgtcatcctaacgccagagacaggatctttaaattcatttcctaaacgcttccagattgtcctttttgacccaaaaggtggtgccagaattgataaagtgtatgggactgccaacatcactcttgtctcagatgcagattcgcaggccatttgggggcttgcagatcagctacatcagcctgtgaatgatgatattctcaacagagtgctccataccatcagcatgaaagtggccacagaaaacacagatgaacaactcagtgccatgatgcatttaatagaaaagataactactgaaggaaaaattcaagctttcagtgttgccagccgaactcttttctatgagattctttgttctcttattaacccaaagcgcaaggacactaggggattcagtcactttgctgaagtgactgagaattttgccttttctctgctgactaatgttacttgcggctctcctggtgaaaaaagcaaaaccatccttgatagttgcccatatttgtcaatattggctcttcactggtatcctcagcaaatcaatggacacaagtttgaaggaaaggaaggagattacattcgaattccagagaggctactggatgtccaggatgcagaaataatggctgggaaaagtacatgtaaattagtccagtttacagagtatagcagccaacagtggtttataagtggaaacaatcttcctaccctaaaaaataaggtattatctttgagtgtgaaaggtcagagttcacaactcctgactaatgacaatgaggttctctacaggatttatgctgctgagcctagaattattcctcagacatctctgtgtctcctttggaatcaggctgctgcaagctggttgtctgacagtcagttttgcaaagtggttgaggaaactgcagactatgtggaatgtgcctgttcacacatgtctgtgtatgctgtctatgctcggactgacaacttgtcttcatacaatgaagccttcttcacttctggatttatatgtatctcaggtctttgcttggctgttctttcccatatcttctgtgccaggtactccatgtttgcagctaaacttctgactcacatgatggcagccagcttaggtacacagattctgtttctggcgtctgcatacgcaagtccccaactcgctgaggagagctgttcagctatggctgctgtcacacattacctgtatctttgccagtttagctggatgctcattcagtctgtgaatttctggtacgtgctggtgatgaatgatgagcacacagagaggcgatatctgctgtttttccttctgagttggggactaccagcttttgtggtgattctcctcatagttattttgaaaggaatctatcatcagagcatgtcacagatctatggactcattcatggtgacctgtgttttattccaaacgtctatgctgctttgttcactgcagctcttgttcctttgacgtgcctcgtggtggtgttcgtggtgttcatccatgcctaccaggtgaagccacagtggaaagcatatgatgatgtcttcagaggaaggacaaatgctgcagaaattccactgattttatatctctttgctctgatttccgtgacatggctttggggaggactacacatggcctacagacacttctggatgttggttctctttgtcattttcaacagtctgcagggactttatgttttcatggtttatttcattttacacaaccaaatgtgttgccctatgaaggccagttacactgtggaaatgaatgggcatcctggacccagcacagcctttttcacgcccgggagtggaatgcctcctgctggaggggaaatcagcaagtccacccagaatctcatcggtgctatggaggaggtgccacctgactgggagagagcatccttccaacagggcagtcaggccagccctgatttaaagccaagtccacaaaatggagccacgttcccgtcctctggaggatatggccaggggtcactgatagccgatgaggagtcccaggagtttgatgatttaatatttgcattaaaaactggtgctggtctcagtgtcagtgataatgaatctggtcaaggcagccaggaggggggcaccttgactgactcccagatcgtggagctcaggaggatacccatcgccgacactcacctgtagcacctcactaaccattcgactgagcacactttcatatttgtatcagcttttgtgctaaaactctctaagtacatccacctgtgtaataggaacctgtgaattgtactggatgattaatacaaacgtgattgttgtatttggagtataaattactgattgtatgtgacctgaaaattcactgctataagaaaggtggagtcagtttgtatcagttaataggatgttcatattccaaggatattagttgtttttttaatcatcctatatggctaacattgtttaatgaaagtaataatcaataaagcaatagaatcta

SEQ ID NO: 11664 - DNA, 19184 bp, Homo sapiens
  source 1..19184: mol_type = unassigned DNA
gtagatgtatttatgtttttagggatgccctctgcatctttattagtaaatcttctttcagctttactcatcctatttgtgtttggagaaacagaaataagatttactggacaaactgaatttgttgttaatgaaacaagtacaacagttattcgtcttatcattgaaaggataggagagccagcaaatgttactgcaattgtatcgctgtatggagaggacgctggtgacttttttgacacatatgctgcagcttttatacctgccggagaaacaaacagaacagtgtacatagcagtatgtgatgatgacttaccagagcctgacgaaacttttatttttcacttaacattacagaaaccttcagcaaatgtgaagcttggatggccaaggactgttactgtgacaatattatcaaatgacaatgcatttggaattatttcatttaatatgcttccctcaatcgcagtgagtgagcccaagggcagaaatgagtctatgcctcttactctcatcagggaaaagggaacctatggaatggtcatggtgacttttgaggtagagggtggcccaaatccccctgatgaagatttgagtccagttaaaggaaatatcacctttccccctggcagagcaacagtaatttataacttgacagtactcgatgacgaggtaccagaaaatgatgaaatatttttaattcaactgaaaagtgtagaaggaggagctgagattaacacctctaggaattccattgagatcatcattaagaaaaatgatagtcccgtgagattccttcagagtatttatttggttcctgaggaagaccacatactcataattccagtagttcgtggaaaggacaacaatggaaatctgattggatctgatgaatatgaggtttcaatcagttatgctgtcacaactgggaattccacagcacatgcccagcaaaatctggacttcattgatcttcagccaaacacaactgttgtttttccaccttttattcatgaatctcacttgaaatttcaaatagttgatgacaccataccggagattgctgaatcgtttcacattatgttactaaaagataccttacagggagatgctgtgctaataagcccttctgttgtacaagtcaccattaagccaaatgataaaccttatggagtcctttcattcaacagtgttttgtttgaaaggacagttataattgatgaagatagaatatcaagatatgaagaaatcacagtggttagaaatggaggaacccatgggaatgtctctgcgaattgggtgttgacacggaacagcactgatccctcaccagtaacagcagatatcagaccgagctctggagttctccattttgcacaagggcagatgttggcaacaattcctcttactgtggttgatgatgatcttccagaagaggcagaagcttatctacttcaaattctgcctcatacaatacgaggaggtgcagaagtgagcgagccagcggagcttttgttctacattcaggatagtgatgatgtctatggcctaataacattttttcctatggaaaaccagaagattgaaagcagcccaggtgaacgatacttatccttgagttttacaagactaggagggactaaaggagatgtgaggttgctttattctgtactttacattcctgctggagctgtggaccccttgcaagcaaaagaaggcatcttaaatatatcaaggagaaatgacctcatttttccagagcaaaaaactcaagtcactacaaaattaccaataagaaatgatgcattccttcaaaatggagctcactttctagtacagttggaaactgtggagttgttaaacataattcctctaatcccacccataagccctagatttggggaaatctgcaatatttctttactggttactccagccattgcaaatggagaaattggctttctcagcaatcttccaattattttgcatgaaccagaagattttgctgctgaagtggtatacattcccttacatcgggatggaactgatggccaggctactgtctactggagtttgaagccctctggctttaattcaaaagcagtgaccccggatgatataggcccctttaatggctctgttttgtttttatctgggcaaagtgacacaacaatcaacattactatcaaaggtgatgacataccggaaatgaatgaaactgtaacactttctctagacagggttaacgtggaaaaccaagtgctgaaatctggatatactagccgtgacctaattattttggaaaatgatgaccctgggggagtttttgaattttctcctgcttccagaggaccctatgttataaaagaaggagaatctgtagagctccacatcatccgatcaagggggtcccttgttaagcagtttctacactaccgagtagagccaagagatagcaatgaattctatggaaacacgggagtactagaatttaaacctggagaaagggagatagtgatcaccttgctagcaagattggatgggataccagagttggatgaacactactgggtggtcctcagcagccacggagaacgggaaagcaagttgggaagtgccaccattgtcaatataacgattctgaaaaatgatgatcctcatggcattatagaatttgtttctgatggtctaattgtgatgataaatgaaagcaaaggagatgctatctatagtgctgtttatgatgtagtaagaaatcgaggcaactttggtgatgttagtgtatcatgggtggttagtccagactttacacaagatgtatttcctgtacaagggactgttgtctttggagatcaggaattttcaaaaaatatcaccatttactcccttccagatgagattccagaagaaatggaagaatttaccgttatcctactgaatggcactggaggagctaaagtgggaaatagaacaactgcaactctgaggattagaagaaatgatgaccccatttattttgcagaacctcgtgtagtgagggttcaggaaggtgagactgccaactttacagttctcagaaatggatctgttgatgtgacttgcatggtccagtatgctaccaaggatgggaaggctactgcaagagagagagatttcattcctgttgaaaaaggagaaacgctcatttttgaggttggaagtagacagcagagcatatccatatttgttaatgaagatggtatcccggaaacagatgagcccttttatataatcctcttgaattcaacaggtgatacagtagtatatcaatatggagtagctacagtaataattgaagctaatgatgacccaaatggcattttttctctggagcccatagacaaagcagtggaagaaggaaagactaatgcattttggattttgaggcaccgaggatactttggtagtgtttctgtatcttggcagctctttcagaatgattctgctttgcagcctgggcaggagttctatgaaacttcaggaactgttaacttcatggatggagaagaagcaaaaccaatcattctccatgcttttccagataaaattcctgaattcaatgaattttatttcctaaaacttgtaaacatttcaggtggatccccaggtcctgggggccagctagcagaaaccaacctccaggtgacagtaatggttccattcaatgatgatccctttggagtttttatcttggatccagagtgtttagagagagaagtggcagaagatgtcctgtctgaagatgatatgtcttatattaccaacttcaccattttgaggcagcagggtgtgtttggtgatgtacaactgggctgggaaatactgtccagtgagttccctgctggtttgccaccaatgatagattttttactggttggaattttccccaccaccgtgcatttacaacagcacatgcggcgtcaccacagtggaacggatgctttgtactttaccggactagagggtgcatttgggactgttaatccaaaataccatccctccaggaataatacaattgccaactttacattctcagcttgggtaatgcccaatgccaatacgaatggattcattatagcgaaggatgacggtaatggaagcatctactacggggtaaaaatacaaacaaacgaatcccatgtgacactttcccttcattataaaaccttgggttccaatgctacatacattgccaagacaacagtcatgaaatatttagaagaaagtgtttggcttcatctactaattatcctggaggatggtataatcgaattctacctggatggaaatgcaatgcccaggggaatcaagagtctgaaaggagaagccattactgacggtcctgggatactgagaattggagcagggataaatggcaatgacagatttacaggtctgatgcaggatgtgaggtcctatgagcggaaactgacgcttgaagaaatttatgaacttcatgccatgcccgcaaaaagtgatttacacccaatttctggatatctggagttcagacagggagaaactaacaaatcattcattatttctgcaagagatgacaatgacgaggaaggagaagaattattcattcttaaactagtttctgtatatggaggagctcgtatttcggaagaaaatactactgcaagattaacaatacaaaaaagtgacaatgcaaatggcttgtttggtttcacaggagcttgtataccagagattgcagaggagggatcaaccatttcttgtgtggttgagagaaccagaggagctctggattatgtgcatgttttttacaccatttcacagattgaaactgatggcattaattaccttgttgatgactttgctaatgccagtggaactattacattccttccttggcagagatcagaggttctgaatatatatgttcttgatgatgatattcctgaacttaatgagtatttccgtgtgacattggtttctgcaattcctggagatgggaagctaggctcaactcctaccagtggtgcaagcatagatcctgaaaaggaaacgactgatatcaccatcaaagctagtgatcatccatatggcttgctgcagttctccacagggctgcctcctcagcctaaggacgcaatgaccctgcctgcaagcagcgttccacatatcactgtggaggaggaagatggagaaatcaggttattggtcatccgtgcacagggacttctgggaagggtgactgcggaatttagaacagtgtccttgacagcattcagtcctgaggattaccagaatgttgctggcacattagaatttcaaccaggagaaagatataaatacattttcataaacatcactgataattctattcctgaactggaaaaatcttttaaagttgagttgttaaacttggaaggaggagtagctgaactctttagggttgatggaagtggtagtggtgatggggacatggaattcttccttccaactattcacaaacgtgccagtctaggagtggcttcccaaattctagtgacaattgcagcctctgaccacgctcatggcgtatttgaatttagccctgagtcactctttgtcagtggaactgaaccagaagatgggtatagcactgttacattaaatgttataagacatcatggaactctgtctccagtgactttgcattggaacatagactctgatcctgatggtgatctcgccttcacctctggcaacatcacatttgagattgggcagacgagcgccaatatcactgtggagatattgcctgacgaagacccagaactggataaggcattctctgtgtcagtcctcagtgtttccagtggttctttgggagctcatattaatgccacgttaacagttttggctagtgatgatccatatgggatattcattttttctgagaaaaacagacctgttaaagttgaggaagcaacccagaacatcacactatcaataataaggttgaaaggcctcatgggaaaagtccttgtctcatatgcaacactagatgatatggaaaaaccaccttattttccacctaatttagcgagagcaactcaaggaagagactatataccagcttctggatttgctctttttggagctaatcagagtgaggcaacaatagctatttcaattttggatgatgatgagccagaaaggtccgaatctgtctttatcgaactactcaactctactttagtagcgaaagtacagagtcgttcaattccaaattctccacgtcttgggcctaaggtagaaactattgcgcaactaattatcattgccaatgatgatgcatttggaactcttcagctctcagcaccaattgtccgagtggcagaaaatcatgttggacccattatcaatgtgactagaacaggaggagcatttgcagatgtctctgtgaagtttaaagctgtgccaataactgcaatagctggtgaagattatagtatagcttcatcagatgtggtcttgctagaaggggaaaccagtaaagccgtgccaatatatgtcattaatgatatctatcctgaactggaagaatcttttcttgtgcaactgatgaatgaaacaacaggaggagccagactaggggctttaacagaggcagtcattattattgaggcctctgatgacccctatggattatttggttttcagattactaaacttattgtagaggaacctgagtttaactcagtgaaggtaaacctgccaataattcgaaattctgggacactcggcaatgttactgttcagtgggttgccaccattaatggacagcttgctactggcgacctgcgagttgtctcaggtaatgtgacctttgcccctgggatgtcaagttatccaagtgcaactaactgatgcctctggtggaggtactattgggttagatcgaattgcaaatattattattcctgccaatgatgatccttatggtacagtagcctttgctcagatggtttatcgtgttcaagagcctctggaaagaagttcctgtgctaatataactgtcaggcgaagcggagggcactttggtcggctgttgttgttctacagtacttccgacattgatgtagtggctctggcaatggaggaaggtcaagatttactgtcctactatgaatctccaattcaaggggtgcctgacccactttggagaacttggatgaatgtctctgccgtgggggagcccctgtatacctgtgccactttgtgccttaaggaacaagcttgctcagcgttttcatttttcagtgcttctgagggtccccagtgtttctggatgacatcatggatcagcccagctgtcaacaattcagacttctggacctacaggaaaaacatgaccagggtagcatctctttttagtggtcaggctgtggctgggagtgactatgagcctgtgacaaggcaatgggccataatgcaggaaggtgatgaattcgcaaatctcacagtgtctattcttcctgatgatttcccagagatggatgagagttttctaatttctctccttgaagttcacctcatgaacatttcagccagtttgaaaaatcagccaaccataggacagccaaatatttctacagttgtcatagcactaaatggtgatgcctttggagtgtttgtgatctacaatattagtcccaatacttccgaagatggcttatttgttgaagttcaggagcagccccaaaccttggtggagctgatgatacacaggacagggggcagcttaggtcaagtggcagtcgaatggcgtgttgttggtggaacagctactgaaggtttagattttataggtgctggagagattctgacctttgctgaaggtgaaaccaaaaagacagtcattttaaccatcttggatgactctgaaccagaggatgacgaaagtatcatagttagtttggtgtacactgaaggtggaagtagaattttgccaagctccgacactgttagagtgaacattttggccaatgacaatgtggcaggaattgttagctttcagacagcttccagatctgtcataggtcatgaaggagaaattttacaattccatgtgataagaactttccctggtcgaggaaatgttactgttaactggaaaattattgggcaaaatctagaactcaattttgctaactttagcggacaacttttctttcctgaggggtcgttgaatacaacattgtttgtgcatttgttggatgacaacattcctgaggagaaagaagtataccaagtcattctgtatgatgtcaggacacaaggagttccaccagccggaatcgccctgcttgatgctcaaggatatgcagctgtcctcacagtagaagccagtgatgaaccacatggagttttaaattttgctctttcatcaagatttgtgttactacaagaggctaacataacaattcagcttttcatcaacagagaatttggatctctaggagctatcaatgtcacatataccacggttcctggaatgctgagtctgaagaaccaaacagtaggaaacctagcagagccagaagttgattttgtccctatcattggctttctgattttagaagaaggggaaacagcagcagccatcaacattaccattcttgaggatgatgtaccagagctagaagaatatttcctggtgaatttaacttacgttggacttaccatggctgcttcaacttcatttcctcccagactagattcagaaggtttgactgcacaagttattattgatgccaatgatggggcccgaggtgtaattgaatggcaacaaagcaggtttgaagtaaatgaaacccatggaagtttaacattggtagcccagaggagcagagaacctcttggccatgtttccttatttgtgtatgctcagaatttggaagcacaagtggggctggattatatcttcaccccaatgattcttcattttgctgatggagaaaggtataaaaatgtcaatatcatgattcttgatgatgacattccagaaggagatgaaaaatttcagctgattttaacaaatccttctcctggactagagctagggaaaaatacaatagccttaattattgtccttgctaatgatgacggccctggagttctatcatttaacaacagtgagcactttttcctaagagagccaacagctctctacgtccaggagagtgttgcagtattgtacattgttcgggaacctgcacaaggattgtttggaacagtgacagttcagttcattgtgacagaagtgaattcctcaaatgaatctaaagatctgactccttccaaaggctatattgttttagaagaaggtgttcgattcaaggccctacaaatatctgccatattagacacggaaccagaaatggatgagtattttgtttgcaccttgtttaatccaactggaggtgctagactaggggtgcatgttcaaaccctgataacagttttgcaaaaccaggcccctttggggctattcagtatctctgcagttgaaaatagagccacctccatagacatcgaagaagccaataggaccgtgtatttaaatgtatctcgaactaatggcattgatttggctgtgagtgtgcagtgggagacagtatctgaaacagcctttggcatgaggggaatggatgttgtgttttccgtatttcaaagttttttggatgaatcagcttctggctggtgtttctttactttggaaaatttaatatatggtataatgttaagaaaatcatctgttactgtttaccgatggcaggggatttttattccagttgaggatttaaatatagaaaatcctaaaacttgtgaggcctttaatattggtttttctccctactttgtgattactcatgaagaaagaaatgaagaaaagccttctcttaacagtgtgtttacattcacatctggatttaaattattcctggtacaaacaatcattattctggaaagttctcaagtaagatattttacttcagacagccaagattatttaatcattgcaagtcaaagagatgattccgaattaactcaggtcttcaggtggaatggaggaagcttcgtgttgcatcaaaaactccctgtccgaggtgtgctgaccgtggccttgttcaacaagggaggctctgtgttcttagccatttcccaggctaatgccaggctaaactcccttttattcagatggtctggcagtgggtttattaactttcaagaggtgcctgtcagtgggacaacagaagttgaggctttgtcttcagccaatgatatttacctaatatttgccgaaaatgtctttctaggagatcagaattcaattgatattttcatctgggagatgggacagtcttccttcaggtattttcagtctgtagattttgctgctgttaacagaatccactccttcacaccagcctcaggaatagcccacatacttcttattggccaagatatgtctgctctttactgctggaattcggagcgtaatcaattctcttttgttctggaagtaccttctgcttatgatgtggcttctgttacagtaaagtcccttaattcaagcaagaatttaatagctctagtgggagctcattcacatatatatgagctagcctacatttccagccattctgactttattcctagttcaggtgaactgatatttgaacctggtgagagagaagctacaatagcagtaaatatccttgatgatacagttccagaaaaagaagaatccttcaaagttcaacttaaaaatcccaaaggaggagcagagattggcattaatgattctgtaacaataaccattctgtctaatgatgatgcctatggaattgttgcatttgctcagaattcattatataagcaagtggaagaaatggagcaagatagcctagtaaccttgaacgttgaacgcttaaaaggaacatatggccgtataaccatagcatgggaagctgatggaagtattagtgatatatttcctacctcaggagtgattttatttactgaaggccaggtactgtcaacaatcactctaactattcttgctgataatataccagagttatcagaggttgtgattgtaaccctcacccgtatcaccacagaaggggttgaggactcatacaaaggtgctactattgatcaggacagaagcaagtctgttataacaactttgcccaatgactcaccttttggcttggtgggctggcgtgctgcgtctgtcttcattagagtagcagagcctaaagaaaacaccaccactcttcagttacaaatagctcgagataaaggactacttggggatattgccattcacttgagagctcaacccaatttcttactgcatgtcgataatcaagctactgagaatgaagattatgtattgcaagaaacaataataataatgaaagaaaacataaaagaagctcatgccgaagtttccattttgccggatgaccttcctgaattggaggaaggatttattgtcactatcactgaggtgaacctggtgaactctgacttctctacaggacagccaagtgtgcggaggcccggaatggaaatagctgagataatgatagaagaaaatgacgatcccagaggaatttttatgtttcatgttactagaggcgctggggaagttattactgcctatgaggtgcctccacccttgaacgttcttcaagttcctgtagtccggctggctggaagctttggggcagtaaatgtttattggaaagcatcaccagacagtgctggcctggaagactttaaaccatctcatgggattcttgaatttgcagataaacaggttactgcaatgatagaaatcaccataattgatgatgctgaatttgaattgacagagacgttcaatatttccttgatcagtgttgctggaggtggcagacttggtgatgatgttgtggtaactgttgttattccacaaaatgattctccatttggagtatttggatttgaagaaaagactgtaatgattgatgaatccctttcatccgatgaccctgattcatatgtgacattgacggttgtccggtccccaggaggaaaaggaaccgtccgacttgagtggaccatagatgagaaggctaaacataaccttagtcctttgaatgggacccttcattttgatgagactgagtcccagaagaccattgtgttgcacacacttcaagacacagtgttggaggaggacaggcgtttcaccattcagctgatatcaattgatgaggtagaaatatctccagtaaaaggtagtgcatcaataattattcggggtgataagcgagcatcaggagaagttgggatagctccgtcatctaggcacatcctcattggggaaccctcagcaaaatataatggtaccgctattatcagccttgttcgaggcccagggattttgggggaggtcacagtgttctggaggatattccctccttccgtgggggaatttgctgaaacatcaggaaaactgacaatgcgagacgaacagtctgcagtcattgtagtaatacaggctttgaacgatgacattcccgaggaaaaaagcttctatgagtttcagctcactgcagtcagtgagggaggagttctgagtgaatccagcagcactgccaacatcacggtggtggccagcgactctccctatggccgatttgccttttcacatgagcaacttcgagtgtcagaagcacagagggttaacatcacaatcatccgttccagtggagattttggccatgtgcgactctggtacaagacgatgagcgggacagcggaagcaggcttggattttgttcctgcagcaggggagctcctctttgaagcaggggagatgaggaaaagtctgcatgttgaaatccttgatgatgactatcctgaaggcccagaggaattttctctaacaattacaaaggtggaactccagggaagagggtatgattttaccattcaagaaaatggacttcagatagatcaacctcctgaaataggaaacatctccattgttcgcatcataataatgaaaaatgataacgcagaaggcatcattgaatttgacccaaagtatactgccttcgaagtggaggaagatgttgggctgatcatgatcccagtggtgaggctacatggaacttatggctatgtgacagctgatttcatctctcagagctcctctgccagtcccggaggtgttgattacattttgcatggcagtacagtcacctttcagcatgggcaaaacttaagttttataaatatctccatcattgatgacaatgaaagtgaatttgaggagcccattgaaattctactcactggagctactggaggagcggtccttgggcgccacctagtgagcagaatcataatagctaagagtgactctccctttggagttataaggtttctcaatcaaagcaaaatttctattgctaatcccaattccacaatgattttatcactggtgctggagcggactggaggactcttgggagagattcaggtgaactgggagacagtaggacccaactctcaagaagccttactgccacagaatagagacattgcagacccagtgagcgggttgttctattttggagaaggagaaggaggagtgagaaccataattctgacaatctatcctcatgaagaaattgaagttgaagagacattcattattaaacttcatcttgtgaaaggagaagctaaattagactccagagctaaagatgttacattaaccatacaagagtttggtgacccaaatggagttgttcagtttgctcctgaaactttgtctaagaagacttattcagagcctctggctctggaagggcccctgctcattaccttctttgtcagaagagtcaagggcacctttggagagattatggtttactgggaattaagtagtgagtttgacattactgaagactttctttccaccagtggatttttcaccattgctgatggagagagtgaagctagctttgatgttcatttgctaccagatgaggtacctgagatagaggaagattatgtgatccagcttgtttctgtagagggaggagccgaactggatctggagaagagtatcacatggttctctgtttatgcaaatgatgacccacatggagtatttgccctgtattcggatcgccagtcaatacttattgggcagaaccttattagatccatccaaattaacataacccggcttgctggaacatttggagatgtggctgttgggcttcgaatatcatcggatcataaagaacagccgattgttaccgaaaatgcagagaggcagctggtggtcaaagatggtgccacatataaagtggacgtggtgccaataaagaatcaggtcttcctatcactgggctctaatttcactttgcaactggtgactgtgatgcttgtcggtggacgtttctatggaatgccaacaattcttcaggaagcaaaatctgctgtccttccagtctctgagaaagctgccaattctcaggtcggatttgaatccactgcttttcaactcatgaacatcactgctggcacaagccacgttatgatttctaggagaggcacatatggagctctctcggttgcctggaccactggatatgctcctgggttagaaattcctgaattcattgttgttggcaacatgaccccaacactggggagcctttcattttcccacggtgaacaaaggaaaggagttttcctgtggacgtttcctagccctggttggccagaggcctttgttcttcacctatcaggagtgcagagcagtgctcctggcggagctcaactccgatcaggtttcattgttgctgaaattgaaccaatgggcgtcttccaattttccactagctcaagaaatatcatagtgtcagaagatacacagatgatcagattacatgtacaaagactatttgggttccacagcgatcttattaaagtttcttatcagaccactgcaggaagcgccaagccactggaagattttgagcctgttcagaatggggaactgttttttcaaaaattccaaactgaggttgattttgaaataaccattattaatgatcagctttctgagatagaagaatttttttacattaaccttacttcagtagaaattaggggattacaaaagtttgatgttaattggagcccacgcctgaatctagatttcagtgttgcagtgattacaatattggataatgatgacctggcaggaatggatatttccttccccgagacaactgtggctgtagcagttgacacaactctcattcctgtagaaactgaatccaccacatacctcagcacaagcaagacgactaccattctgcagccaaccaacgtggttgccattgttactgaggcaactggtgtatctgccatccctgagaaacttgtcacccttcatggcacacctgctgtgtctgaaaagcctgatgtggccactgtaactgccaatgtttccattcatggaacattcagccttgggccatccattgtttatattgaagaggagatgaagaatggcacattcaacactgcagaagttcttatccgaagaactggtgggtttactggcaatgtcagcataacagttaaaactttcggtgaaagatgtgctcagatggaaccaaatgcattgccctttcgtggtatctatgggatttccaacctaacatgggcagttgaagaagaagactttgaagaacaaactcttacccttatattcctagatggagaaagagaacgtaaagtatcagttcaaattttggatgatgatgagcctgaggggcaggaattcttctacgtgtttctcacaaaccctcaagggggagcacagattgtggaggagaaggatgatactggatttgcagcttttgccatggttattattacagggagtgaccttcacaatggcatcataggattcagtgaggagtcccagagtggactagaactcagggaaggagctgttatgagaagattgcaccttattgtcacaagacagccaaacagggcctttgaagatgtcaaggtcttttggcgagtcacacttaacaaaacagtcgtcgtgctccagaaggatggggtaaacctggtggaggaacttcagtctgtgtcagggaccacaacctgtacaatgggtcaaacaaaatgctttatcagcattgaactcaaaccagaaaaggtaccacaggttgaagtgtatttttttgtggaactatatgaagctactgctggagcagcaataaacaacagtgccagattcgcacagattaaaatcttagaaagtgatgaatctcaaagccttgtgtatttttctgtgggttctcggctggcagtggctcacaagaaggccactttaatcagtctgcaggtggccagagattctgggacaggactaatgatgtctgttaactttagtacccaggagttgaggagtgctgaaacaattggtcgtaccatcatatctccagctatttctggaaaggattttgtgataactgaaggcacattggtctttgaacctggccagagaagcactgtattggatgtcatcctaacgccagagacaggatctttaaattcatttcctaaacgcttccagattgtcctttttgacccaaaaggtggtgccagaattgataaagtgtatgggactgccaacatcactcttgtctcagatgcagattcgcaggccatttgggggcttgcagatcagctacatcagcctgtgaatgatgatattctcaacagagtgctccataccatcagcatgaaagtggccacagaaaacacagatgaacaactcagtgccatgatgcatttaatagaaaagataactactgaaggaaaaattcaagctttcagtgttgccagccgaactcttttctatgagattctttgttctcttattaacccaaagcgcaaggacactaggggattcagtcactttgctgaagtgactgagaattttgccttttctctgctgactaatgttacttgcggctctcctggtgaaaaaagcaaaaccatccttgatagttgcccatatttgtcaatattggctcttcactggtatcctcagcaaatcaatggacacaagtttgaaggaaaggaaggagattacattcgaattccagagaggctactggatgtccaggatgcagaaataatggctgggaaaagtacatgtaaattagtccagtttacagagtatagcagccaacagtggtttataagtggaaacaatcttcctaccctaaaaaataaggtattatctttgagtgtgaaaggtcagagttcacaactcctgactaatgacaatgaggttctctacaggatttatgctgctgagcctagaattattcctcagacatctctgtgtctcctttggaatcaggctgctgcaagctggttgtctgacagtcagttttgcaaagtggttgaggaaactgcagactatgtggaatgtgcctgttcacacatgtctgtgtatgctgtctatgctcggactgacaacttgtcttcatacaatgaagccttcttcacttctggatttatatgtatctcaggtctttgcttggctgttctttcccatatcttctgtgccaggtactccatgtttgcagctaaacttctgactcacatgatggcagccagcttaggtacacagattctgtttctggcgtctgcatacgcaagtccccaactcgctgaggagagctgttcagctatggctgctgtcacacattacctgtatctttgccagtttagctggatgctcattcagtctgtgaatttctggtacgtgctggtgatgaatgatgagcacacagagaggcgatatctgctgtttttccttctgagttggggactaccagcttttgtggtgattctcctcatagttattttgaaaggaatctatcatcagagcatgtcacagatctatggactcattcatggtgacctgtgttttattccaaacgtctatgctgctttgttcactgcagctcttgttcctttgacgtgcctcgtggtggtgttcgtggtgttcatccatgcctaccaggtgaagccacagtggaaagcatatgatgatgtcttcagaggaaggacaaatgctgcagaaattccactgattttatatctctttgctctgatttccgtgacatggctttggggaggactacacatggcctacagacacttctggatgttggttctctttgtcattttcaacagtctgcagggactttatgttttcatggtttatttcattttacacaaccaaatgtgttgccctatgaaggccagttacactgtggaaatgaatgggcatcctggacccagcacagcctttttcacgcccgggagtggaatgcctcctgctggaggggaaatcagcaagtccacccagaatctcatcggtgctatggaggaggtgccacctgactgggagagagcatccttccaacagggcagtcaggccagccctgatttaaagccaagtccacaaaatggagccacgttcccgtcctctggaggatatggccaggggtcactgatagccgatgaggagtcccaggagtttgatgatttaatatttgcattaaaaactggtgctggtctcagtgtcagtgataatgaatctggtcaaggcagccaggaggggggcaccttgactgactcccagatcgtggagctcaggaggatacccatcgccgacactcacctgtagcacctcactaaccattcgactgagcacactttcatatttgtatcagcttttgtgctaaaactctctaagtacatccacctgtgtaataggaacctgtgaattgtactggatgattaatacaaacgtgattgttgtatttggagtataaattactgattgtatgtgacctgaaaattcactgctataagaaaggtggagtcagtttgtatcagttaataggatgttcatattccaaggatattagttgtttttttaatcatcctatatggctaacattgtttaatgaaagtaataatcaataaagcaatagaatcta

SEQ ID NO: 11665 - DNA, 19338 bp, Homo sapiens
  source 1..19338: mol_type = unassigned DNA
agtaagaatcagcagcgcgggcaaggagtacggacgggagtcagaggcagagcgagggtgtgtggagggccggcggggaccgccgggagcgcgcggatgtcggtgttcctggggccagggatgccctctgcatctttattagtaaatcttctttcagctttactcatcctatttgtgtttggagaaacagaaataagatttactggacaaactgaatttgttgttaatgaaacaagtacaacagttattcgtcttatcattgaaaggataggagagccagcaaatgttactgcaattgtatcgctgtatggagaggacgctggtgacttttttgacacatatgctgcagcttttatacctgccggagaaacaaacagaacagtgtacatagcagtatgtgatgatgacttaccagagcctgacgaaacttttatttttcacttaacattacagaaaccttcagcaaatgtgaagcttggatggccaaggactgttactgtgacaatattatcaaatgacaatgcatttggaattatttcatttaatatgcttccctcaatcgcagtgagtgagcccaagggcagaaatgagtctatgcctcttactctcatcagggaaaagggaacctatggaatggtcatggtgacttttgaggtagagggtggcccaaatccccctgatgaagatttgagtccagttaaaggaaatatcacctttccccctggcagagcaacagtaatttataacttgacagtactcgatgacgaggtaccagaaaatgatgaaatatttttaattcaactgaaaagtgtagaaggaggagctgagattaacacctctaggaattccattgagatcatcattaagaaaaatgatagtcccgtgagattccttcagagtatttatttggttcctgaggaagaccacatactcataattccagtagttcgtggaaaggacaacaatggaaatctgattggatctgatgaatatgaggtttcaatcagttatgctgtcacaactgggaattccacagcacatgcccagcaaaatctggacttcattgatcttcagccaaacacaactgttgtttttccaccttttattcatgaatctcacttgaaatttcaaatagttgatgacaccataccggagattgctgaatcgtttcacattatgttactaaaagataccttacagggagatgctgtgctaataagcccttctgttgtacaagtcaccattaagccaaatgataaaccttatggagtcctttcattcaacagtgttttgtttgaaaggacagttataattgatgaagatagaatatcaagatatgaagaaatcacagtggttagaaatggaggaacccatgggaatgtctctgcgaattgggtgttgacacggaacagcactgatccctcaccagtaacagcagatatcagaccgagctctggagttctccattttgcacaagggcagatgttggcaacaattcctcttactgtggttgatgatgatcttccagaagaggcagaagcttatctacttcaaattctgcctcatacaatacgaggaggtgcagaagtgagcgagccagcggagcttttgttctacattcaggatagtgatgatgtctatggcctaataacattttttcctatggaaaaccagaagattgaaagcagcccaggtgaacgatacttatccttgagttttacaagactaggagggactaaaggagatgtgaggttgctttattctgtactttacattcctgctggagctgtggaccccttgcaagcaaaagaaggcatcttaaatatatcaaggagaaatgacctcatttttccagagcaaaaaactcaagtcactacaaaattaccaataagaaatgatgcattccttcaaaatggagctcactttctagtacagttggaaactgtggagttgttaaacataattcctctaatcccacccataagccctagatttggggaaatctgcaatatttctttactggttactccagccattgcaaatggagaaattggctttctcagcaatcttccaattattttgcatgaaccagaagattttgctgctgaagtggtatacattcccttacatcgggatggaactgatggccaggctactgtctactggagtttgaagccctctggctttaattcaaaagcagtgaccccggatgatataggcccctttaatggctctgttttgtttttatctgggcaaagtgacacaacaatcaacattactatcaaaggtgatgacataccggaaatgaatgaaactgtaacactttctctagacagggttaacgtggaaaaccaagtgctgaaatctggatatactagccgtgacctaattattttggaaaatgatgaccctgggggagtttttgaattttctcctgcttccagaggaccctatgttataaaagaaggagaatctgtagagctccacatcatccgatcaagggggtcccttgttaagcagtttctacactaccgagtagagccaagagatagcaatgaattctatggaaacacgggagtactagaatttaaacctggagaaagggagatagtgatcaccttgctagcaagattggatgggataccagagttggatgaacactactgggtggtcctcagcagccacggagaacgggaaagcaagttgggaagtgccaccattgtcaatataacgattctgaaaaatgatgatcctcatggcattatagaatttgtttctgatggtctaattgtgatgataaatgaaagcaaaggagatgctatctatagtgctgtttatgatgtagtaagaaatcgaggcaactttggtgatgttagtgtatcatgggtggttagtccagactttacacaagatgtatttcctgtacaagggactgttgtctttggagatcaggaattttcaaaaaatatcaccatttactcccttccagatgagattccagaagaaatggaagaatttaccgttatcctactgaatggcactggaggagctaaagtgggaaatagaacaactgcaactctgaggattagaagaaatgatgaccccatttattttgcagaacctcgtgtagtgagggttcaggaaggtgagactgccaactttacagttctcagaaatggatctgttgatgtgacttgcatggtccagtatgctaccaaggatgggaaggctactgcaagagagagagatttcattcctgttgaaaaaggagaaacgctcatttttgaggttggaagtagacagcagagcatatccatatttgttaatgaagatggtatcccggaaacagatgagcccttttatataatcctcttgaattcaacaggtgatacagtagtatatcaatatggagtagctacagtaataattgaagctaatgatgacccaaatggcattttttctctggagcccatagacaaagcagtggaagaaggaaagactaatgcattttggattttgaggcaccgaggatactttggtagtgtttctgtatcttggcagctctttcagaatgattctgctttgcagcctgggcaggagttctatgaaacttcaggaactgttaacttcatggatggagaagaagcaaaaccaatcattctccatgcttttccagataaaattcctgaattcaatgaattttatttcctaaaacttgtaaacatttcaggtggatccccaggtcctgggggccagctagcagaaaccaacctccaggtgacagtaatggttccattcaatgatgatccctttggagtttttatcttggatccagagtgtttagagagagaagtggcagaagatgtcctgtctgaagatgatatgtcttatattaccaacttcaccattttgaggcagcagggtgtgtttggtgatgtacaactgggctgggaaatactgtccagtgagttccctgctggtttgccaccaatgatagattttttactggttggaattttccccaccaccgtgcatttacaacagcacatgcggcgtcaccacagtggaacggatgctttgtactttaccggactagagggtgcatttgggactgttaatccaaaataccatccctccaggaataatacaattgccaactttacattctcagcttgggtaatgcccaatgccaatacgaatggattcattatagcgaaggatgacggtaatggaagcatctactacggggtaaaaatacaaacaaacgaatcccatgtgacactttcccttcattataaaaccttgggttccaatgctacatacattgccaagacaacagtcatgaaatatttagaagaaagtgtttggcttcatctactaattatcctggaggatggtataatcgaattctacctggatggaaatgcaatgcccaggggaatcaagagtctgaaaggagaagccattactgacggtcctgggatactgagaattggagcagggataaatggcaatgacagatttacaggtctgatgcaggatgtgaggtcctatgagcggaaactgacgcttgaagaaatttatgaacttcatgccatgcccgcaaaaagtgatttacacccaatttctggatatctggagttcagacagggagaaactaacaaatcattcattatttctgcaagagatgacaatgacgaggaaggagaagaattattcattcttaaactagtttctgtatatggaggagctcgtatttcggaagaaaatactactgcaagattaacaatacaaaaaagtgacaatgcaaatggcttgtttggtttcacaggagcttgtataccagagattgcagaggagggatcaaccatttcttgtgtggttgagagaaccagaggagctctggattatgtgcatgttttttacaccatttcacagattgaaactgatggcattaattaccttgttgatgactttgctaatgccagtggaactattacattccttccttggcagagatcagaggttctgaatatatatgttcttgatgatgatattcctgaacttaatgagtatttccgtgtgacattggtttctgcaattcctggagatgggaagctaggctcaactcctaccagtggtgcaagcatagatcctgaaaaggaaacgactgatatcaccatcaaagctagtgatcatccatatggcttgctgcagttctccacagggctgcctcctcagcctaaggacgcaatgaccctgcctgcaagcagcgttccacatatcactgtggaggaggaagatggagaaatcaggttattggtcatccgtgcacagggacttctgggaagggtgactgcggaatttagaacagtgtccttgacagcattcagtcctgaggattaccagaatgttgctggcacattagaatttcaaccaggagaaagatataaatacattttcataaacatcactgataattctattcctgaactggaaaaatcttttaaagttgagttgttaaacttggaaggaggagtagctgaactctttagggttgatggaagtggtagtggtgatggggacatggaattcttccttccaactattcacaaacgtgccagtctaggagtggcttcccaaattctagtgacaattgcagcctctgaccacgctcatggcgtatttgaatttagccctgagtcactctttgtcagtggaactgaaccagaagatgggtatagcactgttacattaaatgttataagacatcatggaactctgtctccagtgactttgcattggaacatagactctgatcctgatggtgatctcgccttcacctctggcaacatcacatttgagattgggcagacgagcgccaatatcactgtggagatattgcctgacgaagacccagaactggataaggcattctctgtgtcagtcctcagtgtttccagtggttctttgggagctcatattaatgccacgttaacagttttggctagtgatgatccatatgggatattcattttttctgagaaaaacagacctgttaaagttgaggaagcaacccagaacatcacactatcaataataaggttgaaaggcctcatgggaaaagtccttgtctcatatgcaacactagatgatatggaaaaaccaccttattttccacctaatttagcgagagcaactcaaggaagagactatataccagcttctggatttgctctttttggagctaatcagagtgaggcaacaatagctatttcaattttggatgatgatgagccagaaaggtccgaatctgtctttatcgaactactcaactctactttagtagcgaaagtacagagtcgttcaattccaaattctccacgtcttgggcctaaggtagaaactattgcgcaactaattatcattgccaatgatgatgcatttggaactcttcagctctcagcaccaattgtccgagtggcagaaaatcatgttggacccattatcaatgtgactagaacaggaggagcatttgcagatgtctctgtgaagtttaaagctgtgccaataactgcaatagctggtgaagattatagtatagcttcatcagatgtggtcttgctagaaggggaaaccagtaaagccgtgccaatatatgtcattaatgatatctatcctgaactggaagaatcttttcttgtgcaactgatgaatgaaacaacaggaggagccagactaggggctttaacagaggcagtcattattattgaggcctctgatgacccctatggattatttggttttcagattactaaacttattgtagaggaacctgagtttaactcagtgaaggtaaacctgccaataattcgaaattctgggacactcggcaatgttactgttcagtgggttgccaccattaatggacagcttgctactggcgacctgcgagttgtctcaggtaatgtgacctttgcccctggggaaaccattcaaaccttgttgttagaggtcctggctgacgacgttccggagattgaagaggttatccaagtgcaactaactgatgcctctggtggaggtactattgggttagatcgaattgcaaatattattattcctgccaatgatgatccttatggtacagtagcctttgctcagatggtttatcgtgttcaagagcctctggaaagaagttcctgtgctaatataactgtcaggcgaagcggagggcactttggtcggctgttgttgttctacagtacttccgacattgatgtagtggctctggcaatggaggaaggtcaagatttactgtcctactatgaatctccaattcaaggggtgcctgacccactttggagaacttggatgaatgtctctgccgtgggggagcccctgtatacctgtgccactttgtgccttaaggaacaagcttgctcagcgttttcatttttcagtgcttctgagggtccccagtgtttctggatgacatcatggatcagcccagctgtcaacaattcagacttctggacctacaggaaaaacatgaccagggtagcatctctttttagtggtcaggctgtggctgggagtgactatgagcctgtgacaaggcaatgggccataatgcaggaaggtgatgaattcgcaaatctcacagtgtctattcttcctgatgatttcccagagatggatgagagttttctaatttctctccttgaagttcacctcatgaacatttcagccagtttgaaaaatcagccaaccataggacagccaaatatttctacagttgtcatagcactaaatggtgatgcctttggagtgtttgtgatctacaatattagtcccaatacttccgaagatggcttatttgttgaagttcaggagcagccccaaaccttggtggagctgatgatacacaggacagggggcagcttaggtcaagtggcagtcgaatggcgtgttgttggtggaacagctactgaaggtttagattttataggtgctggagagattctgacctttgctgaaggtgaaaccaaaaagacagtcattttaaccatcttggatgactctgaaccagaggatgacgaaagtatcatagttagtttggtgtacactgaaggtggaagtagaattttgccaagctccgacactgttagagtgaacattttggccaatgacaatgtggcaggaattgttagctttcagacagcttccagatctgtcataggtcatgaaggagaaattttacaattccatgtgataagaactttccctggtcgaggaaatgttactgttaactggaaaattattgggcaaaatctagaactcaattttgctaactttagcggacaacttttctttcctgaggggtcgttgaatacaacattgtttgtgcatttgttggatgacaacattcctgaggagaaagaagtataccaagtcattctgtatgatgtcaggacacaaggagttccaccagccggaatcgccctgcttgatgctcaaggatatgcagctgtcctcacagtagaagccagtgatgaaccacatggagttttaaattttgctctttcatcaagatttgtgttactacaagaggctaacataacaattcagcttttcatcaacagagaatttggatctctaggagctatcaatgtcacatataccacggttcctggaatgctgagtctgaagaaccaaacagtaggaaacctagcagagccagaagttgattttgtccctatcattggctttctgattttagaagaaggggaaacagcagcagccatcaacattaccattcttgaggatgatgtaccagagctagaagaatatttcctggtgaatttaacttacgttggacttaccatggctgcttcaacttcatttcctcccagactagattcagaaggtttgactgcacaagttattattgatgccaatgatggggcccgaggtgtaattgaatggcaacaaagcaggtttgaagtaaatgaaacccatggaagtttaacattggtagcccagaggagcagagaacctcttggccatgtttccttatttgtgtatgctcagaatttggaagcacaagtggggctggattatatcttcaccccaatgattcttcattttgctgatggagaaaggtataaaaatgtcaatatcatgattcttgatgatgacattccagaaggagatgaaaaatttcagctgattttaacaaatccttctcctggactagagctagggaaaaatacaatagccttaattattgtccttgctaatgatgacggccctggagttctatcatttaacaacagtgagcactttttcctaagagagccaacagctctctacgtccaggagagtgttgcagtattgtacattgttcgggaacctgcacaaggattgtttggaacagtgacagttcagttcattgtgacagaagtgaattcctcaaatgaatctaaagatctgactccttccaaaggctatattgttttagaagaaggtgttcgattcaaggccctacaaatatctgccatattagacacggaaccagaaatggatgagtattttgtttgcaccttgtttaatccaactggaggtgctagactaggggtgcatgttcaaaccctgataacagttttgcaaaaccaggcccctttggggctattcagtatctctgcagttgaaaatagagccacctccatagacatcgaagaagccaataggaccgtgtatttaaatgtatctcgaactaatggcattgatttggctgtgagtgtgcagtgggagacagtatctgaaacagcctttggcatgaggggaatggatgttgtgttttccgtatttcaaagttttttggatgaatcagcttctggctggtgtttctttactttggaaaatttaatatatggtataatgttaagaaaatcatctgttactgtttaccgatggcaggggatttttattccagttgaggatttaaatatagaaaatcctaaaacttgtgaggcctttaatattggtttttctccctactttgtgattactcatgaagaaagaaatgaagaaaagccttctcttaacagtgtgtttacattcacatctggatttaaattattcctggtacaaacaatcattattctggaaagttctcaagtaagatattttacttcagacagccaagattatttaatcattgcaagtcaaagagatgattccgaattaactcaggtcttcaggtggaatggaggaagcttcgtgttgcatcaaaaactccctgtccgaggtgtgctgaccgtggccttgttcaacaagggaggctctgtgttcttagccatttcccaggctaatgccaggctaaactcccttttattcagatggtctggcagtgggtttattaactttcaagaggtgcctgtcagtgggacaacagaagttgaggctttgtcttcagccaatgatatttacctaatatttgccgaaaatgtctttctaggagatcagaattcaattgatattttcatctgggagatgggacagtcttccttcaggtattttcagtctgtagattttgctgctgttaacagaatccactccttcacaccagcctcaggaatagcccacatacttcttattggccaagatatgtctgctctttactgctggaattcggagcgtaatcaattctcttttgttctggaagtaccttctgcttatgatgtggcttctgttacagtaaagtcccttaattcaagcaagaatttaatagctctagtgggagctcattcacatatatatgagctagcctacatttccagccattctgactttattcctagttcaggtgaactgatatttgaacctggtgagagagaagctacaatagcagtaaatatccttgatgatacagttccagaaaaagaagaatccttcaaagttcaacttaaaaatcccaaaggaggagcagagattggcattaatgattctgtaacaataaccattctgtctaatgatgatgcctatggaattgttgcatttgctcagaattcattatataagcaagtggaagaaatggagcaagatagcctagtaaccttgaacgttgaacgcttaaaaggaacatatggccgtataaccatagcatgggaagctgatggaagtattagtgatatatttcctacctcaggagtgattttatttactgaaggccaggtactgtcaacaatcactctaactattcttgctgataatataccagagttatcagaggttgtgattgtaaccctcacccgtatcaccacagaaggggttgaggactcatacaaaggtgctactattgatcaggacagaagcaagtctgttataacaactttgcccaatgactcaccttttggcttggtgggctggcgtgctgcgtctgtcttcattagagtagcagagcctaaagaaaacaccaccactcttcagttacaaatagctcgagataaaggactacttggggatattgccattcacttgagagctcaacccaatttcttactgcatgtcgataatcaagctactgagaatgaagattatgtattgcaagaaacaataataataatgaaagaaaacataaaagaagctcatgccgaagtttccattttgccggatgaccttcctgaattggaggaaggatttattgtcactatcactgaggtgaacctggtgaactctgacttctctacaggacagccaagtgtgcggaggcccggaatggaaatagctgagataatgatagaagaaaatgacgatcccagaggaatttttatgtttcatgttactagaggcgctggggaagttattactgcctatgaggtgcctccacccttgaacgttcttcaagttcctgtagtccggctggctggaagctttggggcagtaaatgtttattggaaagcatcaccagacagtgctggcctggaagactttaaaccatctcatgggattcttgaatttgcagataaacaggttactgcaatgatagaaatcaccataattgatgatgctgaatttgaattgacagagacgttcaatatttccttgatcagtgttgctggaggtggcagacttggtgatgatgttgtggtaactgttgttattccacaaaatgattctccatttggagtatttggatttgaagaaaagactgtaatgattgatgaatccctttcatccgatgaccctgattcatatgtgacattgacggttgtccggtccccaggaggaaaaggaaccgtccgacttgagtggaccatagatgagaaggctaaacataaccttagtcctttgaatgggacccttcattttgatgagactgagtcccagaagaccattgtgttgcacacacttcaagacacagtgttggaggaggacaggcgtttcaccattcagctgatatcaattgatgaggtagaaatatctccagtaaaaggtagtgcatcaataattattcggggtgataagcgagcatcaggagaagttgggatagctccgtcatctaggcacatcctcattggggaaccctcagcaaaatataatggtaccgctattatcagccttgttcgaggcccagggattttgggggaggtcacagtgttctggaggatattccctccttccgtgggggaatttgctgaaacatcaggaaaactgacaatgcgagacgaacagtctgcagtcattgtagtaatacaggctttgaacgatgacattcccgaggaaaaaagcttctatgagtttcagctcactgcagtcagtgagggaggagttctgagtgaatccagcagcactgccaacatcacggtggtggccagcgactctccctatggccgatttgccttttcacatgagcaacttcgagtgtcagaagcacagagggttaacatcacaatcatccgttccagtggagattttggccatgtgcgactctggtacaagacgatgagcgggacagcggaagcaggcttggattttgttcctgcagcaggggagctcctctttgaagcaggggagatgaggaaaagtctgcatgttgaaatccttgatgatgactatcctgaaggcccagaggaattttctctaacaattacaaaggtggaactccagggaagagggtatgattttaccattcaagaaaatggacttcagatagatcaacctcctgaaataggaaacatctccattgttcgcatcataataatgaaaaatgataacgcagaaggcatcattgaatttgacccaaagtatactgccttcgaagtggaggaagatgttgggctgatcatgatcccagtggtgaggctacatggaacttatggctatgtgacagctgatttcatctctcagagctcctctgccagtcccggaggtgttgattacattttgcatggcagtacagtcacctttcagcatgggcaaaacttaagttttataaatatctccatcattgatgacaatgaaagtgaatttgaggagcccattgaaattctactcactggagctactggaggagcggtccttgggcgccacctagtgagcagaatcataatagctaagagtgactctccctttggagttataaggtttctcaatcaaagcaaaatttctattgctaatcccaattccacaatgattttatcactggtgctggagcggactggaggactcttgggagagattcaggtgaactgggagacagtaggacccaactctcaagaagccttactgccacagaatagagacattgcagacccagtgagcgggttgttctattttggagaaggagaaggaggagtgagaaccataattctgacaatctatcctcatgaagaaattgaagttgaagagacattcattattaaacttcatcttgtgaaaggagaagctaaattagactccagagctaaagatgttacattaaccatacaagagtttggtgacccaaatggagttgttcagtttgctcctgaaactttgtctaagaagacttattcagagcctctggctctggaagggcccctgctcattaccttctttgtcagaagagtcaagggcacctttggagagattatggtttactgggaattaagtagtgagtttgacattactgaagactttctttccaccagtggatttttcaccattgctgatggagagagtgaagctagctttgatgttcatttgctaccagatgaggtacctgagatagaggaagattatgtgatccagcttgtttctgtagagggaggagccgaactggatctggagaagagtatcacatggttctctgtttatgcaaatgatgacccacatggagtatttgccctgtattcggatcgccagtcaatacttattgggcagaaccttattagatccatccaaattaacataacccggcttgctggaacatttggagatgtggctgttgggcttcgaatatcatcggatcataaagaacagccgattgttaccgaaaatgcagagaggcagctggtggtcaaagatggtgccacatataaagtggacgtggtgccaataaagaatcaggtcttcctatcactgggctctaatttcactttgcaactggtgactgtgatgcttgtcggtggacgtttctatggaatgccaacaattcttcaggaagcaaaatctgctgtccttccagtctctgagaaagctgccaattctcaggtcggatttgaatccactgcttttcaactcatgaacatcactgctggcacaagccacgttatgatttctaggagaggcacatatggagctctctcggttgcctggaccactggatatgctcctgggttagaaattcctgaattcattgttgttggcaacatgaccccaacactggggagcctttcattttcccacggtgaacaaaggaaaggagttttcctgtggacgtttcctagccctggttggccagaggcctttgttcttcacctatcaggagtgcagagcagtgctcctggcggagctcaactccgatcaggtttcattgttgctgaaattgaaccaatgggcgtcttccaattttccactagctcaagaaatatcatagtgtcagaagatacacagatgatcagattacatgtacaaagactatttgggttccacagcgatcttattaaagtttcttatcagaccactgcaggaagcgccaagccactggaagattttgagcctgttcagaatggggaactgttttttcaaaaattccaaactgaggttgattttgaaataaccattattaatgatcagctttctgagatagaagaatttttttacattaaccttacttcagtagaaattaggggattacaaaagtttgatgttaattggagcccacgcctgaatctagatttcagtgttgcagtgattacaatattggataatgatgacctggcaggaatggatatttccttccccgagacaactgtggctgtagcagttgacacaactctcattcctgtagaaactgaatccaccacatacctcagcacaagcaagacgactaccattctgcagccaaccaacgtggttgccattgttactgaggcaactggtgtatctgccatccctgagaaacttgtcacccttcatggcacacctgctgtgtctgaaaagcctgatgtggccactgtaactgccaatgtttccattcatggaacattcagccttgggccatccattgtttatattgaagaggagatgaagaatggcacattcaacactgcagaagttcttatccgaagaactggtgggtttactggcaatgtcagcataacagttaaaactttcggtgaaagatgtgctcagatggaaccaaatgcattgccctttcgtggtatctatgggatttccaacctaacatgggcagttgaagaagaagactttgaagaacaaactcttacccttatattcctagatggagaaagagaacgtaaagtatcagttcaaattttggatgatgatgagcctgaggggcaggaattcttctacgtgtttctcacaaaccctcaagggggagcacagattgtggaggagaaggatgatactggatttgcagcttttgccatggttattattacagggagtgaccttcacaatggcatcataggattcagtgaggagtcccagagtggactagaactcagggaaggagctgttatgagaagattgcaccttattgtcacaagacagccaaacagggcctttgaagatgtcaaggtcttttggcgagtcacacttaacaaaacagtcgtcgtgctccagaaggatggggtaaacctggtggaggaacttcagtctgtgtcagggaccacaacctgtacaatgggtcaaacaaaatgctttatcagcattgaactcaaaccagaaaaggtaccacaggttgaagtgtatttttttgtggaactatatgaagctactgctggagcagcaataaacaacagtgccagattcgcacagattaaaatcttagaaagtgatgaatctcaaagccttgtgtatttttctgtgggttctcggctggcagtggctcacaagaaggccactttaatcagtctgcaggtggccagagattctgggacaggactaatgatgtctgttaactttagtacccaggagttgaggagtgctgaaacaattggtcgtaccatcatatctccagctatttctggaaaggattttgtgataactgaaggcacattggtctttgaacctggccagagaagcactgtattggatgtcatcctaacgccagagacaggatctttaaattcatttcctaaacgcttccagattgtcctttttgacccaaaaggtggtgccagaattgataaagtgtatgggactgccaacatcactcttgtctcagatgcagattcgcaggccatttgggggcttgcagatcagctacatcagcctgtgaatgatgatattctcaacagagtgctccataccatcagcatgaaagtggccacagaaaacacagatgaacaactcagtgccatgatgcatttaatagaaaagataactactgaaggaaaaattcaagctttcagtgttgccagccgaactcttttctatgagattctttgttctcttattaacccaaagcgcaaggacactaggggattcagtcactttgctgaagtgactgagaattttgccttttctctgctgactaatgttacttgcggctctcctggtgaaaaaagcaaaaccatccttgatagttgcccatatttgtcaatattggctcttcactggtatcctcagcaaatcaatggacacaagtttgaaggaaaggaaggagattacattcgaattccagagaggctactggatgtccaggatgcagaaataatggctgggaaaagtacatgtaaattagtccagtttacagagtatagcagccaacagtggtttataagtggaaacaatcttcctaccctaaaaaataaggtattatctttgagtgtgaaaggtcagagttcacaactcctgactaatgacaatgaggttctctacaggatttatgctgctgagcctagaattattcctcagacatctctgtgtctcctttggaatcaggctgctgcaagctggttgtctgacagtcagttttgcaaagtggttgaggaaactgcagactatgtggaatgtgcctgttcacacatgtctgtgtatgctgtctatgctcggactgacaacttgtcttcatacaatgaagccttcttcacttctggatttatatgtatctcaggtctttgcttggctgttctttcccatatcttctgtgccaggtactccatgtttgcagctaaacttctgactcacatgatggcagccagcttaggtacacagattctgtttctggcgtctgcatacgcaagtccccaactcgctgaggagagctgttcagctatggctgctgtcacacattacctgtatctttgccagtttagctggatgctcattcagtctgtgaatttctggtacgtgctggtgatgaatgatgagcacacagagaggcgatatctgctgtttttccttctgagttggggactaccagcttttgtggtgattctcctcatagttattttgaaaggaatctatcatcagagcatgtcacagatctatggactcattcatggtgacctgtgttttattccaaacgtctatgctgctttgttcactgcagctcttgttcctttgacgtgcctcgtggtggtgttcgtggtgttcatccatgcctaccaggtgaagccacagtggaaagcatatgatgatgtcttcagaggaaggacaaatgctgcagaaattccactgattttatatctctttgctctgatttccgtgacatggctttggggaggactacacatggcctacagacacttctggatgttggttctctttgtcattttcaacagtctgcagggactttatgttttcatggtttatttcattttacacaaccaaatgtgttgccctatgaaggccagttacactgtggaaatgaatgggcatcctggacccagcacagcctttttcacgcccgggagtggaatgcctcctgctggaggggaaatcagcaagtccacccagaatctcatcggtgctatggaggaggtgccacctgactgggagagagcatccttccaacagggcagtcaggccagccctgatttaaagccaagtccacaaaatggagccacgttcccgtcctctggaggatatggccaggggtcactgatagccgatgaggagtcccaggagtttgatgatttaatatttgcattaaaaactggtgctggtctcagtgtcagtgataatgaatctggtcaaggcagccaggaggggggcaccttgactgactcccagatcgtggagctcaggaggatacccatcgccgacactcacctgtagcacctcactaaccattcgactgagcacactttcatatttgtatcagcttttgtgctaaaactctctaagtacatccacctgtgtaataggaacctgtgaattgtactggatgattaatacaaacgtgattgttgtatttggagtataaattactgattgtatgtgacctgaaaattcactgctataagaaaggtggagtcagtttgtatcagttaataggatgttcatattccaaggatattagttgtttttttaatcatcctatatggctaacattgtttaatgaaagtaataatcaataaagcaatagaatctatttgg

SEQ ID NO: 11666 - DNA, 5322 bp, Homo sapiens
  source 1..5322: mol_type = unassigned DNA
gccccccttcccgacaccctcgcggagagcggttcttgccgcatcctgcgcagcccctgcccagtttggtgcagaggcgtggggggcgggactcgtctttgccattcggatcgctgggaaagcggtgggaatccaactgaagagcagccagaggagagctgaagagaggagggggaggccgatgacctgggctctgggcctctgaaggtctggcgtattctgacaggacacagtgagcatctgtagaggagaggcttgaaataaaggaggagcacgaatattccctggatttctggaggcctgctttaaggctggccagttctgcaagaaaggcaaggaggaggagactggctcacacctctggaggacccccttctgtcagctgtggggcttgacactacttgaacaagaaaaggagggggaaactgcaccacataagtgaagatccacctccagtggctgctctgctggtggtggggttgctgctgacaaccaccctcaacgggtctgcacccatccaggaaatctctgtcttcctcaagcttggttgtgcctgttctacactctatctgtattattgaattactgactgagactgtgtttgggaaggaggctgagtgactactggactggatattgactctaactcttgtttccaagcttatatcctcaatcacctaaagatcagagtgtgaagaaacaaacctgtgacagatctgtggttgaggtttagactgggggaggagtatagtactggactttctttgtaacttgtaccatgactggggcagagattgagtctggtgcccaggtcaagcctgaaaagaagcctggggaagaggttgtaggtggggctgagatagagaatgatgtccctctggtggtcagacccaaggttaggacccaggcccagataatgcctggggcaaggcccaagaataagtccaaggttatgcctggagcaagcaccaaagttgagacaagtgcagtgggtggggcacgccctaagagtaaggccaaggcaatacctgtttcacgatttaaggaagaagcccagatgtgggctcagcccaggtttggtgctgaaagattgtctaagacagagagaaactcccagaccaatatcatagcctctccacttgtcagtactgattctgtcttggttgctaaaacaaagtacctgtctgaggatagagaactggttaatacagacactgagagctttcctagaaggaaggcccattaccaagcaggattccagccttcttttaggtcaaaggaggagaccaatatggggtcctggtgctgtcctaggcctacatccaaacaagaagcctctcctaattctgatttcaaatgggtagacaaatctgtgagttccttgttctggagtggagatgaggtcactgcaaaatttcatcctgggaatagggtaaaagacagtaacagatccatgcacatggccaatcaagaggctaataccatgtctaggtcccaaactaaccaggagctctatattgcatctagttctggttctgaggatgagtctgttaagacaccctggttctgggccagagataaaaccaatacctggtctgggcccagggaagatcccaatagcaggtccaggtttaggtctaagaaagaagtctatgttgaatcaagttctggatctgagcatgaagaccatttggagtcctggtttggggctggaaaggaggccaaattcaggtccaaaatgagagctgggaaggaggccaataacagggccaggcacagggccaagcgagaagcttgcattgatttcatgcctgggtctatagatgtaattaaaaaagagtcctgtttctggcctgaagaaaatgctaataccttttcaaggcccatgatcaagaaagaggccagggccagagcaatgacaaaggaagaggccaaaaccaaggcccgagccagggccaagcaagaagccaggtcagaggaggaagccctcattgggacctggttctgggctacagacgagtccagcatggcagatgaagccagcatagagtccagtctacaagtggaggatgagtccataattgggagttggttctggactgaagaagaggccagtatggggactggggctagcagtaaatccagaccaaggactgatggggagcgtattggtgattccttatttggggctagggaaaagaccagtatgaaaactggggctgaggccacctctgaatctatactagcagctgatgatgaacaggtcattattggttcctggttctgggctggtgaagaggtcaaccaagaggctgaggaagagaccatttttgggtcgtggttctgggtcattgatgcggccagtgtggaatctggtgttggggtcagctgtgagtccaggacaaggtctgaggaagaagaggtcattggtccctggttttggtctggagaacaagttgatatagaggctggaatcggagaagaggccaggccaggagctgaagaagagacaatattcgggtcctggttttgggctgaaaaccagacctatatggattgtagggctgaaactagctgtgacaccatgcaaggggctgaggaggaggagcccattattgggtcctggttttggaccagagtagaagcttgtgtggagggtgatgtcaacagcaagtctagcctggaggacaaggaagaggccatgataccatgttttggagccaaagaagaggtcagtatgaagcatgggactggtgtcagatgcagatttatggcaggggctgaggagaccaataataagtcttgcttctgggcagaaaaagaaccctgtatgtatcctgccggtggaggaagttggaagtctaggccagaggaggaagaggacattgtcaattcgtggttctggtccagaaaatacacaaagccagaggccattatagggtcctggttatgggctacagaagagagtaatatagatgggactggagaaaaggccaagttactgactgaagaggagaccataatcaattcctggttctggaaagaagatgaagccatttcagaggctactgacagagaagagtccaggccagaagctgaggagggggacattattggttcttggttctgggctggagaagaggacagactagagccagctgctgagactagagaagaagacaggctagcagctgagaaagaaggtattgttgggtcctggtttggggccagagaagagaccattagaagagaggctgggtcttgcagcaaatccagtcctaaagctgaagaggaagaagtcattattgggtcctggttctgggaagaagaggccagtccggaggcagtggcaggagtcggctttgagtcaaagcctgggactgaggaggaagaaatcactgttgggtcctggttctggcctgaagaagaagccagtatacaggctggatctcaggcagtagaggaaatggagtcagagactgaagaggaaaccatttttgggtcctggttctgggatggaaaagaagtcagtgaagaagcaggaccatgctgtgtatccaagccagaggatgatgaagagatgattgttgagtcctggttctggtctagagacaaagccattaaggaaactggaactgtggccacctgtgagtccaagccagaaaatgaggaaggggccattgttgggtcttggtttgaggctgaagatgaggtagataacaggactgacaatggaagcaactgtgggtccaggacattagctgatgaagatgaggccatagtggggtcctggttctgggcaggagatgaggcccattttgaatcaaatcctagccccgtgttcagggccatttgcaggtccacgtgttcagttgaacaggagcctgatccttcacgcaggcctcagagttgggaggaggtcactgttcagttcaagcctggtccatggggtagggtcggcttcccatctataagcccctttagatttccgaaagaggcagcatctttattctgtgaaatgtttgggggcaaacccaggaacatggtacttagcccagaaggggaagatcaggaatctttgcttcagcctgatcagcctagtcctgagttcccatttcagtatgatccttcctacaggtcagtccaggaaattcgagagcatcttagggccaaggagagtacagagcctgagagttcatcctgtaactgcatacaatgtgagctgaaaattggttctgaagagtttgaagaactccttttattaatggaaaaaattcgggatccttttattcatgaaatatctaaaatcgcaatgggtatgagaagtgcttctcaatttacccgagatttcattcgagattcaggtgttgtctcacttattgaaaccttgcttaattatccgtcctcccgagttagaacaagttttttggaaaatatgattcgcatggccccaccttatccgaatctaaacataattcagacatacatatgtaaagtgtgtgaggaaacccttgcttatagcgtggattccccggaacagctgtctggaataaggatgattagacatctcactactactactgactatcacacactggttgccaattatatgtctgggtttctctccttattagctacaggcaatgccaaaacaaggtttcatgttttgaaaatgctactgaatttgtctgaaaatcttttcatgacaaaagaactactcagtgctgaagcagtgtcagaatttataggcctctttaacagggaagagacaaatgacaatattcaaattgttcttgcaatatttgagaatattggcaacaatatcaaaaaagaaacagtgttctctgatgatgatttcaatattgagccgcttatttctgcattccacaaagttgagaaatttgctaaggaactgcaaggcaaaacagacaatcaaaatgaccctgaaggggaccaagaaaattagtaatggttaattgctggcctcagattgtccttatgttcctgagttatgatccttgagtaatgctttgattttaatagttggttctgtgttgcaacatatatctttagtgctgacactaactttgtccaactctgtctgtaagctggagcatttttctgatgccagctgaatattagagctgaaaacacatttgttgatatttgtcttgtccacattgtgatgttcagtatttgagcttatagtgaactgagcaatcataaataagccacccttctgattgtcgttctactgtatatatatatatatttgagtgttgtttgtgtttcaataaagtcctatgttaaagttggcagaaa

SEQ ID NO: 11667 - DNA, 5877 bp, Homo sapiens
  source 1..5877: mol_type = unassigned DNA
gcactttcgcgccgtatccctccgccccccttcccgacaccctcgcggagagcggttcttgccgcatcctgcgcagcccctgcccagtttggtgcagaggcgtggggggcgggactcgtctttgccattcggatcgctgggaaagcggtgggaatccaactgaagagcagccagaggagagctgaagagaggagggggaggccgatgacctgggctctgggcctctgaaggcctgctttaaggctggccagttctgcaagaaaggcaaggaggaggagactggctcacacctctggaggacccccttctgtcagctgtggggcttgacactacttgaacaagaaaaggagggggaaactgcaccacataagtgaagatccacctccagtggctgctctgctggtggtggggttgctgctgacaaccaccctcaacgggtctgcacccatccaggaaatctctgtcttcctcaagcttggttgtgcctgttctacactctatctgtattattgaattactgactgagactgtgtttgggaaggaggctgagtgactactggactggatattgactctaactcttgtttccaagcttatatcctcaatcacctaaagatcagagtgtgaagaaacaaacctgtgacagatctgtggttgaggtttagactgggggaggagtatagtactggactttctttgtaacttgtaccatgactggggcagagattgagtctggtgcccaggtcaagcctgaaaagaagcctggggaagaggttgtaggtggggctgagatagagaatgatgtccctctggtggtcagacccaaggttaggacccaggcccagataatgcctggggcaaggcccaagaataagtccaaggttatgcctggagcaagcaccaaagttgagacaagtgcagtgggtggggcacgccctaagagtaaggccaaggcaatacctgtttcacgatttaaggaagaagcccagatgtgggctcagcccaggtttggtgctgaaagattgtctaagacagagagaaactcccagaccaatatcatagcctctccacttgtcagtactgattctgtcttggttgctaaaacaaagtacctgtctgaggatagagaactggttaatacagacactgagagctttcctagaaggaaggcccattaccaagcaggattccagccttcttttaggtcaaaggaggagaccaatatggggtcctggtgctgtcctaggcctacatccaaacaagaagcctctcctaattctgatttcaaatgggtagacaaatctgtgagttccttgttctggagtggagatgaggtcactgcaaaatttcatcctgggaatagggtaaaagacagtaacagatccatgcacatggccaatcaagaggctaataccatgtctaggtcccaaactaaccaggagctctatattgcatctagttctggttctgaggatgagtctgttaagacaccctggttctgggccagagataaaaccaatacctggtctgggcccagggaagatcccaatagcaggtccaggtttaggtctaagaaagaagtctatgttgaatcaagttctggatctgagcatgaagaccatttggagtcctggtttggggctggaaaggaggccaaattcaggtccaaaatgagagctgggaaggaggccaataacagggccaggcacagggccaagcgagaagcttgcattgatttcatgcctgggtctatagatgtaattaaaaaagagtcctgtttctggcctgaagaaaatgctaataccttttcaaggcccatgatcaagaaagaggccagggccagagcaatgacaaaggaagaggccaaaaccaaggcccgagccagggccaagcaagaagccaggtcagaggaggaagccctcattgggacctggttctgggctacagacgagtccagcatggcagatgaagccagcatagagtccagtctacaagtggaggatgagtccataattgggagttggttctggactgaagaagaggccagtatggggactggggctagcagtaaatccagaccaaggactgatggggagcgtattggtgattccttatttggggctagggaaaagaccagtatgaaaactggggctgaggccacctctgaatctatactagcagctgatgatgaacaggtcattattggttcctggttctgggctggtgaagaggtcaaccaagaggctgaggaagagaccatttttgggtcgtggttctgggtcattgatgcggccagtgtggaatctggtgttggggtcagctgtgagtccaggacaaggtctgaggaagaagaggtcattggtccctggttttggtctggagaacaagttgatatagaggctggaatcggagaagaggccaggccaggagctgaagaagagacaatattcgggtcctggttttgggctgaaaaccagacctatatggattgtagggctgaaactagctgtgacaccatgcaaggggctgaggaggaggagcccattattgggtcctggttttggaccagagtagaagcttgtgtggagggtgatgtcaacagcaagtctagcctggaggacaaggaagaggccatgataccatgttttggagccaaagaagaggtcagtatgaagcatgggactggtgtcagatgcagatttatggcaggggctgaggagaccaataataagtcttgcttctgggcagaaaaagaaccctgtatgtatcctgccggtggaggaagttggaagtctaggccagaggaggaagaggacattgtcaattcgtggttctggtccagaaaatacacaaagccagaggccattatagggtcctggttatgggctacagaagagagtaatatagatgggactggagaaaaggccaagttactgactgaagaggagaccataatcaattcctggttctggaaagaagatgaagccatttcagaggctactgacagagaagagtccaggccagaagctgaggagggggacattattggttcttggttctgggctggagaagaggacagactagagccagctgctgagactagagaagaagacaggctagcagctgagaaagaaggtattgttgggtcctggtttggggccagagaagagaccattagaagagaggctgggtcttgcagcaaatccagtcctaaagctgaagaggaagaagtcattattgggtcctggttctgggaagaagaggccagtccggaggcagtggcaggagtcggctttgagtcaaagcctgggactgaggaggaagaaatcactgttgggtcctggttctggcctgaagaagaagccagtatacaggctggatctcaggcagtagaggaaatggagtcagagactgaagaggaaaccatttttgggtcctggttctgggatggaaaagaagtcagtgaagaagcaggaccatgctgtgtatccaagccagaggatgatgaagagatgattgttgagtcctggttctggtctagagacaaagccattaaggaaactggaactgtggccacctgtgagtccaagccagaaaatgaggaaggggccattgttgggtcttggtttgaggctgaagatgaggtagataacaggactgacaatggaagcaactgtgggtccaggacattagctgatgaagatgaggccatagtggggtcctggttctgggcaggagatgaggcccattttgaatcaaatcctagccccgtgttcagggccatttgcaggtccacgtgttcagttgaacaggagcctgatccttcacgcaggcctcagagttgggaggaggtcactgttcagttcaagcctggtccatggggtagggtcggcttcccatctataagcccctttagatttccgaaagaggcagcatctttattctgtgaaatgtttgggggcaaacccaggaacatggtacttagcccagaaggggaagatcaggaatctttgcttcagcctgatcagcctagtcctgagttcccatttcagtatgatccttcctacaggtcagtccaggaaattcgagagcatcttagggccaaggagagtacagagcctgagagttcatcctgtaactgcatacaatgtgagctgaaaattggttctgaagagtttgaagaactccttttattaatggaaaaaattcgggatccttttattcatgaaatatctaaaatcgcaatgggtatgagaagtgcttctcaatttacccgagatttcattcgagattcaggtgttgtctcacttattgaaaccttgcttaattatccgtcctcccgagttagaacaagttttttggaaaatatgattcgcatggccccaccttatccgaatctaaacataattcagacatacatatgtaaagtgtgtgaggaaacccttgcttatagcgtggattccccggaacagctgtctggaataaggatgattagacatctcactactactactgactatcacacactggttgccaattatatgtctgggtttctctccttattagctacaggcaatgccaaaacaaggtttcatgttttgaaaatgctactgaatttgtctgaaaatcttttcatgacaaaagaactactcagtgctgaagcagtgtcagaatttataggcctctttaacagggaagagacaaatgacaatattcaaattgttcttgcaatatttgagaatattggcaacaatatcaaaaaagaaacagtgttctctgatgatgatttcaatattgagccgcttatttctgcattccacaaagttgagaaatttgctaaggaactgcaaggcaaaacagacaatcaaaatgaccctgaaggggaccaagaaaattagtaatggttaattgctggcctcagattgtccttatgttcctgagttatgatccttgagtaatgctttgattttaatagttggttctgtgttgcaacatatatctttagtgctgacactaactttgtccaactctgtctgtaagctggagcatttttctgatgccagctgaatattagagctgaaaacacatttgttgatatttgtcttgtccacattgtgatgttcagtatttgagcttatagtgaactgagcaatcataaataagccacccttctgattgtcgttctactgtatatatatatatatttgagtgttgtttgtgtttcaataaagtcctatgttaaagttggcagaaatcacccttcttcttgaaattaaaatacagacccaatgataacacatgaacacacatagagataattaatatatgaataatatgttcctttcaaaagtttttttctcagctttaaacgcaaaaattaccaggggctgctatgtagggcatacttcagagaaaaagtagctacttcggttggactctgaagtttgggaaagatattggtggtgtaaaaaaaaaaaaaagcatggagttaggaaaaattttcctatgggagtgaggtatcctgtttgcctagagtgagtgagaggaatatattgagcaacatagaggatgacataagttttaaagagctgaggatttgcattttacagctcaaagtacaactgctgcttccatactacctaaagggcaaaagaataagacaggaaagcatagggatttgattgagtcaggaagacaatttaatcatgatggtaccatggtaagtgttaaggcaacatcatacagccattaaacatgatgatgtatagggttttaggaaaagccctgacatttttgatatttcatataatagagaacactggtgtcatacatgggaagtatgatcccatttgaaaaataaatgtgaataaattgacc

SEQ ID NO: 11668 - DNA, 5809 bp, Homo sapiens
  source 1..5809: mol_type = unassigned DNA
gcactttcgcgccgtatccctccgccccccttcccgacaccctcgcggagagcggttcttgccgcatcctgcgcagcccctgcccagtttggtgcagaggcgtggggggcgggactcgtctttgccattcggatcgctgggaaagcggtgggaatccaactgaagagcagccagaggagagctgaagagaggagggggaggccgatgacctgggctctgggcctctgaaggacccccttctgtcagctgtggggcttgacactacttgaacaagaaaaggagggggaaactgcaccacataagtgaagatccacctccagtggctgctctgctggtggtggggttgctgctgacaaccaccctcaacgggtctgcacccatccaggaaatctctgtcttcctcaagcttggttgtgcctgttctacactctatctgtattattgaattactgactgagactgtgtttgggaaggaggctgagtgactactggactggatattgactctaactcttgtttccaagcttatatcctcaatcacctaaagatcagagtgtgaagaaacaaacctgtgacagatctgtggttgaggtttagactgggggaggagtatagtactggactttctttgtaacttgtaccatgactggggcagagattgagtctggtgcccaggtcaagcctgaaaagaagcctggggaagaggttgtaggtggggctgagatagagaatgatgtccctctggtggtcagacccaaggttaggacccaggcccagataatgcctggggcaaggcccaagaataagtccaaggttatgcctggagcaagcaccaaagttgagacaagtgcagtgggtggggcacgccctaagagtaaggccaaggcaatacctgtttcacgatttaaggaagaagcccagatgtgggctcagcccaggtttggtgctgaaagattgtctaagacagagagaaactcccagaccaatatcatagcctctccacttgtcagtactgattctgtcttggttgctaaaacaaagtacctgtctgaggatagagaactggttaatacagacactgagagctttcctagaaggaaggcccattaccaagcaggattccagccttcttttaggtcaaaggaggagaccaatatggggtcctggtgctgtcctaggcctacatccaaacaagaagcctctcctaattctgatttcaaatgggtagacaaatctgtgagttccttgttctggagtggagatgaggtcactgcaaaatttcatcctgggaatagggtaaaagacagtaacagatccatgcacatggccaatcaagaggctaataccatgtctaggtcccaaactaaccaggagctctatattgcatctagttctggttctgaggatgagtctgttaagacaccctggttctgggccagagataaaaccaatacctggtctgggcccagggaagatcccaatagcaggtccaggtttaggtctaagaaagaagtctatgttgaatcaagttctggatctgagcatgaagaccatttggagtcctggtttggggctggaaaggaggccaaattcaggtccaaaatgagagctgggaaggaggccaataacagggccaggcacagggccaagcgagaagcttgcattgatttcatgcctgggtctatagatgtaattaaaaaagagtcctgtttctggcctgaagaaaatgctaataccttttcaaggcccatgatcaagaaagaggccagggccagagcaatgacaaaggaagaggccaaaaccaaggcccgagccagggccaagcaagaagccaggtcagaggaggaagccctcattgggacctggttctgggctacagacgagtccagcatggcagatgaagccagcatagagtccagtctacaagtggaggatgagtccataattgggagttggttctggactgaagaagaggccagtatggggactggggctagcagtaaatccagaccaaggactgatggggagcgtattggtgattccttatttggggctagggaaaagaccagtatgaaaactggggctgaggccacctctgaatctatactagcagctgatgatgaacaggtcattattggttcctggttctgggctggtgaagaggtcaaccaagaggctgaggaagagaccatttttgggtcgtggttctgggtcattgatgcggccagtgtggaatctggtgttggggtcagctgtgagtccaggacaaggtctgaggaagaagaggtcattggtccctggttttggtctggagaacaagttgatatagaggctggaatcggagaagaggccaggccaggagctgaagaagagacaatattcgggtcctggttttgggctgaaaaccagacctatatggattgtagggctgaaactagctgtgacaccatgcaaggggctgaggaggaggagcccattattgggtcctggttttggaccagagtagaagcttgtgtggagggtgatgtcaacagcaagtctagcctggaggacaaggaagaggccatgataccatgttttggagccaaagaagaggtcagtatgaagcatgggactggtgtcagatgcagatttatggcaggggctgaggagaccaataataagtcttgcttctgggcagaaaaagaaccctgtatgtatcctgccggtggaggaagttggaagtctaggccagaggaggaagaggacattgtcaattcgtggttctggtccagaaaatacacaaagccagaggccattatagggtcctggttatgggctacagaagagagtaatatagatgggactggagaaaaggccaagttactgactgaagaggagaccataatcaattcctggttctggaaagaagatgaagccatttcagaggctactgacagagaagagtccaggccagaagctgaggagggggacattattggttcttggttctgggctggagaagaggacagactagagccagctgctgagactagagaagaagacaggctagcagctgagaaagaaggtattgttgggtcctggtttggggccagagaagagaccattagaagagaggctgggtcttgcagcaaatccagtcctaaagctgaagaggaagaagtcattattgggtcctggttctgggaagaagaggccagtccggaggcagtggcaggagtcggctttgagtcaaagcctgggactgaggaggaagaaatcactgttgggtcctggttctggcctgaagaagaagccagtatacaggctggatctcaggcagtagaggaaatggagtcagagactgaagaggaaaccatttttgggtcctggttctgggatggaaaagaagtcagtgaagaagcaggaccatgctgtgtatccaagccagaggatgatgaagagatgattgttgagtcctggttctggtctagagacaaagccattaaggaaactggaactgtggccacctgtgagtccaagccagaaaatgaggaaggggccattgttgggtcttggtttgaggctgaagatgaggtagataacaggactgacaatggaagcaactgtgggtccaggacattagctgatgaagatgaggccatagtggggtcctggttctgggcaggagatgaggcccattttgaatcaaatcctagccccgtgttcagggccatttgcaggtccacgtgttcagttgaacaggagcctgatccttcacgcaggcctcagagttgggaggaggtcactgttcagttcaagcctggtccatggggtagggtcggcttcccatctataagcccctttagatttccgaaagaggcagcatctttattctgtgaaatgtttgggggcaaacccaggaacatggtacttagcccagaaggggaagatcaggaatctttgcttcagcctgatcagcctagtcctgagttcccatttcagtatgatccttcctacaggtcagtccaggaaattcgagagcatcttagggccaaggagagtacagagcctgagagttcatcctgtaactgcatacaatgtgagctgaaaattggttctgaagagtttgaagaactccttttattaatggaaaaaattcgggatccttttattcatgaaatatctaaaatcgcaatgggtatgagaagtgcttctcaatttacccgagatttcattcgagattcaggtgttgtctcacttattgaaaccttgcttaattatccgtcctcccgagttagaacaagttttttggaaaatatgattcgcatggccccaccttatccgaatctaaacataattcagacatacatatgtaaagtgtgtgaggaaacccttgcttatagcgtggattccccggaacagctgtctggaataaggatgattagacatctcactactactactgactatcacacactggttgccaattatatgtctgggtttctctccttattagctacaggcaatgccaaaacaaggtttcatgttttgaaaatgctactgaatttgtctgaaaatcttttcatgacaaaagaactactcagtgctgaagcagtgtcagaatttataggcctctttaacagggaagagacaaatgacaatattcaaattgttcttgcaatatttgagaatattggcaacaatatcaaaaaagaaacagtgttctctgatgatgatttcaatattgagccgcttatttctgcattccacaaagttgagaaatttgctaaggaactgcaaggcaaaacagacaatcaaaatgaccctgaaggggaccaagaaaattagtaatggttaattgctggcctcagattgtccttatgttcctgagttatgatccttgagtaatgctttgattttaatagttggttctgtgttgcaacatatatctttagtgctgacactaactttgtccaactctgtctgtaagctggagcatttttctgatgccagctgaatattagagctgaaaacacatttgttgatatttgtcttgtccacattgtgatgttcagtatttgagcttatagtgaactgagcaatcataaataagccacccttctgattgtcgttctactgtatatatatatatatttgagtgttgtttgtgtttcaataaagtcctatgttaaagttggcagaaatcacccttcttcttgaaattaaaatacagacccaatgataacacatgaacacacatagagataattaatatatgaataatatgttcctttcaaaagtttttttctcagctttaaacgcaaaaattaccaggggctgctatgtagggcatacttcagagaaaaagtagctacttcggttggactctgaagtttgggaaagatattggtggtgtaaaaaaaaaaaaaagcatggagttaggaaaaattttcctatgggagtgaggtatcctgtttgcctagagtgagtgagaggaatatattgagcaacatagaggatgacataagttttaaagagctgaggatttgcattttacagctcaaagtacaactgctgcttccatactacctaaagggcaaaagaataagacaggaaagcatagggatttgattgagtcaggaagacaatttaatcatgatggtaccatggtaagtgttaaggcaacatcatacagccattaaacatgatgatgtatagggttttaggaaaagccctgacatttttgatatttcatataatagagaacactggtgtcatacatgggaagtatgatcccatttgaaaaataaatgtgaataaattgacc

SEQ ID NO: 11669 - DNA, 5980 bp, Homo sapiens
  source 1..5980: mol_type = unassigned DNA
gacaccctcgcggagagcggttcttgccgcatcctgcgcagcccctgcccagtttggtgcagaggcgtggggggcgggactcgtctttgccattcggatcgctgggaaagcggtgggaatccaactgaagagcagccagaggagagctgaagagaggagggggaggccgatgacctgggctctgggcctctgaagcctggcaacgaggagacgatccgttcggagccgggcgctagagagaggtctggcgtattctgacaggacacagtgagcatctgtagaggagaggcttgaaataaaggaggagcacgaatattccctggatttctggaggcctgctttaaggctggccagttctgcaagaaaggcaaggaggaggagactggctcacacctctggaggacccccttctgtcagctgtggggcttgacactacttgaacaagaaaaggagggggaaactgcaccacataagtgaagatccacctccagtggctgctctgctggtggtggggttgctgctgacaaccaccctcaacgggtctgcacccatccaggaaatctctgtcttcctcaagcttggttgtgcctgttctacactctatctgtattattgaattactgactgagactgtgtttgggaaggaggctgagtgactactggactggatattgactctaactcttgtttccaagcttatatcctcaatcacctaaagatcagagtgtgaagaaacaaacctgtgacagatctgtggttgaggtttagactgggggaggagtatagtactggactttctttgtaacttgtaccatgactggggcagagattgagtctggtgcccaggtcaagcctgaaaagaagcctggggaagaggttgtaggtggggctgagatagagaatgatgtccctctggtggtcagacccaaggttaggacccaggcccagataatgcctggggcaaggcccaagaataagtccaaggttatgcctggagcaagcaccaaagttgagacaagtgcagtgggtggggcacgccctaagagtaaggccaaggcaatacctgtttcacgatttaaggaagaagcccagatgtgggctcagcccaggtttggtgctgaaagattgtctaagacagagagaaactcccagaccaatatcatagcctctccacttgtcagtactgattctgtcttggttgctaaaacaaagtacctgtctgaggatagagaactggttaatacagacactgagagctttcctagaaggaaggcccattaccaagcaggattccagccttcttttaggtcaaaggaggagaccaatatggggtcctggtgctgtcctaggcctacatccaaacaagaagcctctcctaattctgatttcaaatgggtagacaaatctgtgagttccttgttctggagtggagatgaggtcactgcaaaatttcatcctgggaatagggtaaaagacagtaacagatccatgcacatggccaatcaagaggctaataccatgtctaggtcccaaactaaccaggagctctatattgcatctagttctggttctgaggatgagtctgttaagacaccctggttctgggccagagataaaaccaatacctggtctgggcccagggaagatcccaatagcaggtccaggtttaggtctaagaaagaagtctatgttgaatcaagttctggatctgagcatgaagaccatttggagtcctggtttggggctggaaaggaggccaaattcaggtccaaaatgagagctgggaaggaggccaataacagggccaggcacagggccaagcgagaagcttgcattgatttcatgcctgggtctatagatgtaattaaaaaagagtcctgtttctggcctgaagaaaatgctaataccttttcaaggcccatgatcaagaaagaggccagggccagagcaatgacaaaggaagaggccaaaaccaaggcccgagccagggccaagcaagaagccaggtcagaggaggaagccctcattgggacctggttctgggctacagacgagtccagcatggcagatgaagccagcatagagtccagtctacaagtggaggatgagtccataattgggagttggttctggactgaagaagaggccagtatggggactggggctagcagtaaatccagaccaaggactgatggggagcgtattggtgattccttatttggggctagggaaaagaccagtatgaaaactggggctgaggccacctctgaatctatactagcagctgatgatgaacaggtcattattggttcctggttctgggctggtgaagaggtcaaccaagaggctgaggaagagaccatttttgggtcgtggttctgggtcattgatgcggccagtgtggaatctggtgttggggtcagctgtgagtccaggacaaggtctgaggaagaagaggtcattggtccctggttttggtctggagaacaagttgatatagaggctggaatcggagaagaggccaggccaggagctgaagaagagacaatattcgggtcctggttttgggctgaaaaccagacctatatggattgtagggctgaaactagctgtgacaccatgcaaggggctgaggaggaggagcccattattgggtcctggttttggaccagagtagaagcttgtgtggagggtgatgtcaacagcaagtctagcctggaggacaaggaagaggccatgataccatgttttggagccaaagaagaggtcagtatgaagcatgggactggtgtcagatgcagatttatggcaggggctgaggagaccaataataagtcttgcttctgggcagaaaaagaaccctgtatgtatcctgccggtggaggaagttggaagtctaggccagaggaggaagaggacattgtcaattcgtggttctggtccagaaaatacacaaagccagaggccattatagggtcctggttatgggctacagaagagagtaatatagatgggactggagaaaaggccaagttactgactgaagaggagaccataatcaattcctggttctggaaagaagatgaagccatttcagaggctactgacagagaagagtccaggccagaagctgaggagggggacattattggttcttggttctgggctggagaagaggacagactagagccagctgctgagactagagaagaagacaggctagcagctgagaaagaaggtattgttgggtcctggtttggggccagagaagagaccattagaagagaggctgggtcttgcagcaaatccagtcctaaagctgaagaggaagaagtcattattgggtcctggttctgggaagaagaggccagtccggaggcagtggcaggagtcggctttgagtcaaagcctgggactgaggaggaagaaatcactgttgggtcctggttctggcctgaagaagaagccagtatacaggctggatctcaggcagtagaggaaatggagtcagagactgaagaggaaaccatttttgggtcctggttctgggatggaaaagaagtcagtgaagaagcaggaccatgctgtgtatccaagccagaggatgatgaagagatgattgttgagtcctggttctggtctagagacaaagccattaaggaaactggaactgtggccacctgtgagtccaagccagaaaatgaggaaggggccattgttgggtcttggtttgaggctgaagatgaggtagataacaggactgacaatggaagcaactgtgggtccaggacattagctgatgaagatgaggccatagtggggtcctggttctgggcaggagatgaggcccattttgaatcaaatcctagccccgtgttcagggccatttgcaggtccacgtgttcagttgaacaggagcctgatccttcacgcaggcctcagagttgggaggaggtcactgttcagttcaagcctggtccatggggtagggtcggcttcccatctataagcccctttagatttccgaaagaggcagcatctttattctgtgaaatgtttgggggcaaacccaggaacatggtacttagcccagaaggggaagatcaggaatctttgcttcagcctgatcagcctagtcctgagttcccatttcagtatgatccttcctacaggtcagtccaggaaattcgagagcatcttagggccaaggagagtacagagcctgagagttcatcctgtaactgcatacaatgtgagctgaaaattggttctgaagagtttgaagaactccttttattaatggaaaaaattcgggatccttttattcatgaaatatctaaaatcgcaatgggtatgagaagtgcttctcaatttacccgagatttcattcgagattcaggtgttgtctcacttattgaaaccttgcttaattatccgtcctcccgagttagaacaagttttttggaaaatatgattcgcatggccccaccttatccgaatctaaacataattcagacatacatatgtaaagtgtgtgaggaaacccttgcttatagcgtggattccccggaacagctgtctggaataaggatgattagacatctcactactactactgactatcacacactggttgccaattatatgtctgggtttctctccttattagctacaggcaatgccaaaacaaggtttcatgttttgaaaatgctactgaatttgtctgaaaatcttttcatgacaaaagaactactcagtgctgaagcagtgtcagaatttataggcctctttaacagggaagagacaaatgacaatattcaaattgttcttgcaatatttgagaatattggcaacaatatcaaaaaagaaacagtgttctctgatgatgatttcaatattgagccgcttatttctgcattccacaaagttgagaaatttgctaaggaactgcaaggcaaaacagacaatcaaaatgaccctgaaggggaccaagaaaattagtaatggttaattgctggcctcagattgtccttatgttcctgagttatgatccttgagtaatgctttgattttaatagttggttctgtgttgcaacatatatctttagtgctgacactaactttgtccaactctgtctgtaagctggagcatttttctgatgccagctgaatattagagctgaaaacacatttgttgatatttgtcttgtccacattgtgatgttcagtatttgagcttatagtgaactgagcaatcataaataagccacccttctgattgtcgttctactgtatatatatatatatttgagtgttgtttgtgtttcaataaagtcctatgttaaagttggcagaaatcacccttcttcttgaaattaaaatacagacccaatgataacacatgaacacacatagagataattaatatatgaataatatgttcctttcaaaagtttttttctcagctttaaacgcaaaaattaccaggggctgctatgtagggcatacttcagagaaaaagtagctacttcggttggactctgaagtttgggaaagatattggtggtgtaaaaaaaaaaaaaagcatggagttaggaaaaattttcctatgggagtgaggtatcctgtttgcctagagtgagtgagaggaatatattgagcaacatagaggatgacataagttttaaagagctgaggatttgcattttacagctcaaagtacaactgctgcttccatactacctaaagggcaaaagaataagacaggaaagcatagggatttgattgagtcaggaagacaatttaatcatgatggtaccatggtaagtgttaaggcaacatcatacagccattaaacatgatgatgtatagggttttaggaaaagccctgacatttttgatatttcatataatagagaacactggtgtcatacatgggaagtatgatcccatttgaaaaataaatgtgaataaattgacc

SEQ ID NO: 11670 - DNA, 2101 bp, Homo sapiens
  source 1..2101: mol_type = unassigned DNA
acgggccacaggccaagggcagcagtcaggcctgctctgtctgtgaacgctcccggcttggcctcggctgatgggccctcacgcctgaagcgggcaggaagctccgggatggatttcgggtctttggagaccgtggtggccaactctgccttcatcgccgcccgaggcagctttgacggcagcagctcccaaccctcccgggacaagaagtacctggccaagctcaagctgcccccgctgtccaagtgtgagtccctccgcgacagcctcagcctggagtttgagagtgtgtgcttggagcagcccatcggcaagaagctctttcagcagttcctacaatcggcagagaagcacctgccggccctggagctctggaaagacatcgaggactatgacacggcagacaatgacctccagccacagaaggcccagaccatcctggcccagtacctggacccccaggccaaactcttctgcagcttcctggatgaggggatagtggcgaagtttaaggaggggcctgtggagatccaggacgggctcttccagcccctgctgcaggccaccctggcacacctgggccaagcccccttccaggagtacctgggcagcctgtacttcctgaggttcctgcagtggaagtggctggaagcccagcccatgggggaggactggttcctggacttcagggtcctagggaaagggggcttcggggaggtgtcggcctgccagatgaaggcgaccggcaagctgtatgcctgcaagaagctgaacaagaagcggctgaagaagaggaagggctaccagggtgctatggtggagaagaagattctgatgaaagtacacagcaggttcatcgtgtctctggcctatgcgtttgaaaccaaagccgacctctgtctggtgatgaccatcatgaacggaggtgacatcaggtaccacatctacaacgtgaatgaggagaaccctggcttcccggagccgcgcgccctcttctacacggcgcagatcatctgcggcctggagcacctgcaccagaggcggatcgtctaccgcgacctcaagcccgagaacgtgctgctggacaatgacggcaatgtccggatctctgaccttgggctggccgtggagctgctggacggacagagcaagaccaagggctacgcagggaccccaggtttcatggcccccgagctcctgcagggcgaggagtacgacttctccgtggactactttgccctgggggtcaccctgtatgagatgattgcggccagaggacccttccgagcccgtggagagaaggtggagaacaaggagctgaagcaccggatcatctcagagcccgtgaagtaccctgataagttcagccaggccagcaaggacttctgcgaggcgctgctggagaaggacccggagaagcgcctggggttcagagatgagacctgcgacaagctccgtgcccaccccctcttcaaggaccttaactggaggcagctggaggctgggatgctgatgccccctttcatcccagactccaaaactgtctacgcaaaggatattcaggacgtgggtgccttttccaccgtcaaaggtgtggcctttgacaaaacagacacagaattctttcaggaatttgccactggcaactgccccatcccctggcaggaggagatgatcgagacgggcatctttggcgagctgaacgtgtggcgctcggacggtcagatgccggacgacatgaagggcatctccgggggctccagctcctcgtccaagtcagggatgtgtctggtttcctaggtgacgccccagagtccacgtggaggaaaaggacccatacggctcgatgggggccgcctgcctccgtggtgccagcctggggtctgctagcaaggggacacgtggttccctccacccaggtccccatcacgccatctccttgcggcccaaggaggagaaagcccacatcggcctgagccgccagacgcacatgctggtgccgtgagcccccgactgcatatttcacgtcttttgctccatctcactgagaagacataagatgctctccagagggagtaagccaaaaatctacaaactctta

SEQ ID NO: 11671 - DNA, 548 bp, Homo sapiens
  source 1..548: mol_type = unassigned DNA
atgcgcggtcctagtttgagttcaggggcgggagaatttgtgaacagagcaggtttcatggcccccgagctcctgcagggcgaggagtacgacttctccgtggactactttgccctgggggtcaccctgtatgagatgattgcggccagaggacccttccgagcccgtggagagaaggtggagaacaaggagctgaagcaccggatcatctcagagcccgtgaagtaccctgataagttcagccaggccagcaaggacttctgcgaggcgctgctggagaaggacccggagaagcgcctggggttcagagatgagacctgcgacaagctccgtgcccaccccctcttcaaggaccttaactggaggcagctggaggctgggatgctgatgccccctttcatcccagactccaaaactgtctacgcaaaggatattcaggacgtgggtgccttttccaccgtcaaaggtgtggcctttgacaaaacagacacagaattctttcaggaatttgccactggcaactgccccatcccctggcaggaggagat

SEQ ID NO: 11672 - DNA, 1031 bp, Homo sapiens
  source 1..1031: mol_type = unassigned DNA
aaagcatccgagggagccggaggggaggagaatggagtgacagagacacgcggagggtggggggtgggggggagcgtgttgagggaggggggaggggggacacagagggaggaagaagcggcggcggcggcggcggcggcggcggctcctctttgcagagggggaaactcttgggctgagagcaggaataatgcggtaggcaaggcgggctgctggctcccccggctccggcagcagcggcggcagcccgagcagcggcagcagcagcggcagcaccccaggcgctgacagccccgccggccggctccgttgctgaccgccgactgtcaatggagctggaaaacatcgtggccaacacggtcttgctgaaagccagggaagggggcggaggaaagcgcaaagggaaaagcaagaagtggaaagaaatcctgaagttccctcacattagccagtgtgaagacctccgaaggaccataggggagctgagcggatcgctgatctcctggagctcatccaccaaggagcatgggagaccaactgaaattaagatgagatgacaaatcaagaaagttccacagggtatggagcaggttgctgagctgcagaaccaaggcaaagatctatccccacttccctggaggaagtggcgtccctcctggcttaaaggatctctctgcgagctccctgagggcctggaccacaggctctccatctgggcgtctccattgctgtagcagcatgagtgggtggatggatgttgccttctcttcaacctggaagccaggactgtgagtggcagccatgagcactgagacagattcctaggccaggtgcagcggtgcaggcctgagcattgagacagattcctaggccagctgcagcggcgcaagcctggaaccccagtgctttgaggggcggaggcaggaggattgctcaaacccaggagtccgaggatacagtgagctatgaatgtgctgctgcaccgctccagcctaggtgacagagcgagaccctctaaaaaaaagaaaaag

SEQ ID NO: 11673 - DNA, 1748 bp, Homo sapiens
  source 1..1748: mol_type = unassigned DNA
gttttagagtgccttcttcaacatacgctacttagaccgggcgaattcctcccaaaaaaaccttgccctcagacagagattactgcagtttatgtgacaagcagccaatcgggaggctgcttttccggcagttttgtgaaaccaggcctgggctggagtgttacattcagttcctggactccgtggcagaatatgaagttactccagatgaaaaactgggagagaaagggaaggaaattatgaccaagtacctcaccccaaagtcccctgttttcatagcccaagttggccaagacctggtctcccagacggaggagaagctcctacagaagccgtgcaaagaactcttttctgcctgtgcacagtctgtccacgagtacctgaggggagaaccattccacgaatatctggacagcatgttttttgaccgctttctccagtggaagtggttggaaaggcaaccggtgaccaaaaacactttcaggcagtatcgagtgctaggaaaagggggcttcggggaggtctgtgcctgccaggttcgggccacgggtaaaatgtatgcctgcaagcgcttggagaagaagaggatcaaaaagaggaaaggggagtccatggccctcaatgagaagcagatcctcgagaaggtcaacagtcagtttgtggtcaacctggcctatgcctacgagaccaaggatgcactgtgcttggtcctgaccatcatgaatgggggtgacctgaagttccacatctacaacatgggcaaccctggcttcgaggaggagcgggccttgttttatgcggcagagatcctctgcggcttagaagacctccaccgtgagaacaccgtctaccgagatctgaaacctgaaaacatcctgttagatgattatggccacattaggatctcagacctgggcttggctgtgaagatccccgagggagacctgatccgcggccgggtgggcactgttggctacatggctccagaggtcctgaacaaccagaggtacggcctgagccccgactactggggccttggctgcctcatctatgagatgatcgagggccagtcgccgttccgcggccgcaaggagaaggtgaagcgggaggaggtggaccgccgggtcctggagacggaggaggtgtactcccacaagttctccgaggaggccaagtccatctgcaagatgctgctcacgaaagatgcgaagcagaggctgggctgccaggaggagggggctgcagaggtcaagagacaccccttcttcaggaacatgaacttcaagcgcttagaagccgggatgttggaccctcccttcgttccagacccccgcgctgtgtactgtaaggacgtgctggacatcgagcagttctccactgtgaagggcgtcaatctggaccacacagacgacgacttctactccaagttctccacgggctctgtgtccatcccatggcaaaacgagatgatagaaacagaatgctttaaggagctgaacgtgtttggacctaatggtaccctcccgccagatctgaacagaaaccaccctccggaaccgcccaagaaagggctgctccagagactcttcaagcggcagcatcagaacaattccaagagttcgcccagctccaagaccagttttaaccaccacataaactcaaaccatgtcagctcgaactccaccggaagcagctagtttcggctctggcctccaagtccacagtggaaccagcccagacccttctcc

SEQ ID NO: 11674 - DNA, 2654 bp, Homo sapiens
  source 1..2654: mol_type = unassigned DNA
aaagcatccgagggagccggaggggaggagaatggagtgacagagacacgcggagggtggggggtgggggggagcgtgttgagggaggggggaggggggacacagagggaggaagaagcggcggcggcggcggcggcggcggcggctcctctttgcagagggggaaactcttgggctgagagcaggaataatgcggtaggcaaggcgggctgctggctcccccggctccggcagcagcggcggcagcccgagcagcggcagcagcagcggcagcaccccaggcgctgacagccccgccggccggctccgttgctgaccgccgactgtcaatggagctggaaaacatcgtggccaacacggtcttgctgaaagccagggaagggggcggaggaaagcgcaaagggaaaagcaagaagtggaaagaaatcctgaagttccctcacattagccagtgtgaagacctccgaaggaccatagacagagattactgcagtttatgtgacaagcagccaatcgggaggctgcttttccggcagttttgtgaaaccaggcctgggctggagtgttacattcagttcctggactccgtggcagaatatgaagttactccagatgaaaaactgggagagaaagggaaggaaattatgaccaagtacctcaccccaaagtcccctgttttcatagcccaagttggccaagacctggtctcccagacggaggagaagctcctacagaagccgtgcaaagaactcttttctgcctgtgcacagtctgtccacgagtacctgaggggagaaccattccacgaatatctggacagcatgttttttgaccgctttctccagtggaagtggttggaaaggcaaccggtgaccaaaaacactttcaggcagtatcgagtgctaggaaaagggggcttcggggaggtctgtgcctgccaggttcgggccacgggtaaaatgtatgcctgcaagcgcttggagaagaagaggatcaaaaagaggaaaggggagtccatggccctcaatgagaagcagatcctcgagaaggtcaacagtcagtttgtggtcaacctggcctatgcctacgagaccaaggatgcactgtgcttggtcctgaccatcatgaatgggggtgacctgaagttccacatctacaacatgggcaaccctggcttcgaggaggagcgggccttgttttatgcggcagagatcctctgcggcttagaagacctccaccgtgagaacaccgtctaccgagatctgaaacctgaaaacatcctgttagatgattatggccacattaggatctcagacctgggcttggctgtgaagatccccgagggagacctgatccgcggccgggtgggcactgttggctacatggctccagaggtcctgaacaaccagaggtacggcctgagccccgactactggggccttggctgcctcatctatgagatgatcgagggccagtcgccgttccgcggccgcaaggagaaggtgaagcgggaggaggtggaccgccgggtcctggagacggaggaggtgtactcccacaagttctccgaggaggccaagtccatctgcaagatgctgctcacgaaagatgcgaagcagaggctgggctgccaggaggagggggctgcagaggtcaagagacaccccttcttcaggaacatgaacttcaagcgcttagaagccgggatgttggaccctcccttcgttccagacccccgcgctgtgtactgtaaggacgtgctggacatcgagcagttctccactgtgaagggcgtcaatctggaccacacagacgacgacttctactccaagttctccacgggctctgtgtccatcccatggcaaaacgagatgatagaaacagaatgctttaaggagctgaacgtgtttggacctaatggtaccctcccgccagatctgaacagaaaccaccctccggaaccgcccaagaaagggctgctccagagactcttcaagcggcagcatcagaacaattccaagagttcgcccagctccaagaccagttttaaccaccacataaactcaaaccatgtcagctcgaactccaccggaagcagctagtttcggctctggcctccaagtccacagtggaaccagcccagacccttctccttagaagtggaagtagtggagcccctgctctggtggggctgccaggggagaccccgggagccggggaaggaggccgtccatcccgtcgacgtagaacctcgaggtttctcaaagaaatttccactcaggtctgttttccgaggcggccccggccggggtggattggatttgtctttggtgaacattgcaatagaaatccaattggatacgacaacttgcacgtattttaatagcgtcataactagaactgaattttgtctttatgatttttaaagaaaagttttgtaaatttctctactgtctcagtttacattttgtatatttgtatttaaatgaaagtgagactttgagggtgtatattttctgtgcagccactgttaagccatgtgttccaaggcattttagcggggagggggttatcaaaaaaaaaaaaatgtgactcaagacttccagagcctcaaatgagaaaatgtctttattaaatgtagaaagtgatccata

SEQ ID NO: 11675 - DNA, 1949 bp, Homo sapiens
  source 1..1949: mol_type = unassigned DNA
agactattgctggaaaccatccgctgggatgtttcttagggaaatcccgtcgtgtggaaggaagccttttaaaggcaaagtcagatgttgaggaattagccttttcatagaattatcaaaggatggctgtacagaccacctagaaaataattcagtatttcaggtttttcttttctgggagtgtgataactgaaattgttagattttggctcagttaagaaaagaaagggggcggaggaaagcgcaaagggaaaagcaagaagtggaaagaaatcctgaagttccctcacattagccagtgtgaagacctccgaaggaccatagacagagattactgcagtttatgtgacaagcagccaatcgggaggctgcttttccggcagttttgtgaaaccaggcctgggctggagtgttacattcagttcctggactccgtggcagaatatgaagttactccagatgaaaaactgggagagaaagggaaggaaattatgaccaagtacctcaccccaaagtcccctgttttcatagcccaagttggccaagacctggtctcccagacggaggagaagctcctacagaagccgtgcaaagaactcttttctgcctgtgcacagtctgtccacgagtacctgaggggagaaccattccacgaatatctggacagcatgttttttgaccgctttctccagtggaagtggttggaaaggcaaccggtgaccaaaaacactttcaggcagtatcgagtgctaggaaaagggggcttcggggaggtctgtgcctgccaggttcgggccacgggtaaaatgtatgcctgcaagcgcttggagaagaagaggatcaaaaagaggaaaggggagtccatggccctcaatgagaagcagatcctcgagaaggtcaacagtcagtttgtggtcaacctggcctatgcctacgagaccaaggatgcactgtgcttggtcctgaccatcatgaatgggggtgacctgaagttccacatctacaacatgggcaaccctggcttcgaggagggggctgcagaggtcaagagacaccccttcttcaggaacatgaacttcaagcgcttagaagccgggatgttggaccctcccttcgttccagacccccgcgctgtgtactgtaaggacgtgctggacatcgagcagttctccactgtgaagggcgtcaatctggaccacacagacgacgacttctactccaagttctccacgggctctgtgtccatcccatggcaaaacgagatgatagaaacagaatgctttaaggagctgaacgtgtttggacctaatggtaccctcccgccagatctgaacagaaaccaccctccggaaccgcccaagaaagggctgctccagagactcttcaagcggcagcatcagaacaattccaagagttcgcccagctccaagtccacagtggaaccagcccagacccttctccttagaagtggaagtagtggagcccctgctctggtggggctgccaggggagaccccgggagccggggaaggaggccgtccatcccgtcgacgtagaacctcgaggtttctcaaagaaatttccactcaggtctgttttccgaggcggccccggccggggtggattggatttgtctttggtgaacattgcaatagaaatccaattggatacgacaacttgcacgtattttaatagcgtcataactagaactgaattttgtctttatgatttttaaagaaaagttttgtaaatttctctactgtctcagtttacattttgtatatttgtatttaaatgaaagtgagactttgagggtgtatattttctgtgcagccactgttaagccatgtgttccaaggcattttagcggggagggggttatcaaaaaaaaaaaaatgtgactcaagacttccagagcctcaaatgagaaaatgtctttattaaatgtag

SEQ ID NO: 11676 - DNA, 2939 bp, Homo sapiens
  source 1..2939: mol_type = unassigned DNA
agagtgcgcggctggctgcggcggccggggaggccggggaggccgcggcgcggtcactgcgagccgagccgagccgcgccgagccgcgccgatcgccatccggcctcggcactcgcgcgcgatcccggccggcggcgcggcccggcgggccaggcggcgccacagcccatggagctcgagaacatcgtagcgaacacggtgctactcaaggcccgggaaggtggcggtggaaatcgcaaaggcaaaagcaagaaatggcggcagatgctccagttccctcacatcagccagtgcgaagagctgcggctcagcctcgagcgtgactatcacagcctgtgcgagcggcagcccattgggcgcctgctgttccgagagttctgtgccacgaggccggagctgagccgctgcgtcgccttcctggatggggtggccgagtatgaagtgaccccggatgacaagcggaaggcatgtgggcggcagctaacgcagaattttctgagccacacgggtcctgacctcatccctgaggtcccccggcagctggtgacgaactgcacccagcggctggagcagggtccctgcaaagaccttttccaggaactcacccggctgacccacgagtacctgagcgtggccccttttgccgactacctcgacagcatctacttcaaccgtttcctgcagtggaagtggctggaaaggcagccagtgaccaaaaacaccttcaggcaataccgagtcctgggcaaaggtggctttggggaggtgtgcgcctgccaggtgcgggccacaggtaagatgtatgcctgcaagaagctagagaaaaagcggatcaagaagcggaaaggggaggccatggcgctgaacgagaagcagatcctggagaaagtgaacagtaggtttgtagtgagcttggcctacgcctatgagaccaaggacgcgctgtgcctggtgctgacactgatgaacgggggcgacctcaagttccacatctaccacatgggccaggctggcttccccgaagcgcgggccgtcttctacgccgccgagatctgctgtggcctggaggacctgcaccgggagcgcatcgtgtacagggacctgaagcccgagaacatcttgctggatgaccacggccacatccgcatctctgacctgggactagctgtgcatgtgcccgagggccagaccatcaaagggcgtgtgggcaccgtgggttacatggctccggaggtggtgaagaatgaacggtacacgttcagccctgactggtgggcgctcggctgcctcctgtacgagatgatcgcaggccagtcgcccttccagcagaggaagaagaagatcaagcgggaggaggtggagcggctggtgaaggaggtccccgaggagtattccgagcgcttttccccgcaggcccgctcactttgctcacagctcctctgcaaggaccctgccgaacgcctggggtgtcgtgggggcagtgcccgcgaggtgaaggagcaccccctctttaagaagctgaacttcaagcggctgggagctggcatgctggagccgccgttcaagcctgacccccaggccatttactgcaaggatgttctggacattgaacagttctctacggtcaagggcgtggagctggagcctaccgaccaggacttctaccagaagtttgccacaggcagtgtgcccatcccctggcagaacgagatggtggagaccgagtgcttccaagagctgaatgtctttgggctggatggctcagttcccccagacctggactggaagggccagccacctgcacctcctaaaaagggactgctgcagagactcttcagtcgccaagattgctgtggaaactgcagcgacagcgaggaagagctccccacccgcctctagcccccagcccgaggcccccaccagcagttggcggtagcagctactccgagcgccgtttacagttttgcacagtgatcttccccattgtccactcaagtcgtggcctggggaacacagacggagctgtccccagtgtcctccgtccctcagcccctggcctggctgagtttggcagggcctgggccatccctgggacaaaggtgcgtcccttcagctcttctccgtggagctcggggctttctgtatttatgtatttgtacgaatgtatatagcgaccagagcattcttaattcccgccgcagacctggcgcccccgccttggctcctgggggcagccagccctggctgggagagcgggagctggcagaggagccactgccaaactcaaggctcctctggcccagcttggatggctgagggtggtcacacccctgagccttcagcactgtgctggccaccccggcctctgagtaagactcgtgcctccccctgctgccctgggctcaggctgctaccctctggggcccaaagctgtcccttctcagtgcttgtcagcgctgggtctggggcctctgtatgccctaggcctgtgccaaagtggccagagattgggctgcctgtgatacccatcagcccactgccccggccggcccagataggtctgcctctgccttccagctcccacagcctggtccctgatactgggctctgtcctgcagacacctctttcagaaacgcccaagcccagcccctaggagggggtggggcatccctggtcaaccctcaaacattccggactcccctcataacaatagacacatgtgcccagcaataatccgccccttcctgtgtgcgcctgtggggtgcgtgcgcgcgcgtgtgtacctgtgtgggtgaaggggatagggcgaggctgtgcctgtgccccaggtcccagccctggcccttcccagactgtgatggccatcctggtcccagtgttagggtagcatgggattacagggccctgttttttccatatttaaagccaatttttatta

SEQ ID NO: 11677 - DNA, 1789 bp, Homo sapiens
  source 1..1789: mol_type = unassigned DNA
cccatggagctcgagaacatcgtagcgaacacggtgctactcaaggcccgggaaggtggcggtggaaatcgcaaaggcaaaagcaagaaatggcggcagatgctccagttccctcacatcagccagtgcgaagagctgcggctcagcctcgagcgtgactatcacagcctgtgcgagcggcagcccattgggcgcctgctgttccgagagttctgtgccacgaggccggagctgagccgctgcgtcgccttcctggatggggtggccgagtatgaagtgaccccggatgacaagcggaaggcatgtgggcggcagctaacgcagaattttctgagccacacgggtcctgacctcatccctgaggtcccccggcagctggtgacgaactgcacccagcggctggagcagggtccctgcaaagaccttttccaggaactcacccggctgacccacgagtacctgagcgtggccccttttgccgactacctcgacagcatctacttcaaccgtttcctgcagtggaagtggctggaaaggcagccagtgaccaaaaacaccttcaggcaataccgagtcctgggcaaaggtggctttggggaggtgtgcgcctgccaggtgcgggccacaggtaagatgtatgcctgcaagaagctagagaaaaagcggatcaagaagcggaaaggggaggccatggcgctgaacgagaagcagatcctggagaaagtgaacagtaggtttgtagtgagcttggcctacgcctatgagaccaaggacgcgctgtgcctggtgctgacactgatgaacgggggcgacctcaagttccacatctaccacatgggccaggctggcttccccgaagcgcgggccgtcttctacgccgccgagatctgctgtggcctggaggacctgcaccgggagcgcatcgtgtacagggacctgaagcccgagaacatcttgctggatgaccacggccacatccgcatctctgacctgggactagctgtgcatgtgcccgagggccagaccatcaaagggcgtgtgggcaccgtgggttacatggctccggaggtggtgaagaatgaacggtacacgttcagccctgactggtgggcgctcggctgcctcctgtacgagatgatcgcaggccagtcgcccttccagcagaggaagaagaagatcaagcgggaggaggtggagcggctggtgaaggaggtccccgaggagtattccgagcgcttttccccgcaggcccgctcactttgctcacagctcctctgcaaggaccctgccgaacgcctggggtgtcgtgggggcagtgcccgcgaggtgaaggagcaccccctctttaagaagctgaacttcaagcggctgggagctggcatgctggagccgccgttcaagcctgacccccaggccatttactgcaaggatgttctggacattgaacagttctctacggtcaagggcgtggagctggagcctaccgaccaggacttctaccagaagtttgccacaggcagtgtgcccatcccctggcagaacgagatggtggagaccgagtgcttccaagagctgaatgtctttgggctggatggctcagttcccccagacctggactggaagggccagccacctgcacctcctaaaaagggactgctgcagagactcttcagtcgccaaaggtgagcagtgtgggctccccgtgggttggccttgctgcctggcctcggggagccacgggcagcccttccatggcaaaggcaagatgtgggagaaagaagtctggtgc

SEQ ID NO: 11678 - DNA, 2571 bp, Homo sapiens
  source 1..2571: mol_type = unassigned DNA
cccatggagctcgagaacatcgtagcgaacacggtgctactcaaggcccgggaaggtggcggtggaaatcgcaaaggcaaaagcaagaaatggcggcagatgctccagttccctcacatcagccagtgcgaagagctgcggctcagcctcgagcgtgactatcacagcctgtgcgagcggcagcccattgggcgcctgctgttccgagagttctgtgccacgaggccggagctgagccgctgcgtcgccttcctggatggggtggccgagtatgaagtgaccccggatgacaagcggaaggcatgtgggcggcagctaacgcagaattttctgagccacacgggtcctgacctcatccctgaggtcccccggcagctggtgacgaactgcacccagcggctggagcagggtccctgcaaagaccttttccaggaactcacccggctgacccacgagtacctgagcgtggccccttttgccgactacctcgacagcatctacttcaaccgtttcctgcagtggaagtggctggaaaggcagccagtgaccaaaaacaccttcaggcaataccgagtcctgggcaaaggtggctttggggaggtgtgcgcctgccaggtgcgggccacaggtaagatgtatgcctgcaagaagctagagaaaaagcggatcaagaagcggaaaggggaggccatggcgctgaacgagaagcagatcctggagaaagtgaacagtaggtttgtagtgagcttggcctacgcctatgagaccaaggacgcgctgtgcctggtgctgacactgatgaacgggggcgacctcaagttccacatctaccacatgggccaggctggcttccccgaagcgcgggccgtcttctacgccgccgagatctgctgtggcctggaggacctgcaccgggagcgcatcgtgtacagggacctgaagcccgagaacatcttgctggatgaccacggccacatccgcatctctgacctgggactagctgtgcatgtgcccgagggccagaccatcaaagggcgtgtgggcaccgtgggttacatggctccggaggtggtgaagaatgaacggtacacgttcagccctgactggtgggcgctcggctgcctcctgtacgagatgatcgcaggccagtcgcccttccagcagaggaagaagaagatcaagcgggaggaggtggagcggctggtgaaggaggtccccgaggagtattccgagcgcttttccccgcaggcccgctcactttgctcacagctcctctgcaaggaccctgccgaacgcctggggtgtcgtgggggcagtgcccgcgaggtgaaggagcaccccctctttaagaagctgaacttcaagcggctgggagctggcatgctggagccgccgttcaagcctgacccccaggccatttactgcaaggatgttctggacattgaacagttctctacggtcaagggcgtggagctggagcctaccgaccaggacttctaccagaagtttgccacaggcagtgtgcccatcccctggcagaacgagatggtggagaccgagtgcttccaagagctgaatgtctttgggctggatggctcagttcccccagacctggactggaagggccagccacctgcacctcctaaaaagggactgctgcagagactcttcagtcgccaaaggattgctgtggaaactgcagcgacagcgaggaagagctccccacccgcctctagcccccagcccgaggcccccaccagcagttggcggtagcagctactccgagcgccgtttacagttttgcacagtgatcttccccattgtccactcaagtcgtggcctggggaacacagacggagctgtccccagtgtcctccgtccctcagcccctggcctggctgagtttggcagggcctgggccatccctgggacaaaggtgcgtcccttcagctcttctccgtggagctcggggctttctgtatttatgtatttgtacgaatgtatatagcgaccagagcattcttaattcccgccgcagacctggcgcccccgccttggctcctgggggcagccagccctggctgggagagcgggagctggcagaggagccactgccaaactcaaggctcctctggcccagcttggatggctgagggtggtcacacccctgagccttcagcactgtgctggccaccccggcctctgagtaagactcgtgcctccccctgctgccctgggctcaggctgctaccctctggggcccaaagctgtcccttctcagtgcttgtcagcgctgggtctggggcctctgtatgccctaggcctgtgccaaagtggccagagattgggctgcctgtgatacccatcagcccactgccccggccggcccagataggtctgcctctgccttccagctcccacagcctggtccctgatactgggctctgtcctgcagacacctctttcagaaacgcccaagcccagcccctaggagggggtggggcatccctggtcaaccctcaaacattccggactcccctcataacaatagacacatgtgcccagcaataa

SEQ ID NO: 11679 - DNA, 3239 bp, Homo sapiens
  source 1..3239: mol_type = unassigned DNA
accctccacgggtcccacccacaggccacaggactcactgtaaatcccttggacgttgtctcacccgggaagggaaagcagccagcagccctccagccctcttgtgctttccctgggagtgcgccccgtgctcagccatggtggacatgggggccctggacaacctgatcgccaacaccgcctacctgcaggcccggaagccctcggactgcgacagcaaagagctgcagcggcggcggcgtagcctggccctgcccgggctgcagggctgcgcggagctccgccagaagctgtccctgaacttccacagcctgtgtgagcagcagcccatcggtcgccgcctcttccgtgacttcctagccacagtgcccacgttccgcaaggcggcaaccttcctagaggacgtgcagaactgggagctggccgaggagggacccaccaaagacagcgcgctgcaggggctggtggccacttgtgcgagtgcccctgccccggggaacccgcaacccttcctcagccaggccgtggccaccaagtgccaagcagccaccactgaggaagagcgagtggctgcagtgacgctggccaaggctgaggccatggctttcttgcaagagcagccctttaaggatttcgtgaccagcgccttctacgacaagtttctgcagtggaaactcttcgagatgcaaccagtgtcagacaagtacttcactgagttcagagtgctggggaaaggtggttttggggaggtatgtgccgtccaggtgaaaaacactgggaagatgtatgcctgtaagaaactggacaagaagcggctgaagaagaaaggtggcgagaagatggctctcttggaaaaggaaatcttggagaaggtcagcagccctttcattgtctctctggcctatgcctttgagagcaagacccatctctgccttgtcatgagcctgatgaatgggggagacctcaagttccacatctacaacgtgggcacgcgtggcctggacatgagccgggtgatcttttactcggcccagatagcctgtgggatgctgcacctccatgaactcggcatcgtctatcgggacatgaagcctgagaatgtgcttctggatgacctcggcaactgcaggttatctgacctggggctggccgtggagatgaagggtggcaagcccatcacccagagggctggaaccaatggttacatggctcctgagatcctaatggaaaaggtaagttattcctatcctgtggactggtttgccatgggatgcagcatttatgaaatggttgctggacgaacaccattcaaagattacaaggaaaaggtcagtaaagaggatctgaagcaaagaactctgcaagacgaggtcaaattccagcatgataacttcacagaggaagcaaaagatatttgcaggctcttcttggctaagaaaccagagcaacgcttaggaagcagagaaaagtctgatgatcccaggaaacatcatttctttaaaacgatcaactttcctcgcctggaagctggcctaattgaacccccatttgtgccagacccttcagtggtttatgccaaagacatcgctgaaattgatgatttctctgaggttcggggggtggaatttgatgacaaagataagcagttcttcaaaaactttgcgacaggtgctgttcctatagcatggcaggaagaaattatagaaacgggactgtttgaggaactgaatgaccccaacagacctacgggttgtgaggagggtaattcatccaagtctggcgtgtgtttgttattgtaaattgctctctttaccagacaggcagcaggagtctcggctgacataatcctcgaatgttccacacgtggaaatctgtggaatgagggctaatcagttaggagggacatcacaaccacaaaacaattcaaaagacaggcaagctcactactagaacacattttattttctttttctttcttcataaagatgagtaaagtctcagttttcactgagggcagggaaaaggaacactcaggtttattttgataaactgaaagcatcagccttttaccatcatgtccctgtgtattacgcaaagtcctaggaacagagaatggaactttgtggtgtgcccagaaaatgagcatttgcaattcttagtaaataatcattttagtttttctttgtttatatctttttttcccttcatctttcttcgcttctatacttataaaaaggattttgaagctggaaacaaatgtttctgacattctccccctaaaaaggagtggattacaatattttggcaatgttttaaatcacagaataattttcaatttcagtgacagtttcttttgcaattttgtggaaataatttactatcataatgttgaagcattttaaacataaacatccatgacatctgtgaattaaagcattctgtaaatttagttgagtcctttaagtaatatggtacaaattgcttcaacttgcactaccatatgccatcggttcccaaactctgctgaactttggaatcatctagggatcttttaaaaaactaatgcctgattcccatccatagacattctgatccccactcccaggtatgagaacagcttgaccatttagaatttcagaagctccccaggtgattctaatgtgcagcagagtttggcaggcactgctgtgcacatttgaatgttattacattcaatcttattttggttgctcaaaacttcaatcatacattttgatggcaacttttcaaatgtccccaaagcatgtcattttagtaattgcagtataaatgaaacaagacagtctattcatcttatggcttctcttgtccttgcacactttagtttctcacacgtatcttgggagctcggtctcttggctatttcaagtcctgaaggagacctatgggcttagaaattgagttgaacaggccaggtgcggtggctcatgcctgcaattccagcactttgggaggccaaggcagatggatcatgaggtcaggggctcaagactagcctggccaacatgttgtaaaccccgtctctactaaaaatacaaaaattagcccggtgtggtggtgcacatctataatcccagttacccgggagcctgaggcaggagaattgcttgaacccaggaggcggaggttgtagtgagccaagatcgcaacattgcactccaggctgggcagcaagagcaagactctatctcaaaaaaaaa

SEQ ID NO: 11680 - DNA, 3768 bp, Homo sapiens
  source 1..3768: mol_type = unassigned DNA
agggggcggagagaggagccgcgagcggcggcggggcggcgcggggcggagggcgcccgagggcgagcgggcaggcgggcacggcgggttccgggccagccccggggcggacggttggccgggcgcgcggagcctcgccggggcctcgccggagccgggccgggcagcaggggccgccgccgccgcccgggcccgccgcccgcgccccccacgctggcccagagggctgcggccgcgtcgccgctgaggatgtcccgaaaggggccgcgagcggaggtgtgtgcggactgcagcgccccggaccctggctgggcatccatcagcaggggtgtgctggtgtgtgacgagtgctgcagcgtgcaccggagcctgggacgccacatctccattgtcaagcaccttcgccacagcgcctggcctcccacgctgctgcagatggtgcacacgcttgccagcaacggggccaactccatctgggagcactccctgctggaccccgcacaagtgcagagcggccggcgtaaagccaacccccaagacaaagtccaccccatcaagtcagagttcatcagggccaagtaccagatgctggcatttgtgcacaagcttccctgccgggacgatgatggagtcaccgccaaagacctcagcaagcaactacactcgagcgtgcggacaggcaacctggagacatgtctgcgcctgctctccctgggtgcccaggccaacttcttccacccagagaagggcaccacacctctgcacgtggctgccaaggcaggacagacactgcaggccgagctgcttgtagtgtatggggctgaccctggctcccctgatgttaatggccgcacacccattgactatgccaggcaggcggggcaccatgagctggcggaaaggctggttgagtgccaatatgagctcactgaccggctggccttctacctctgtggacgcaagccggatcacaagaatgggcattacatcatcccacagatggctgacagccttgacttatccgaattggccaaagctgctaagaagaagctgcaggcgctcagcaaccggctttttgaggaactcgccatggacgtgtatgacgaggtggatcgaagagaaaatgatgcagtgtggctggctacccaaaaccacagcactctggtgacagagcgcagtgccgtgcccttcctgcctgttaacccggaatactcagccacgcggaatcaggggcgacaaaagctggcccgctttaatgcccgagagtttgccaccttgatcatcgacattctcagtgaggccaagcggagacagcagggcaagagcctgagcagccccacagacaacctcgagctgtctctgcggagccagagtgacctcgacgaccaacacgactacgacagcgtggcctctgacgaggacacagaccaggagcccctgcgcagcaccggcgccactcggagcaaccgggcccggagcatggactcctcggacttgtctgacggggctgtgacgctgcaggagtacctggagctgaagaaggccctggctacatcggaggcaaaggtgcagcagctcatgaaggtcaacagtagcctgagcgacgagctccggaggctgcagcgagagatccacaagctgcaggcggagaacctgcagctccggcagcctccagggccggtgcccacacctccactccccagtgaacgggcggaacacacacccatggcgccaggcgggagcacacaccgcagggatcgccaggccttttccatgtatgaacctggctctgccctgaagccctttgggggcccccctggggacgagctcactacgcggctgcagcctttccacagcactgagctagaggacgacgccatctattcagtgcacgtccctgctggcctttaccggatccggaaaggggtgtctgcctcagctgtgcccttcactccctcctccccgctgctgtcctgctcccaggagggaagccgccacacgagcaagctttcccgccacggcagtggagccgacagtgactatgagaacacgcaaagtggggacccactgctggggctggaagggaagaggtttctagagctgggcaaagaggaagacttccacccagagctggaaagcctggatggagacctagatcctgggcttcccagcacagaggatgtcatcttgaagacagagcaggtcaccaagaacattcaggaactgttgcgggcagcccaggagttcaagcatgacagcttcgtgccctgctcagagaagatccatttggctgtgaccgagatggcctccctcttcccaaagaggccagccctggagccagtgcggagctcactgcggctgctcaacgccagcgcctaccggctgcagagtgagtgccggaagacagtgcccccagagcccggcgccccagtggacttccagctgctgactcagcaggtgatccagtgcgcctatgacatcgccaaggctgccaagcagctggtcaccatcaccacccgagagaagaagcagtgacctctctccccacaccctcacctgcaccctaggacctcactggccataggagctgggccactccagacattaatccccaccccaacagagccactggcacaagtgcccttagtgctgccacactccctggcagccaggtgccctggtgcccacccctgtcgagcccctaaggatggggaggtgggggggcaggagcttctgtcccccacattccatgcacctcccctctgtatatagcatctcccccctcctagtgagcaggggcctgcaaggcatcactcccagcccctcgccttctagggcaccctcagcaaaggggcaggtggggacactccaagtggggcagctctccgtacatgcgccccacccccatgagccagttcagccctactgggggctgagcgggggcatcccctcctttgtacatagtctccatggatgtccctgccctgtagccaccagccccttgctgctctccctttaatgccatatggcccctgcctagggcacaggccccaacctgtgtgctggggtccccagcagcaaacactggaaagtctgttttttttttttctttcttcttccccaccccttaattttaactttgtggtaactgagtgcccccgcgtgcctgcgtgttgagtgtgtgggcggcagtgccgttccggaggcctggtccatctggagttttgaggggtgaggggaccagagcagtgggaccagcatggggatcagcttcccttccccacctggagccagggactgtccgggtagccagttttggtcctgccagctgcctccctgatccctccccactctcgccccttctctatgaacttaaatcaaaaaccacttccctccatctcctcctgctcctgcgtggagggggaatgtgtgctggctagggtggaggactgagcacctgagcctggggctggctccccggggtccccgactcagctggtggctgtggagctgagtcccctccccgtaacctctgcaaggccagcacccaccatcactacctgcacctgctgtggtcccaccctctggaggcctgggaacctggctgcagcctgggaaggctggagaggcagacggtgggacccaccagctctctccccatcccgcttcttccctgggggccaggccctacctgtgtggtggtgggtgggctgtcaagacgtgtcatgtacatttgtatcaaaaataaagaagtgaccatgagctgtt

SEQ ID NO: 11681 - DNA, 748 bp, Homo sapiens
  source 1..748: mol_type = unassigned DNA
gcggcgcggggcggagggcgcccgagggcgagcgggcaggcgggcacggcgggttccgggccagccccggggcggacggttggccgggcgcgcggagcctcgccggggcctcgccggagccgggccgggcagcaggggccgccgccgccgcccgggcccgccgcccgcgccccccacgctggcccagagggctgcggccgcgtcgccgctgaggatgtcccgaaaggggccgcgagcggaggtgtgtgcggactgcagcgccccggaccctggctgggcatccatcagcaggggtgtgctggtgtgtgacgagtgctgcagcgtgcaccggagcctgggacgccacatctccattgtcaagcaccttcgccacagcgcctggcctcccacgctgctgcagatggtgcacacgcttgccagcaacggggccaactccatctgggagcactccctgctggaccccgcacaagtgcagagcggccggcgtaaagccaacccccaagacaaagtccaccccatcaagtcagagttcatcagggccaagtaccagatgctggcatttgtgcacaagcttccctgccgggacgatgatggagtcaccgccaaagacgacctcactggccataggagctgggccactccagacattaatccccaccccaacagagccactggcacaagtgcccttagtgctgccacactccctggcagccaggtgccctggtgcccacccctgtcgagcccctaa

SEQ ID NO: 11682 - DNA, 3711 bp, Homo sapiens
  source 1..3711: mol_type = unassigned DNA
gcacggcgggttccgggccagccccggggcggacggttggccgggcgcgcggagcctcgccggggcctcgccggagccgggccgggcagcaggggccgccgccgccgcccgggcccgccgcccgcgccccccacgctggcccagagggctgcggccgcgtcgccgctgaggatgtcccgaaaggggccgcgagcggaggtgtgtgcggactgcagcgccccggaccctggctgggcatccatcagcaggggtgtgctggtgtgtgacgagtgctgcagcgtgcaccggagcctgggacgccacatctccattgtcaagcaccttcgccacagcgcctggcctcccacgctgctgcagatggtgcacacgcttgccagcaacggggccaactccatctgggagcactccctgctggaccccgcacaagtgcagagcggccggcgtaaagccaacccccaagacaaagtccaccccatcaagtcagagttcatcagggccaagtaccagatgctggcatttgtgcacaagcttccctgccgggacgatgatggagtcaccgccaaagacctcagcaagcaactacactcgagcgtgcggacaggcaacctggagacatgtctgcgcctgctctccctgggtgcccaggccaacttcttccacccagagaagggcaccacacctctgcacgtggctgccaaggcaggacagacactgcaggccgagctgcttgtagtgtatggggctgaccctggctcccctgatgttaatggccgcacacccattgactatgccaggcaggcggggcaccatgagctggcggaaaggctggttgagtgccaatatgagctcactgaccggctggccttctacctctgtggacgcaagccggatcacaagaatgggcattacatcatcccacagatggctgacagatctcggcaaaagtgcatgtctcagagccttgacttatccgaattggccaaagctgctaagaagaagctgcaggcgctcagcaaccggctttttgaggaactcgccatggacgtgtatgacgaggtggatcgaagagaaaatgatgcagtgtggctggctacccaaaaccacagcactctggtgacagagcgcagtgccgtgcccttcctgcctgttaacccggaatactcagccacgcggaatcaggggcgacaaaagctggcccgctttaatgcccgagagtttgccaccttgatcatcgacattctcagtgaggccaagcggagacagcagggcaagagcctgagcagccccacagacaacctcgagctgtctctgcggagccagagtgacctcgacgaccaacacgactacgacagcgtggcctctgacgaggacacagaccaggagcccctgcgcagcaccggcgccactcggagcaaccgggcccggagcatggactcctcggacttgtctgacggggctgtgacgctgcaggagtacctggagctgaagaaggccctggctacatcggaggcaaaggtgcagcagctcatgaaggtcaacagtagcctgagcgacgagctccggaggctgcagcgagagatccacaagctgcaggcggagaacctgcagctccggcagcctccagggccggtgcccacacctccactccccagtgaacgggcggaacacacacccatggcgccaggcgggagcacacaccgcagggatcgccaggccttttccatgtatgaacctggctctgccctgaagccctttgggggcccccctggggacgagctcactacgcggctgcagcctttccacagcactgagctagaggacgacgccatctattcagtgcacgtccctgctggcctttaccggatccggaaaggggtgtctgcctcagctgtgcccttcactccctcctccccgctgctgtcctgctcccaggagggaagccgccacacgagcaagctttcccgccacggcagtggagccgacagtgactatgagaacacgcaaagtggggacccactgctggggctggaagggaagaggtttctagagctgggcaaagaggaagacttccacccagagctggaaagcctggatggagacctagatcctgggcttcccagcacagaggatgtcatcttgaagacagagcaggtcaccaagaacattcaggaactgttgcgggcagcccaggagttcaagcatgacagcttcgtgccctgctcagagaagatccatttggctgtgaccgagatggcctccctcttcccaaagaggccagccctggagccagtgcggagctcactgcggctgctcaacgccagcgcctaccggctgcagagtgagtgccggaagacagtgcccccagagcccggcgccccagtggacttccagctgctgactcagcaggtgatccagtgcgcctatgacatcgccaaggctgccaagcagctggtcaccatcaccacccgagagaagaagcagtgacctctctccccacaccctcacctgcaccctaggacctcactggccataggagctgggccactccagacattaatccccaccccaacagagccactggcacaagtgcccttagtgctgccacactccctggcagccaggtgccctggtgcccacccctgtcgagcccctaaggatggggaggtgggggggcaggagcttctgtcccccacattccatgcacctcccctctgtatatagcatctcccccctcctagtgagcaggggcctgcaaggcatcactcccagcccctcgccttctagggcaccctcagcaaaggggcaggtggggacactccaagtggggcagctctccgtacatgcgccccacccccatgagccagttcagccctactgggggctgagcgggggcatcccctcctttgtacatagtctccatggatgtccctgccctgtagccaccagccccttgctgctctccctttaatgccatatggcccctgcctagggcacaggccccaacctgtgtgctggggtccccagcagcaaacactggaaagtctgttttttttttttctttcttcttccccaccccttaattttaactttgtggtaactgagtgcccccgcgtgcctgcgtgttgagtgtgtgggcggcagtgccgttccggaggcctggtccatctggagttttgaggggtgaggggaccagagcagtgggaccagcatggggatcagcttcccttccccacctggagccagggactgtccgggtagccagttttggtcctgccagctgcctccctgatccctccccactctcgccccttctctatgaacttaaatcaaaaaccacttccctccatctcctcctgctcctgcgtggagggggaatgtgtgctggctagggtggaggactgagcacctgagcctggggctggctccccggggtccccgactcagctggtggctgtggagctgagtcccctccccgtaacctctgcaaggccagcacccaccatcactacctgcacctgctgtggtcccaccctctggaggcctgggaacctggctgcagcctgggaaggctggagaggcagacggtgggacccaccagctctctccccatcccgcttcttccctgggggccaggccctacctgtgtggtggtgggtgggctgtcaagacgtgtcatgtacatttgtatcaaaaataaagaagtgaccatga

SEQ ID NO: 11683 - DNA, 4610 bp, Homo sapiens
  source 1..4610: mol_type = unassigned DNA
gggccgcggccgctgcagcagcgcgggccgggccagggggcgcctcgcgcggcagcgactctggcaggcgctgcagtgaagctggacccgcaggcgggcgtgcgtggagcgggggccgcggccgcgccgcagagatgtgactcgggccgaaggccagctggagcgtcggcgctgcggggccgcgggggtcgaatgttcgtggcatcagagagaaagatgagagctcaccaggtgctcaccttcctcctgctcttcgtgatcacctcggtggcctctgaaaacgccagcacatcccgaggctgtgggctggacctcctccctcagtacgtgtccctgtgcgacctggacgccatctggggcattgtggtggaggcggtggccggggcgggcgccctgatcacactgctcctgatgctcatcctcctggtgcggctgcccttcatcaaggagaaggagaagaagagccctgtgggcctccactttctgttcctcctggggaccctgggcctctttgggctgacgtttgccttcatcatccaggaggacgagaccatctgctctgtccgccgcttcctctggggcgtcctctttgcgctctgcttctcctgcctgctgagccaggcatggcgcgtgcggaggctggtgcggcatggcacgggccccgcgggctggcagctggtgggcctggcgctgtgcctgatgctggtgcaagtcatcatcgctgtggagtggctggtgctcaccgtgctgcgtgacacaaggccagcctgcgcctacgagcccatggactttgtgatggccctcatctacgacatggtactgcttgtggtcaccctggggctggccctcttcactctgtgcggcaagttcaagaggtggaagctgaacggggccttcctcctcatcacagccttcctctctgtgctcatctgggtggcctggatgaccatgtacctcttcggcaatgtcaagctgcagcagggggatgcctggaacgaccccaccttggccatcacgctggcggccagcggctgggtcttcgtcatcttccacgccatccctgagatccactgcacccttctgccagccctgcaggagaacacgcccaactacttcgacacgtcgcagcccaggatgcgggagacggccttcgaggaggacgtgcagctgccgcgggcctatatggagaacaaggccttctccatggatgaacacaatgcagctctccgaacagcaggatttcccaacggcagcttgggaaaaagacccagtggcagcttggggaaaagacccagcgctccgtttagaagcaacgtgtatcagccaactgagatggccgtcgtgctcaacggtgggaccatcccaactgctccgccaagtcacacaggaagacacctttggtgaaagactttaagttccagagaatcagaatttctcttaccgatttgcctccctggctgtgtctttcttgagggagaaatcggtaacagttgccgaaccaggccgcctcacagccaggaaatttggaaatcctagccaaggggatttcgtgtaaatgtgaacactgacgaactgaaaagctaacaccgactgcccgcccctcccctgccacacacacagacacgtaataccagaccaacctcaatccccgcaaactaaagcaaagctaattgcaaatagtattaggctcactggaaaatgtggctgggaagactgtttcatcctctgggggtagaacagaaccaaattcacagctggtgggccagactggtgttggttggaggtggggggctcccactcttatcacctctccccagcaagtgctggaccccaggtagcctcttggagatgaccgttgcgttgaggacaaatggggactttgccaccggcttgcctggtggtttgcacatttcaggggggtcaggagagttaaggaggttgtgggtgggattccaaggtgaggcccaactgaatcgtggggtgagctttatagccagtagaggtggagggaccctggcatgtgccaaagaagaggccctctgggtgatgaagtgaccatcacatttggaaagtgatcaaccactgttccttctatggggctcttgctctagtgtctatggtgagaacacaggccccgccccttcccttgtagagccatagaaatattctggcttggggcagcagtcccttcttcccttgatcatctcgccctgttcctacacttacgggtgtatctccaaatcctctcccaattttattcccttattcatttcaagagctccaatggggtctccagctgaaagcccctccgggaggcaggttggaaggcaggcaccacggcaggttttccgcgatgatgtcacctagcagggcttcaggggttcccactaggatgcagagatgacctctcgctgcctcacaagcagtgacacctcgggtcctttccgttgctatggtgaaaattcctggatggaatggatcacatgagggtttcttgttgcttttggagggtgtgggggatattttgttttggtttttctgcaggttccatgaaaacagcccttttccaagcccattgtttctgtcatggtttccatctgtcctgagcaagtcattcctttgttatttagcatttcgaacatctcggccattcaaagcccccatgttctctgcactgtttggccagcataacctctagcatcgattcaaagcagagttttaacctgacggcatggaatgtataaatgagggtgggtccttctgcagatactctaatcactacattgctttttctataaaactacccataagcctttaacctttaaagaaaaatgaaaaaggttagtgtttgggggccgggggaggactgaccgcttcataagccagtacgtctgagctgagtatgtttcaataaaccttttgatatttctcaaggccctagtctctgctgtctcccctccccaccccatccttgcaaagcactggggaaagtaaggccaatctggccctccctgtgtgacccgccttcgagttttccttaacagttagtacatttccttgtgttaccacgcatggggaagaaaacgcatggccccagaatgccacccccacctgacctccccggaagcaccccgcctctgcccagagcatgtgcttgcttctagagaatcccgttccagtcattgcgtggacagaaaacgtaagagtcctggggaggggtgggagggaatgaagctaggacctggggtgggggtgggggcggttgcatgcggacccggtattctgaaaagaaagaaatcttcaaacacctcggtcctgtccggtgaaaaaacgacagcattacacattctcgtgccaggaaatggttactcacccccgctctctggagtcctttggagctttctgataccattcacacgatggagcaattcacacgttcgttttctaagttctttattgtccaagcatataaggtgagcacagcacaaatggctgccatggaaagtcgtgcttccccagcataagaacagagccatctttgagccatgggaagcctcatttaatgagacctttttccccccttttaaatctgatatgttatcgcacttagggttttgttttattttggcttttaaggttgagagtgggctgaacgccttcataatgggggcggaggcgggagtgagaggagaagggagagagctgttctttttctaatgactacacctgaaaagtatcaagagacatctttgccaagagactgtagcagccagctgccccccgtggagcaaggtttaaagacaaaattaaatggcacctctgtttaagatctgcgtgtgtaaacaagactcgtttggggaaaacgacccgggaggagagcatctgtgatcaaaatctctcattgtaagcacaaattgttccgtgtctggttattaaaatcgctttgggtctataacagccactcttgtccccccttttaatagaaaattgtcattctagcctggatttctccccactggaggtggagggtgggaagagaagggagtcagctctgacagcttacaaactgggaagttctgtgcatctccagggattccagagttgaagatctggttgttggaagctgggcgcccagtgcttttttttttttttttttttagcccagatgccgtcaggacccactgaacaagggtgaactcgggtggtggtctcggttggccaaggctgagttgaacgcctcaggccaaaccccaagttgaaagggagcattgtggcttttataatccaatgatgcaatgatgataccagcttacaggagttctcagcaggtgctttttattaactgatgaagagctaaggctcacttttgatagataatatatatttattaaatgcattaatgtgtgttttataatgtacctttatcttcccccggctgactgttgcatacttataaaaaagaagttaaagaaatttcaagacaatcaatatgtaccataaacgactatataaatattacaaatttaaaaggctgtaaaccatgggcagataggttttattttcaaaatgctgttcttaacacaaaaataaaggctttactatttacttaa

SEQ ID NO: 11684 - DNA, 1215 bp, Homo sapiens
  source 1..1215: mol_type = unassigned DNA
atgttcgtggcatcagagagaaagatgagagctcaccaggtgctcaccttcctcctgctcttcgtgatcacctcggtggcctctgaaaacgccagcacatcccgaggctgtgggctggacctcctccctcagtacgtgtccctgtgcgacctggacgccatctggggcattgtggtggaggcggtggccggggcgggcgccctgatcacactgctcctgatgctcatcctcctggtgcggctgcccttcatcaaggagaaggagaagaagagccctgtgggcctccactttctgttcctcctggggaccctgggcctctttgggctgacgtttgccttcatcatccaggaggacgagaccatctgctctgtccgccgcttcctctggggcgtcctctttgcgctctgcttctcctgcctgctgagccaggcatggcgcgtgcggaggctggtgcggcatggcacgggccccgcgggctggcagctggtgggcctggcgctgtgcctgatgctggtgcaagtcatcatcgctgtggagtggctggtgctcaccgtgctgcgtgacacaaggccagcctgcgcctacgagcccatggactttgtgatggccctcatctacgacatggtactgcttgtggtcaccctggggctggccctcttcactctgtgcggcaagttcaagaggtggaagctgaacggggccttcctcctcatcacagccttcctctctgtgctcatctgggtggcctggatgaccatgtacctcttcggcaatgtcaagctgcagcagggggatgcctggaacgaccccaccttggccatcacgctggcggccagcggctgggtcttcgtcatcttccacgccatccctgagatccactgcacccttctgccagccctgcaggagaacacgcccaactacttcgacacgtcgcagcccaggatgcgggagacggccttcgaggaggacgtgcagctgccgcgggcctatatggagaacaaggccttctccatggatgaacacaatgcagctctccgaacagcaggatttcccaacggcagcttgggaaaaagacccagtggcagcttggggaaaagacccagcgctccgtttagaagcaacgtgtatcagccaactgagatggccgtcgtgctcaacggtgggaccgaaatggttactcacccccgctctctggagtcctttggagctttctga

SEQ ID NO: 11685 - DNA, 1613 bp, Homo sapiens
  source 1..1613: mol_type = unassigned DNA
aaggaagcgggtgttggtcccagtgtgcgtaaacggacaacgacatctgggagttgggcagtgaggagagagaagagtgtgtccaggaggaacctgcctggaggaggcctagcggtgtgtgtgcgcctaggtgtataccggggcgttggtgacttcgagaggcaccgggcgggatcgatcctctctgcgtcctggacctggtgctggtgtgtttcggggaagttactgcttatgaaccccccttggagcgtggcctgggggcaggaaggcttccgcgctgggacccctgggtcgcgatacctccctcgaatgttcgtggcatcagagagaaagatgagagctcaccaggtgctcaccttcctcctgctcttcgtgatcacctcggtggcctctgaaaacgccagcacatcccgaggctgtgggctggacctcctccctcagtacgtgtccctgtgcgacctggacgccatctggggcattgtggtggaggcggtggccggggcgggcgccctgatcacactgctcctgatgctcatcctcctggtgcggctgcccttcatcaaggagaaggagaagaagagccctgtgggcctccactttctgttcctcctggggaccctgggcctctttgggctgacgtttgccttcatcatccaggaggacgagaccatctgctctgtccgccgcttcctctggggcgtcctctttgcgctctgcttctcctgcctgctgagccaggcatggcgcgtgcggaggctggtgcggcatggcacgggccccgcgggctggcagctggtgggcctggcgctgtgcctgatgctggtgcaagtcatcatcgctgtggagtggctggtgctcaccgtgctgcgtgacacaaggccagcctgcgcctacgagcccatggactttgtgatggccctcatctacgacatggtactgcttgtggtcaccctggggctggccctcttcactctgtgcggcaagttcaagaggtggaagctgaacggggccttcctcctcatcacagccttcctctctgtgctcatctgggtggcctggatgaccatgtacctcttcggcaatgtcaagctgcagcagggggatgcctggaacgaccccaccttggccatcacgctggcggccagcggctgggtcttcgtcatcttccacgccatccctgagatccactgcacccttctgccagccctgcaggagaacacgcccaactacttcgacacgtcgcagcccaggatgcgggagacggccttcgaggaggacgtgcagctgccgcgggcctatatggagaacaaggccttctccatggatgaacacaatgcagctctccgaacagcaggatttcccaacggcagcttgggaaaaagacccagtggcagcttggggaaaagacccagcgctccgtttagaagcaacgtgtatcagccaactgagatggccgtcgtgctcaacggtgggaccatcccaactgctccgccaagtcacacaggaagacacctttggtgaaagactttaagttccagagaatcagaatttctcttaccgatttgcctccctggctgtgtctttcttgagggagaaatcggtaacagttgccg

SEQ ID NO: 11686 - DNA, 2178 bp, Homo sapiens
  source 1..2178: mol_type = unassigned DNA
atgttcgtggcatcagagagaaagatgagagctcaccaggtgctcaccttcctcctgctcttcgtgatcacctcggtggcctctgaaaacgccagcacatcccgaggctgtgggctggacctcctccctcagtacgtgtccctgtgcgacctggacgccatctggggcattgtggtggaggcggtggccggggcgggcgccctgatcacactgctcctgatgctcatcctcctggtgcggctgcccttcttcctcctcatcacagccttcctctctgtgctcatctgggtggcctggatgaccatgtacctcttcggcaatgtcaagctgcagcagggggatgcctggaacgaccccaccttggccatcacgctggcggccagcggctgggtcttcgtcatcttccacgccatccctgagatccactgcacccttctgccagccctgcaggagaacacgcccaactacttcgacacgtcgcagcccaggatgcgggagacggccttcgaggaggacgtgcagctgccgcgggcctatatggagaacaaggccttctccatggatgaacacaatgcagctctccgaacagcaggatttcccaacggcagcttgggaaaaagacccagtggcagcttggggaaaagacccagcgctccgtttagaagcaacgtgtatcagccaactgagatggccgtcgtgctcaacggtgggaccatcccaactgctccgccaagtcacacaggaagacacctttggtgaaagactttaagttccagagaatcagaatttctcttaccgatttgcctccctggctgtgtctttcttgagggagaaatcggtaacagttgccgaaccaggccgcctcacagccaggaaatttggaaatcctagccaaggggatttcgtgtaaatgtgaacactgacgaactgaaaagctaacaccgactgcccgcccctcccctgccacacacacagacacgtaataccagaccaacctcaatccccgcaaactaaagcaaagctaattgcaaatagtattaggctcactggaaaatgtggctgggaagactgtttcatcctctgggggtagaacagaaccaaattcacagctggtgggccagactggtgttggttggaggtggggggctcccactcttatcacctctccccagcaagtgctggaccccaggtagcctcttggagatgaccgttgcgttgaggacaaatggggactttgccaccggcttgcctggtggtttgcacatttcaggggggtcaggagagttaaggaggttgtgggtgggattccaaggtgaggcccaactgaatcgtggggtgagctttatagccagtagaggtggagggaccctggcatgtgccaaagaagaggccctctgggtgatgaagtgaccatcacatttggaaagtgatcaaccactgttccttctatggggctcttgctctagtgtctatggtgagaacacaggccccgccccttcccttgtagagccatagaaatattctggcttggggcagcagtcccttcttcccttgatcatctcgccctgttcctacacttacgggtgtatctccaaatcctctcccaattttattcccttattcatttcaagagctccaatggggtctccagctgaaagcccctccgggaggcaggttggaaggcaggcaccacggcaggttttccgcgatgatgtcacctagcagggcttcaggggttcccactaggatgcagagatgacctctcgctgcctcacaagcagtgacacctcgggtcctttccgttgctatggtgaaaattcctggatggaatggatcacatgagggtttcttgttgcttttggagggtgtgggggatattttgttttggtttttctgcaggttccatgaaaacagcccttttccaagcccattgtttctgtcatggtttccatctgtcctgagcaagtcattcctttgttatttagcatttcgaacatctcggccattcaaagcccccatgttctctgcactgtttggccagcataacctctagcatcgattcaaagcagagttttaacctgacggcatggaatgtataaatgagggtgggtccttctgcagatactctaatcactacattgctttttctataaaactacccataagcctttaaccttt

SEQ ID NO: 11687 - DNA, 1826 bp, Homo sapiens
  source 1..1826: mol_type = unassigned DNA
aaagtacgagtcggctcagcctggagggacccaaccagagcctggcctgggagccaggatggccatccacaaagccttggtgatgtgcctgggactgcctctcttcctgttcccagagcaaagctaccagggggacatgtaccccacccggggcgtgggctatgagaccatcctgaaagagcagaagggtcagagcatgttcgtggagaacaaggccttttccatggatgagccggttgcagctaagaggccggtgtcaccatacagcgggtacaatgggcagctgctgaccagtgtgtaccagcccactgagatggccctgatgcacaaagttccgtccgaaggagcttacgacatcatcctcccacgggccaccgccaacagccaggtgatgggcagtgccaactcgaccctgcgggctgaagacatgtactcggcccagagccaccaggcggccacaccgccgaaagacggcaagaactctcaggtaagcgaactgacccagagaggccaggccaacaccaaccaggttttcctaagactctgacgtccagcagcctctctccgtggcccaccctgggctcagtccccacaaagtaaaacgagatggtagaagccctcttcccgggactgcacggcatcctgatcctcattcctctgtacccaggctggaccgggcccagcacctttcccatccttgtcattggagctgggaggggccggaggccaccaacctgaagcagtggaccgagtgggcccccgtgaagccctgagtgtgtgactggagcgcctagggccacctccctttcctgcccagcccatcttcctggtccccaggtggctgcagctacaaggagctgtccgcgggcccccaggctgcctccaactcccctcttgacacgcccccctccccccaaatcatagtccctgtgtccccaagctgtggttcagattgccttcttcccctctgtgaacaacaggcctcagtgccccgtcttgactctggaccttcctggccctgccatcttggtgtctggcactggcttgtcccaccctctgcctagatggatctcctccatgagtctttggagccaagccagggcagaagttggcccttgcccttctcaccagggcctcctgccaccacctggactgtggaaggccactgagatgggggcagagctcagcccgaggcttgggcacactgcttctctccacggcctgtgggtcctggatctgagcccttggggtgtttcactcaagagccactgagccgtccccatcttccacaaagcagtttccacaagcaagccagggccagccctgcctgcactctgcccgcagtgcccctcaacgtctgggatgaggatgagcctgctgagatgagggcagctctctccatccagcagtacctcatggagtgctcactaaggagttaggaatggcaggccacgctggcatctggggttcaaggtggctcctgtggcaggaacaggtgtccatgaccctgattacctggatctcacaggttctgggaatgcaataggggcctgctgtggctattccaacatctctggtcagggcctggaagtaccttaggacacatggggttggggtcaggactgcattctcagggaccagtggagagccctggaccagatgaactggagtctaggcctctctcgtgactgggacttgtgggacgtgggaggcctgtgagatccaggactaaagattatgctgtttcctaatgggcagatatgtaagtaggtaagtgggatcctcaggtaagcgggatccagaactaaagactgtgctatttcctg

SEQ ID NO: 11688 - DNA, 2502 bp, Homo sapiens
  source 1..2502: mol_type = unassigned DNA
cccggagcgcagaggcccagggggtcgcgctaaacactgtacctcggggaacaaaaccgtgaaggctaattaggacaagtcggagcagggaacggggacgccgggaggggagagcgcgctccgagttgggcagaacctggaacggtcacaggaaacccgggcgcggggtagtcgggccgagggggacctttgcccacggtccagagtggtctggactcggcccacgcgtgagaggagcgcttggtgacgatcccacgtacgcttggtgactggtggaggtcccagagaaggaccgtgcgtgcaaaaggcgaacctcggtgtgcggtgtgtccacgtgtgcaagctggggaggggagggggcgcagaaggcgtgacaaagacggactctgtcttgagtgtgcgcctcgctccggcccgctcccagcgaactgtgcctgaagtgtgtctcacgggagggccaggacgaaggtgacaaaggctaggtgtcccccacggagacgcgccaaggtagccccgcgcgtgtccgtaggcgcgctctctggaagacgcggtggggggtgcgcagggctgcaccctcacaccaattgccccggcgaaggccgagcccagaaagtgagtgcgcgtgagtgtgcgcgcgcccgcatgcgggggcgtggcagtcaacagcaacaacccacacgccggcagggccagaaactcccatctccctcaccagccggaaagtacgagtcggctcagcctggagggacccaaccagagcctggcctgggagccaggatggccatccacaaagccttggtgatgtgcctgggactgcctctcttcctgttcccaggggcctgggcccagggccatgtcccacccggctgcagccaaggcctcaaccccctgtactacaacctgtgtgaccgctctggggcgtggggcatcgtcctggaggccgtggctggggcgggcattgtcaccacgtttgtgctcaccatcatcctggtggccagcctcccctttgtgcaggacaccaagaaacggagcctgctggggacccaggtattcttccttctggggaccctgggcctcttctgcctcgtgtttgcctgtgtggtgaagcccgacttctccacctgtgcctctcggcgcttcctctttggggttctgttcgccatctgcttctcttgtctggcggctcacgtctttgccctcaacttcctggcccggaagaaccacgggccccggggctgggtgatcttcactgtggctctgctgctgaccctggtagaggtcatcatcaatacagagtggctgatcatcaccctggttcggggcagtggcgagggcggccctcagggcaacagcagcgcaggctgggccgtggcctccccctgtgccatcgccaacatggactttgtcatggcactcatctacgtcatgctgctgctgctgggtgccttcctgggggcctggcccgccctgtgtggccgctacaagcgctggcgtaagcatggggtctttgtgctcctcaccacagccacctccgttgccatatgggtggtgtggatcgtcatgtatacttacggcaacaagcagcacaacagtcccacctgggatgaccccacgctggccatcgccctcgccgccaatgcctgggccttcgtcctcttctacgtcatccccgaggtctcccaggtgaccaagtccagcccagagcaaagctaccagggggacatgtaccccacccggggcgtgggctatgagaccatcctgaaagagcagaagggtcagagcatgttcgtggagaacaaggccttttccatggatgagccggttgcagctaagaggccggtgtcaccatacagcgggtacaatgggcagctgctgaccagtgtgtaccagcccactgagatggccctgatgcacaaagttccgtccgaaggagcttacgacatcatcctcccacgggccaccgccaacagccaggtgatgggcagtgccaactcgaccctgcgggctgaagacatgtactcggcccagagccaccaggcggccacaccgccgaaagacggcaagaactctcaggtctttagaaacccctacgtgtgggactgagtcagcggtggcgaggagaggcgggcggatttggggagggccctgaggacctggccccgggcaagggactctccaggctcctcctccccctggcaggcccagcaacatgtgccccagatctggaagggcctccctctctgccagtgtttgggtgggtgtcatgggtgtccccacccactcctcagtgtttgtggagtcgaggagccaaccccagcctcctgccaggatcacctcggcggtcacactccagccaaatagtgttctcggggtggtggctgggcagcgcctatgtttctctggagattcctgcaacctcaagagacttcccaggcgctcaggcctggatcttgctcctctgtgaggaacaagggtgcctaataaatacatttctgctttatt

SEQ ID NO: 11689 - DNA, 2988 bp, Homo sapiens
  source 1..2988: mol_type = unassigned DNA
aaacactccgggccgcccgccccgccaccagctggctccgaccggcgcaccgctggcgatcccccaggcaattcggcgtcatgagaaccggcaccccgagactcggcgccctgccctccctccgcgtctccagggccctggccaggcccaacaacctctccctcctctgtgcgcctcagcccctacgggcctctggcgcgggctaactaggcctcgctgcgggcccccaggactgcgcaccccaccccccgcgaggccagcagccccgggggaaggcggccggaaaatctcttgtttatcgggctggataagtaccagcctggattcgcttcccaatttctgcggtccagcttcagcagattcctggggccggaggggaaagggtggcaacccacagatccaccccggaacagggagtggggggtggggctggtgggaacctgacctcctggaaaggacggactcggagtcagagccaacgtgtcccggagcgcagaggcccagggggtcgcgctaaacactgtacctcggggaacaaaaccgtgaaggctaattaggacaagtcggagcagggaacggggacgccgggaggggagagcgcgctccgagttgggcagaacctggaacggtcacaggaaacccgggcgcggggtagtcgggccgagggggacctttgcccacggtccagagtggtctggactcggcccacgcgtgagaggagcgcttggtgacgatcccacgtacgcttggtgactggtggaggtcccagagaaggaccgtgcgtgcaaaaggcgaacctcggtgtgcggtgtgtccacgtgtgcaagctggggaggggagggggcgcagaaggcgtgacaaagacggactctgtcttgagtgtgcgcctcgctccggcccgctcccagcgaactgtgcctgaagtgtgtctcacgggagggccaggacgaaggtgacaaaggctaggtgtcccccacggagacgcgccaaggtagccccgcgcgtgtccgtaggcgcgctctctggaagacgcggtggggggtgcgcagggctgcaccctcacaccaattgccccggcgaaggccgagcccagaaagtgagtgcgcgtgagtgtgcgcgcgcccgcatgcgggggcgtggcagtcaacagcaacaacccacacgccggcagggccagaaactcccatctccctcaccagccggaaagtacgagtcggctcagcctggagggacccaaccagagcctggcctgggagccaggatggccatccacaaagccttggtgatgtgcctgggactgcctctcttcctgttcccaggggcctgggcccagggccatgtcccacccggctgcagccaaggcctcaaccccctgtactacaacctgtgtgaccgctctggggcgtggggcatcgtcctggaggccgtggctggggcgggcattgtcaccacgtttgtgctcaccatcatcctggtggccagcctcccctttgtgcaggacaccaagaaacggagcctgctggggacccaggtattcttccttctggggaccctgggcctcttctgcctcgtgtttgcctgtgtggtgaagcccgacttctccacctgtgcctctcggcgcttcctctttggggttctgttcgccatctgcttctcttgtctggcggctcacgtctttgccctcaacttcctggcccggaagaaccacgggccccggggctgggtgatcttcactgtggctctgctgctgaccctggtagaggtcatcatcaatacagagtggctgatcatcaccctggttcggggcagtggcgagggcggccctcagggcaacagcagcgcaggctgggccgtggcctccccctgtgccatcgccaacatggactttgtcatggcactcatctacgtcatgctgctgctgctgggtgccttcctgggggcctggcccgccctgtgtggccgctacaagcgctggcgtaagcatggggtctttgtgctcctcaccacagccacctccgttgccatatgggtggtgtggatcgtcatgtatacttacggcaacaagcagcacaacagtcccacctgggatgaccccacgctggccatcgccctcgccgccaatgcctgggccttcgtcctcttctacgtcatccccgaggtctcccaggtgaccaagtccagcccagagcaaagctaccagggggacatgtaccccacccggggcgtgggctatgagaccatcctgaaagagcagaagggtcagagcatgttcgtggagaacaaggccttttccatggatgagccggttgcagctaagaggccggtgtcaccatacagcgggtacaatgggcagctgctgaccagtgtgtaccagcccactgagatggccctgatgcacaaagttccgtccgaaggagcttacgacatcatcctcccacgggccaccgccaacagccaggtgatgggcagtgccaactcgaccctgcgggctgaagacatgtactcggcccagagccaccaggcggccacaccgccgaaagacggcaagaactctcaggtctttagaaacccctacgtgtgggactgagtcagcggtggcgaggagaggcgggcggatttggggagggccctgaggacctggccccgggcaagggactctccaggctcctcctccccctggcaggcccagcaacatgtgccccagatctggaagggcctccctctctgccagtgtttgggtgggtgtcatgggtgtccccacccactcctcagtgtttgtggagtcgaggagccaaccccagcctcctgccaggatcacctcggcggtcacactccagccaaatagtgttctcggggtggtggctgggcagcgcctatgtttctctggagattcctgcaacctcaagagacttcccaggcgctcaggcctggatcttgctcctctgtgaggaacaagggtgcctaataaatacatttctgctttattaa

SEQ ID NO: 11690 - DNA, 2574 bp, Homo sapiens
  source 1..2574: mol_type = unassigned DNA
ggacccaaccagagcctggcctgggagccaggatggccatccacaaagccttggtgatgtgcctgggactgcctctcttcctgttcccaggggcctgggcccagggccatgtcccacccggctgcagccaaggcctcaaccccctgtactacaacctgtgtgaccgctctggggcgtggggcatcgtcctggaggccgtggctggggcgggcattgtcaccacgtttgtgctcaccatcatcctggtggccagcctcccctttgtgcaggacaccaagaaacggagcctgctggggacccaggtattcttccttctggggaccctgggcctcttctgcctcgtgtttgcctgtgtggtgaagcccgacttctccacctgtgcctctcggcgcttcctctttggggttctgttcgccatctgcttctcttgtctggcggctcacgtctttgccctcaacttcctggcccggaagaaccacgggccccggggctgggtgatcttcactgtggctctgctgctgaccctggtagaggtcatcatcaatacagagtggctgatcatcaccctggttcggggcagtggcgagggcggccctcagggcaacagcagcgcaggctgggccgtggcctccccctgtgccatcgccaacatggactttgtcatggcactcatctacgtcatgctgctgctgctgggtgccttcctgggggcctggcccgccctgtgtggccgctacaagcgctggcgtaagcatggggtctttgtgctcctcaccacagccacctccgttgccatatgggtggtgtggatcgtcatgtatacttacggcaacaagcagcacaacagtcccacctgggatgaccccacgctggccatcgccctcgccgccaatgcctgggccttcgtcctcttctacgtcatccccgaggtctcccaggtgaccaagtccagcccagagcaaagctaccagggggacatgtaccccacccggggcgtgggctatgagaccatcctgaaagagcagaagggtcagagcatgttcgtggagaacaaggccttttccatggatgagccggttgcagctaagaggccggtgtcaccatacagcgggtacaatgggcagctgctgaccagtgtgtaccagcccactgagatggccctgatgcacaaagttccgtccgaaggagcttacgacatcatcctcccacgggccaccgccaacagccaggtgatgggcagtgccaactcgaccctgcgggctgaagacatgtactcggcccagagccaccaggcggccacaccgccgaaagacggcaagaactctcaggctcagtccccacaaagtaaaacgagatggtagaagccctcttcccgggactgcacggcatcctgatcctcattcctctgtacccaggctggaccgggcccagcacctttcccatccttgtcattggagctgggaggggccggaggccaccaacctgaagcagtggaccgagtgggcccccgtgaagccctgagtgtgtgactggagcgcctagggccacctccctttcctgcccagcccatcttcctggtccccaggtggctgcagctacaaggagctgtccgcgggcccccaggctgcctccaactcccctcttgacacgcccccctccccccaaatcatagtccctgtgtccccaagctgtggttcagattgccttcttcccctctgtgaacaacaggcctcagtgccccgtcttgactctggaccttcctggccctgccatcttggtgtctggcactggcttgtcccaccctctgcctagatggatctcctccatgagtctttggagccaagccagggcagaagttggcccttgcccttctcaccagggcctcctgccaccacctggactgtggaaggccactgagatgggggcagagctcagcccgaggcttgggcacactgcttctctccacggcctgtgggtcctggatctgagcccttggggtgtttcactcaagagccactgagccgtccccatcttccacaaagcagtttccacaagcaagccagggccagccctgcctgcactctgcccgcagtgcccctcaacgtctgggatgaggatgagcctgctgagatgagggcagctctctccatccagcagtacctcatggagtgctcactaaggagttaggaatggcaggccacgctggcatctggggttcaaggtggctcctgtggcaggaacaggtgtccatgaccctgattacctggatctcacaggttctgggaatgcaataggggcctgctgtggctattccaacatctctggtcagggcctggaagtaccttaggacacatggggttggggtcaggactgcattctcagggaccagtggagagccctggaccagatgaactggagtctaggcctctctcgtgactgggacttgtgggacgtgggaggcctgtgagatccaggactaaagattatgctgtttcctaatgggcagatatgtaagtaggtaagtgggatcctcaggtaagcgggatccagaactaaagactgtgctatttcctg

SEQ ID NO: 11691 - DNA, 1419 bp, Homo sapiens
  source 1..1419: mol_type = unassigned DNA
ggggaacctccctgaagagtgccctggtcacagcacccttgaagacagccattggccatggggacccaaccagagcctggcctgggagccaggatggccatccacaaagccttggtgatgtgcctgggactgcctctcttcctgttcccaggggcctgggcccagggccatgtcccacccggctgcagccaaggcctcaaccccctgtactacaacctgtgtgaccgctctggggcgtggggcatcgtcctggaggccgtggctggggcgggcattgtcaccacgtttgtgctcaccatcatcctggtggccagcctcccctttgtgcaggacaccaagaaacggagcctgctggggacccaggtattcttccttctggggaccctgggcctcttctgcctcgtgtttgcctgtgtggtgaagcccgacttctccacctgtgcctctcggcgcttcctctttggggttctgttcgccatctgcttctcttgtctggcggctcacgtctttgccctcaacttcctggcccggaagaaccacgggccccggggctgggtgatcttcactgtggctctgctgctgaccctggtagaggtcatcatcaatacagagtggctgatcatcaccctggttcggggcagtggcgagggcggccctcagggcaacagcagcgcaggctgggccgtggcctccccctgtgccatcgccaacatggactttgtcatggcactcatctacgtcatgctgctgctgctgggtgccttcctgggggcctggcccgccctgtgtggccgctacaagcgctggcgtaagcatggggtctttgtgctcctcaccacagccacctccgttgccatatgggtggtgtggatcgtcatgtatacttacggcaacaagcagcacaacagtcccacctgggatgaccccacgctggccatcgccctcgccgccaatgcctgggccttcgtcctcttctacgtcatccccgaggtctcccaggtgaccaagtccagcccagagcaaagctaccagggggacatgtaccccacccggggcgtgggctatgagaccatcctgaaagagcagaagggtcagagcatgttcgtggagaacaaggccttttccatggatgagccggttgcagctaagaggccggtgtcaccatacagcgggtacaatgggcagctgctgaccagtgtgtaccagcccactgagatggccctgatgcacaaagttccgtccgaaggagcttacgacatcatcctcccacgggccaccgccaacagccaggtgatgggcagtgccaactcgaccctgcgggctgaagacatgtactcggcccagagccaccaggcggccacaccgccgaaagacggcaagaactctcaggtctttagaaacccctacgtgtgggactga

SEQ ID NO: 11692 - DNA, 1038 bp, Homo sapiens
  source 1..1038: mol_type = unassigned DNA
atgtacaaggactgcatcgagtccactggagactattttcttctctgtgacgccgaggggccatggggcatcattctggagtccctggccatacttggcatcgtggtcacaattctgctactcttagcatttctcttcctcatgcgaaagatccaagactgcagccagtggaatgtcctccccacccagctcctcttcctcctgagtgtcctggggctcttcggactcgcttttgccttcatcatcgagctcaatcaacaaactgcccccgtacgctactttctctttggggttctctttgctctctgtttctcatgcctcttagctcatgcctccaatctagtgaagctggttcggggttgtgtctccttctcctggacgacaattctgtgcattgctattggttgcagtctgttgcaaatcattattgccactgagtatgtgactctcatcatgaccagaggtatgatgtttgtgaatatgacaccctgccagctcaatgtggactttgttgtactcctggtctatgtcctcttcctgatggccctcacattcttcgtctccaaagccaccttctgtggcccgtgtgagaactggaagcagcatggaaggctcatctttatcactgtgctcttctccatcatcatctgggtggtgtggatctccatgctcctgagaggcaacccgcagttccagcgacagccccagtgggacgacccggtcgtctgcattgctctggtcaccaacgcatgggttttcctgctgctgtacatcgtccctgagctctgcattctctacagatcgtgtagacaggagtgccctttacaaggcaatgcctgccccgtcacagcctaccaacacagcttccaagtggagaaccaggagctctccagagcccgagacagtgatggagctgaggaggatgtagcattaacttcatatggtactcccattcagccgcagactgttgatcccacacaagagtgtttcatcccacaggctaaactaagcccccagcaagatgcaggaggagtataa

SEQ ID NO: 11693 - DNA, 903 bp, Homo sapiens
  source 1..903: mol_type = unassigned DNA
atgtacaaggactgcatcgagtccactggagactattttcttctctgtgacgccgaggggccatggggcatcattctggagtccctggccatacttggcatcgtggtcacaattctgctactcttagcatttctcttcctcatgcgaaagatccaagactgcagccagtggaatgtcctccccacccagctcctcttcctcctgagtgtcctggggctcttcggactcgcttttgccttcatcatcgagctcaatcaacaaactgcccccgtacgctactttctctttggggttctctttgctctctgtttctcatgcctcttagctcatgcctccaatctagtgaagctggttcggggttgtgtctccttctcctggacgacaattctgtgcattgctattggttgcagtctgttgcaaatcattattgccactgagtatgtgactctcatcatgaccagaggtatgatgtttgtgaatatgacaccctgccagctcaatgtggactttgttgtactcctggtctatgtcctcttcctgatggccctcacattcttcgtctccaaagccaccttctgtggcccgtgtgagaactggaagcagcatggaaggctcatctttatcactgtgctcttctccatcatcatctgggtggtgtggatctccatgctcctgagaggcaacccgcagttccagcgacagccccagtgggacgacccggtcgtctgcattgctctggtcaccaacgcatgggttttcctgctgctgtacatcgtccctgagctctgcattctctacagatcgtgtagacaggagtgccctttacaaggcaatgcctgccccgtcacagcctaccaacacagcttccaagtggagaaccaggagctctccagagactgttga

SEQ ID NO: 11694 - DNA, 448 bp, Homo sapiens
  source 1..448: mol_type = unassigned DNA
ccagcactacagcctaagcttccagagtggacacggagaagggcatcagaaaaccattctggtgaggtccacacccataagtcaccatgtacaaggactgcatcgagtccactggagactattttcttctctgtgacgccgaggggccatggggcatcattctggagtccctggccatacttggcatcgtggtcacaattctgctactcttagcatttctcttcctcatgcgaaagatccaagactgcagccagtggaatgtcctccccacccagctcctcttcctcctgagtgtcctggggctcttcggactcgcttttgccttcatcatcgagctcaatcaacaaactgcccccgtacgctactttctctttggggttctctttgctctctgtttctcatgcctcttagctcatgcctccaatctagtgaagctggttcggggttg

SEQ ID NO: 11695 - DNA, 866 bp, Homo sapiens
  source 1..866: mol_type = unassigned DNA
gcggagtctccaactgggagagctgcagctgccgagaggaggagaacgctgaggtcggtcggaccaacggacgcgctgaccgctgccaactgcagctcgcgctgcctcctgctcgcgccgtgccactaaggtcattcccgcctccgagagcccagagccgagatggaaacggtccaggagctgatccccctggccaaggagatgatggcccagaagcgcaaggggaagatggtgaagctgtacgtgctgggcagcgtgctggccctcttcggcgtggtgctcggcctgatggagactgtgtgcagccccttcacggccgccagacgtctgcgggaccaggaggcagccgtggcggagctgcaggccgccctggagcgacaggctctccagaagcaagccctgcaggagaaaggcaagcagcaggacacggtcctcggcggccgggccctgtccaaccggcagcacgcctcctaggaactgtgggagaccagcggagtgggagggagacgcagtagacagagacagaccgagagaggaatggagagacagagggggcgcgcgcacaggagcctgactccgctgggagagtgcaggagcacgtgctgttttttatttggacttaacttcagagaaaccgctgacatctagaactgacctaccacaagcatccaccaaaggagtttgggattgagttttgctgctgtgcagcactgcattgtcatgacatttccaacactgtgtgaattatctaaatgcgtctaccattttgcactagggaggaaggataaatgctttttatgttattattattaattattacaatgaccaccattttgcattttgaaataaaaaaactttttatacca

SEQ ID NO: 11696 - DNA, 7172 bp, Homo sapiens
  source 1..7172: mol_type = unassigned DNA
tatgagccacactgcagttttaagccggaatatctcacggttttattgtttcttccacgaaatgattacataaaatgaaatcagctttgcaatctgcaccggctttgaaatgaagggcaaaatctggctgggggtgaggagaaagaaggtggagagagaataaggtacggagactgtgaggcagagaacgcaggaaaggtggtgaaaagagagtacaagaattttcgggagctgagtgtatttttcttccccatgttatagatgctgtccgttttcccccagcctgtgtccagcaggccagagtggacccctcctatgggctaaaatactctcggtcttcggcccagcacagagctgcaccaaccagggcctgccgctgcccccccaccaggtgacaggtggggccgccgagcggccaccagacctccgcctcctcgcgttgcctgccgggagccggagccgcttccggttgcgccctgtccctgaacttcgactcccgtcggcccccgggaaaaccgcagcggggtagcgcgggcgctgccggaacttgtagttccacctcccgccgcgctaaatagccggaaacgggggcggccagaacagagaactaccgaggcgaagcacctgtggaatcctctcaagaggaacagtcattgtgtgaaggttcaaattcagctgttagcatggaactttcagaacctattgtagaaaatggagagacagaaatgtctccagaagaatcatgggagcacaaagaagaaataagtgaagcagagccagggggtggttccttgggagatggaaggccgccagaggaaagtgcccatgaaatgatggaggaggaagaggaaatcccaaaacctaagtctgtggttgcaccgccaggtgctcctaagaaagagcatgtaaatgtagtattcattgggcacgtagatgctggcaagtcaaccattggaggacaaataatgtatttgactggaatggttgacaaaaggacgcttgaaaagtatgaaagagaagctaaagagaaaaacagagaaacttggtacttgtcttgggccttagacacaaatcaggaagaacgagacaagggtaaaacagtagaagtgggtcgtgcctattttgaaaccgaaaagaagcatttcacaattctagatgcccctggccacaagagttttgtcccaaatatgattggtggtgcctctcaagctgatttggctgtgctggtaatctcagccaggaaaggagagtttgaaactggatttgaaaaaggaggacagacaagagaacatgcaatgttggcaaagacagcaggtgtaaaacacctaattgtgctaattaataagatggatgatccaacagtaaattggagcaatgagagatatgaagaatgtaaggagaaactagtgccatttttgaaaaaagttggcttcaatcccaaaaaggacattcactttatgccctgctcaggacttactggagcaaatctcaaagagcagtcggatttctgtccttggtacattggattaccgtttattccatatctggataatttgccgaacttcaatagatcagttgatggaccaatcaggctgccaattgtggataagtacaaggatatgggcactgtggtcctgggaaagctggaatcaggatctatttgtaaaggccagcagcttgtgatgatgccaaacaagcacaacgtggaagttcttggaatactttccgatgatgtagagactgataccgtagccccaggtgaaaacctcaaaatcagactgaaaggaattgaagaagaggagattcttccagggtttatactttgtgatcctaataatctttgtcattctggacgcacatttgatgcccagatagtgattatagagcacaaatccatcatctgcccaggctataatgcggtgctgcatattcatacctgtattgaggaggtggaaataacagccttaatctgcttggtagacaaaaaatcaggagaaaaaagtaagacccgaccccgttttgtcaaacaagatcaagtatgcattgctcgcttaaggacagcaggaaccatctgccttgagacctttaaagacttccctcagatgggtcgtttcaccttaagagatgagggtaagaccattgcaattggaaaagttctgaaactggttccagagaaagactaagcattttcttgatgaccctgcacaatactgtgaggaaaattgactgcagaagcctacttcacaccgccttctcttattttctgcccattgataaacctctccccatattttgcaaagaggaaattcacagcaaaagtccacattatgtcagctttctcatattgagagctctgctatgccactgttgaatttttcccaagattcctgtccctagccctcacttcaaactctgcttccttggacagatttggcaatagctttgtaagtgatgtggacataattgcctacaataatgaaaacctacaggaatttttttatttttcattttccccttaggcatatttagtatttttcccccaggcagatcattctgagtgtgcgagtgtgtgtgcacatgttacaaaggcaactaccatgttaataaaatattcaatttgaaatccttttcggtatttgaattgcttttgaataatgttttttatctggatgtaacattgttgcattagctttttaactttcccaagtaattgaatacattttattacttggacttttataaactctttccctacccactataaatgagacattcacagcgttcaagtttgtattaaaggaaaggattagtttgaccccttcttttgatggttaatgcatacatgcagttaaatccctttatgcaaatgtgacactgctttactaggtcttttagttatttatttattttttttttttttgccaatttatattgtaacatgatttcttgaacacagtaagttgttttaaaataaaagaacagcatactgtagtttttataagtaaagcgtaatgaaattgtacccctagagaaaattccattaacttgttaaattagtggaattaacaacaaataaagcatgtttgagacctggcaaaaattcctctggtagtatttataaatagagctgcatgcctctagtatgaaaaccgtatcagttgcaagtgccacttctacaagttactcagtttactctttgtatcagtaactttaaaggttggatgatccttgctggttaaagctaaatctcaacctagcaactaaatgaaaatatttagaatcatcagaatctgaacagactaaaattatcagcgataagcagaatcaagcagggtataagttttatctcaattatttgaaattgactgagttttcttaagtgtaaagctgaaatttgctaaccatgtttttgatgaaccacagtgcagcattgtgtgggttttagattgaatgactctctgctataattatcatgactttgaaatttttcatgagaataaatgaggaatggaggcaatttgtgggtttatccaaagcccccttgatgttgagtgttgccattgatcaaagatagcctcttttagattgtgatttctctctaaataagatactttgtatatttaatgacaagtctcttccctataattttgctcctcagaaaagaaaagcctagacagactgtatttccagtcacagaacataaaacttaatctaatgggtgttttgttttgttttgagacagaggctcactctgtcacctaggctggagtgcagtggctcgatctcagctcactgcagcctccacctcccggattcaagcaatttcctgcctcagcctcttgagtagctgggattacaggagccctccacgaggcccagttaatttttgtatctttagtggagacgaggtttccccctattggtcaggctggtctcaaacttctgacctcaagtgatccactcgcctcagcctctcaaaagtgctgggattacaggcatgaggcgccgcacttggcctagtgttttcttaactgtgaaattcccattcatttcttgaatgaggctacatcttatggacagagcaaagttattgtcctacagattcttaaaactataattatggctattgcatgaaatttaaatagattttattatgtctgcaaatctctgggcttttatttttctggaaaatataggagctttaatcaaaacataatagttctttttgtaattccatgttaataaaaacaaatactagcaattgcttgaattttaatgaatatttaaaagttcaagagccacggaaatcacttccagagataagagttccctttctaaatagaacacatttttaaaaaataagttatgtttgctactaaaacatttacactgttagactattatgtgcatgttgccaagactcttaagtaacttggatatcaactgtgaagggcctacctctaaaaagtaacaggtcatacaaatacaaatgtaactgtaaaaattccactggattcttgcatatttgcaagattagattattcaaaagaaatttcagtgctaaaattaaccagcaacataagttctatgggctttgaaaattgttctcatctttttaaagttgatgcattttcaatcctgcttacacaggctgttcatttggataagtaaataaaatgtctaaggtgaacttggcattatgtggagatgttggaccgttatagagcaatacaaattcctatgctgtcattctgttttctgcaaatgcaaacgtgcttatatggtcaacagtgcaaaaatagggtagttggctgcatatttagggtattacctaagcatttgttctctaacgttgctctactagaatgatttttttcttgcatcttttcacattaatgatgttctttatataactttcatgcgattatttagttttttaaattaataaagtgaatttaagaaatattgaaataaacatctaagtaattgccattttaaacccttgtttcttactgtgggagagggggaaatacagcactcatttcttgtttttaatttgcagaagtaagtgaaaatctatgtaaaatcaaaccaaaagagttggactgagtgtgtattgtcttgagattaagtgacaaatagtaaagtgttactgagtaattaagcccatgtattttttttttgtgagttgaaaatctttgaaatatgtgataaccgaatgtcaaaagttcctaaactctaacagtgcaggttgttcactgtaacgaggtaactcatatttgctggttacataaactacaagtactgctctcacaatatgggactttgaactgtgatgtagttcaacagttgccggcatcctctcagctgatacgctgcgaatattttgggttagacttgcagccagatgcagttttgcaacccaagaaaaaagttgaacctatgatcaaaaactgctcccaagatgaacctggaaaaaaatcagctaagctcccttggcgatctgcaggaacactagtaatgactggaattactccgtgatctttgatgactattacacataacagcactctagcaccttttcttactggcatggacttcctcatggactgctacttcatggatgatagcttcattgctttgggtagggatttaaggtagtcaaggggaaaatacgcagttttattacaggtcttaacatcaggcaactttcaactttaaaaccctttgtgaaaaatgtggttatagcactatagctctgattttaggatggttaaatgttatattcattgttggcttaccttatcaaactgtgccattaatcctttcacagacataggtaaggaagagaacaaccagtggattcaggggacaattatctatctccaaataataggcttttatttcttgcagctaactttttcagtgattctagcagatgccatctagtacatccttgatcttgtttctttcgtgagagatctcgccatggcagcatcttgttaagtaagtgtaattgcacatgcacaaaagacttaactagctttacatttagcagtcagttggttagattaggtttcatagtaaatgaataggaatagaaagaataggaagtgtttttattttccagtagtaattccgtggattccatttgacccagtttactatcagttcagttcaggtagatttggttcaacttttggtggtttttggctctaggatattcttgactttaatatcctagaacttactgagtcttcccttcaataaatacacttctcacatacctctaatcctatgcttccttgaaacaataatgctagctgagttgtttactaaggattattataagggcctgaaggtgtgggagtggagattaattaaaacctttatgttctccaatataagggaaaagcaggttggtactacttctgattaggcagaaaacaccaggattccttaagtgatccttgaaatggttattgttttctgccttgtcacatttgccactgtgccctttaaaacgatgtggaaacctcaggtttgtggacagcacaggtggaatgacatcttgtgcttcctgaggctcccctctaccaggcacattagcttagtgcttcagatgtcagcccaagtccttgttacctccttttcctgctgcccagggaagagtgtgtgtgctggagctggagcgcttgcactcttcaggtgactattctcacctccatttcctccacatgcattaggtgaaactgaggtctaagcctcctgcaaggtctacattttaaggactcacacatcaggctctcagaaatgtacacaggtattagttctgtttgttctaaaggaaatgtgggtatctctcaggccaggacttagtgactagttttcgctagacagcaggttaatacctagatctcatttaaaaaaaaaaaaaaaaaacaggattaaagggaactgatcaggtttgttgagttttttagcctaattccaaagcatggaagagtgctctaggtaggaaagaaagctttttcttacgatttgtagctacctactgtgcctgacttggtgcctgtgtgaggattaagcccttagtctgctcttgcaattattcaaatgacaaattaaatttgcttttgtaataacaataaaagttgtcatcttcccttttg

SEQ ID NO: 11697 - DNA, 7151 bp, Homo sapiens
  source 1..7151: mol_type = unassigned DNA
gggaggagatccgctcacacacacgaggaggagggttgagctgccgccgccgccgcctctgtcgtcgtcgcgagtgtggagtcgggactggagctgctgccgcggcgacgccggggatctttgtcgctagctcccggcccttctgccccgccgccttccctcagtcagcgttgcccactcctctccggccgggcgcccctgcctccatttcccgctctctgtccaccacacacacggcccccccgatcatggatccgggcagtggcggcggcggcggcggcggcggcggcggcgggagcagcagcggcagcagcagcagcgactcggcgcctgactgctgggaccaggcggacatggaagcccccgggccgggcccttgcggcggcggcggctccctggcggcggcggccgaggcccagcgggagaacctcagcgcggccttcagccggcaactcaacgtcaacgccaagcccttcgtgcccaacgtccacgccgccgagttcgtgccgtccttcctgcggggcccggcagcgccgccacccccagttggcggcgccgccaataaccacggagccggcagcggcgcgggaggccgtgcggcacctgtggaatcctctcaagaggaacagtcattgtgtgaaggttcaaattcagctgttagcatggaactttcagaacctattgtagaaaatggagagacagaaatgtctccagaagaatcatgggagcacaaagaagaaataagtgaagcagagccagggggtggttccttgggagatggaaggccgccagaggaaagtgcccatgaaatgatggaggaggaagaggaaatcccaaaacctaagtctgtggttgcaccgccaggtgctcctaagaaagagcatgtaaatgtagtattcattgggcacgtagatgctggcaagtcaaccattggaggacaaataatgtatttgactggaatggttgacaaaaggacgcttgaaaagtatgaaagagaagctaaagagaaaaacagagaaacttggtacttgtcttgggccttagacacaaatcaggaagaacgagacaagggtaaaacagtagaagtgggtcgtgcctattttgaaaccgaaaagaagcatttcacaattctagatgcccctggccacaagagttttgtcccaaatatgattggtggtgcctctcaagctgatttggctgtgctggtaatctcagccaggaaaggagagtttgaaactggatttgaaaaaggaggacagacaagagaacatgcaatgttggcaaagacagcaggtgtaaaacacctaattgtgctaattaataagatggatgatccaacagtaaattggagcaatgagagatatgaagaatgtaaggagaaactagtgccatttttgaaaaaagttggcttcaatcccaaaaaggacattcactttatgccctgctcaggacttactggagcaaatctcaaagagcagtcggatttctgtccttggtacattggattaccgtttattccatatctggataatttgccgaacttcaatagatcagttgatggaccaatcaggctgccaattgtggataagtacaaggatatgggcactgtggtcctgggaaagctggaatcaggatctatttgtaaaggccagcagcttgtgatgatgccaaacaagcacaacgtggaagttcttggaatactttccgatgatgtagagactgataccgtagccccaggtgaaaacctcaaaatcagactgaaaggaattgaagaagaggagattcttccagggtttatactttgtgatcctaataatctttgtcattctggacgcacatttgatgcccagatagtgattatagagcacaaatccatcatctgcccaggctataatgcggtgctgcatattcatacctgtattgaggaggtggaaataacagccttaatctgcttggtagacaaaaaatcaggagaaaaaagtaagacccgaccccgttttgtcaaacaagatcaagtatgcattgctcgcttaaggacagcaggaaccatctgccttgagacctttaaagacttccctcagatgggtcgtttcaccttaagagatgagggtaagaccattgcaattggaaaagttctgaaactggttccagagaaagactaagcattttcttgatgaccctgcacaatactgtgaggaaaattgactgcagaagcctacttcacaccgccttctcttattttctgcccattgataaacctctccccatattttgcaaagaggaaattcacagcaaaagtccacattatgtcagctttctcatattgagagctctgctatgccactgttgaatttttcccaagattcctgtccctagccctcacttcaaactctgcttccttggacagatttggcaatagctttgtaagtgatgtggacataattgcctacaataatgaaaacctacaggaatttttttatttttcattttccccttaggcatatttagtatttttcccccaggcagatcattctgagtgtgcgagtgtgtgtgcacatgttacaaaggcaactaccatgttaataaaatattcaatttgaaatccttttcggtatttgaattgcttttgaataatgttttttatctggatgtaacattgttgcattagctttttaactttcccaagtaattgaatacattttattacttggacttttataaactctttccctacccactataaatgagacattcacagcgttcaagtttgtattaaaggaaaggattagtttgaccccttcttttgatggttaatgcatacatgcagttaaatccctttatgcaaatgtgacactgctttactaggtcttttagttatttatttattttttttttttttgccaatttatattgtaacatgatttcttgaacacagtaagttgttttaaaataaaagaacagcatactgtagtttttataagtaaagcgtaatgaaattgtacccctagagaaaattccattaacttgttaaattagtggaattaacaacaaataaagcatgtttgagacctggcaaaaattcctctggtagtatttataaatagagctgcatgcctctagtatgaaaaccgtatcagttgcaagtgccacttctacaagttactcagtttactctttgtatcagtaactttaaaggttggatgatccttgctggttaaagctaaatctcaacctagcaactaaatgaaaatatttagaatcatcagaatctgaacagactaaaattatcagcgataagcagaatcaagcagggtataagttttatctcaattatttgaaattgactgagttttcttaagtgtaaagctgaaatttgctaaccatgtttttgatgaaccacagtgcagcattgtgtgggttttagattgaatgactctctgctataattatcatgactttgaaatttttcatgagaataaatgaggaatggaggcaatttgtgggtttatccaaagcccccttgatgttgagtgttgccattgatcaaagatagcctcttttagattgtgatttctctctaaataagatactttgtatatttaatgacaagtctcttccctataattttgctcctcagaaaagaaaagcctagacagactgtatttccagtcacagaacataaaacttaatctaatgggtgttttgttttgttttgagacagaggctcactctgtcacctaggctggagtgcagtggctcgatctcagctcactgcagcctccacctcccggattcaagcaatttcctgcctcagcctcttgagtagctgggattacaggagccctccacgaggcccagttaatttttgtatctttagtggagacgaggtttccccctattggtcaggctggtctcaaacttctgacctcaagtgatccactcgcctcagcctctcaaaagtgctgggattacaggcatgaggcgccgcacttggcctagtgttttcttaactgtgaaattcccattcatttcttgaatgaggctacatcttatggacagagcaaagttattgtcctacagattcttaaaactataattatggctattgcatgaaatttaaatagattttattatgtctgcaaatctctgggcttttatttttctggaaaatataggagctttaatcaaaacataatagttctttttgtaattccatgttaataaaaacaaatactagcaattgcttgaattttaatgaatatttaaaagttcaagagccacggaaatcacttccagagataagagttccctttctaaatagaacacatttttaaaaaataagttatgtttgctactaaaacatttacactgttagactattatgtgcatgttgccaagactcttaagtaacttggatatcaactgtgaagggcctacctctaaaaagtaacaggtcatacaaatacaaatgtaactgtaaaaattccactggattcttgcatatttgcaagattagattattcaaaagaaatttcagtgctaaaattaaccagcaacataagttctatgggctttgaaaattgttctcatctttttaaagttgatgcattttcaatcctgcttacacaggctgttcatttggataagtaaataaaatgtctaaggtgaacttggcattatgtggagatgttggaccgttatagagcaatacaaattcctatgctgtcattctgttttctgcaaatgcaaacgtgcttatatggtcaacagtgcaaaaatagggtagttggctgcatatttagggtattacctaagcatttgttctctaacgttgctctactagaatgatttttttcttgcatcttttcacattaatgatgttctttatataactttcatgcgattatttagttttttaaattaataaagtgaatttaagaaatattgaaataaacatctaagtaattgccattttaaacccttgtttcttactgtgggagagggggaaatacagcactcatttcttgtttttaatttgcagaagtaagtgaaaatctatgtaaaatcaaaccaaaagagttggactgagtgtgtattgtcttgagattaagtgacaaatagtaaagtgttactgagtaattaagcccatgtattttttttttgtgagttgaaaatctttgaaatatgtgataaccgaatgtcaaaagttcctaaactctaacagtgcaggttgttcactgtaacgaggtaactcatatttgctggttacataaactacaagtactgctctcacaatatgggactttgaactgtgatgtagttcaacagttgccggcatcctctcagctgatacgctgcgaatattttgggttagacttgcagccagatgcagttttgcaacccaagaaaaaagttgaacctatgatcaaaaactgctcccaagatgaacctggaaaaaaatcagctaagctcccttggcgatctgcaggaacactagtaatgactggaattactccgtgatctttgatgactattacacataacagcactctagcaccttttcttactggcatggacttcctcatggactgctacttcatggatgatagcttcattgctttgggtagggatttaaggtagtcaaggggaaaatacgcagttttattacaggtcttaacatcaggcaactttcaactttaaaaccctttgtgaaaaatgtggttatagcactatagctctgattttaggatggttaaatgttatattcattgttggcttaccttatcaaactgtgccattaatcctttcacagacataggtaaggaagagaacaaccagtggattcaggggacaattatctatctccaaataataggcttttatttcttgcagctaactttttcagtgattctagcagatgccatctagtacatccttgatcttgtttctttcgtgagagatctcgccatggcagcatcttgttaagtaagtgtaattgcacatgcacaaaagacttaactagctttacatttagcagtcagttggttagattaggtttcatagtaaatgaataggaatagaaagaataggaagtgtttttattttccagtagtaattccgtggattccatttgacccagtttactatcagttcagttcaggtagatttggttcaacttttggtggtttttggctctaggatattcttgactttaatatcctagaacttactgagtcttcccttcaataaatacacttctcacatacctctaatcctatgcttccttgaaacaataatgctagctgagttgtttactaaggattattataagggcctgaaggtgtgggagtggagattaattaaaacctttatgttctccaatataagggaaaagcaggttggtactacttctgattaggcagaaaacaccaggattccttaagtgatccttgaaatggttattgttttctgccttgtcacatttgccactgtgccctttaaaacgatgtggaaacctcaggtttgtggacagcacaggtggaatgacatcttgtgcttcctgaggctcccctctaccaggcacattagcttagtgcttcagatgtcagcccaagtccttgttacctccttttcctgctgcccagggaagagtgtgtgtgctggagctggagcgcttgcactcttcaggtgactattctcacctccatttcctccacatgcattaggtgaaactgaggtctaagcctcctgcaaggtctacattttaaggactcacacatcaggctctcagaaatgtacacaggtattagttctgtttgttctaaaggaaatgtgggtatctctcaggccaggacttagtgactagttttcgctagacagcaggttaatacctagatctcatttaaaaaaaaaaaaaaaaaacaggattaaagggaactgatcaggtttgttgagttttttagcctaattccaaagcatggaagagtgctctaggtaggaaagaaagctttttcttacgatttgtagctacctactgtgcctgacttggtgcctgtgtgaggattaagcccttagtctgctcttgcaattattcaaatgacaaattaaatttgcttttgtaataacaataaaagttgtcatcttcccttttg

SEQ ID NO: 11698 - DNA, 7148 bp, Homo sapiens
  source 1..7148: mol_type = unassigned DNA
gggaggagatccgctcacacacacgaggaggagggttgagctgccgccgccgccgcctctgtcgtcgtcgcgagtgtggagtcgggactggagctgctgccgcggcgacgccggggatctttgtcgctagctcccggcccttctgccccgccgccttccctcagtcagcgttgcccactcctctccggccgggcgcccctgcctccatttcccgctctctgtccaccacacacacggcccccccgatcatggatccgggcagtggcggcggcggcggcggcggcggcggcggcgggagcagcagcggcagcagcagcagcgactcggcgcctgactgctgggaccaggcggacatggaagcccccgggccgggcccttgcggcggcggcggctccctggcggcggcggccgaggcccagcgggagaacctcagcgcggccttcagccggcaactcaacgtcaacgccaagcccttcgtgcccaacgtccacgccgccgagttcgtgccgtccttcctgcggggcccggcagcgccgccacccccagttggcggcgccgccaataaccacggagccggcagcggcgcgggaggccgtgcggcacctgtggaatcctctcaagaggaacagtcattgtgtgaaggttcaaattcagctgttagcatggaactttcagaacctattgaaaatggagagacagaaatgtctccagaagaatcatgggagcacaaagaagaaataagtgaagcagagccagggggtggttccttgggagatggaaggccgccagaggaaagtgcccatgaaatgatggaggaggaagaggaaatcccaaaacctaagtctgtggttgcaccgccaggtgctcctaagaaagagcatgtaaatgtagtattcattgggcacgtagatgctggcaagtcaaccattggaggacaaataatgtatttgactggaatggttgacaaaaggacgcttgaaaagtatgaaagagaagctaaagagaaaaacagagaaacttggtacttgtcttgggccttagacacaaatcaggaagaacgagacaagggtaaaacagtagaagtgggtcgtgcctattttgaaaccgaaaagaagcatttcacaattctagatgcccctggccacaagagttttgtcccaaatatgattggtggtgcctctcaagctgatttggctgtgctggtaatctcagccaggaaaggagagtttgaaactggatttgaaaaaggaggacagacaagagaacatgcaatgttggcaaagacagcaggtgtaaaacacctaattgtgctaattaataagatggatgatccaacagtaaattggagcaatgagagatatgaagaatgtaaggagaaactagtgccatttttgaaaaaagttggcttcaatcccaaaaaggacattcactttatgccctgctcaggacttactggagcaaatctcaaagagcagtcggatttctgtccttggtacattggattaccgtttattccatatctggataatttgccgaacttcaatagatcagttgatggaccaatcaggctgccaattgtggataagtacaaggatatgggcactgtggtcctgggaaagctggaatcaggatctatttgtaaaggccagcagcttgtgatgatgccaaacaagcacaacgtggaagttcttggaatactttccgatgatgtagagactgataccgtagccccaggtgaaaacctcaaaatcagactgaaaggaattgaagaagaggagattcttccagggtttatactttgtgatcctaataatctttgtcattctggacgcacatttgatgcccagatagtgattatagagcacaaatccatcatctgcccaggctataatgcggtgctgcatattcatacctgtattgaggaggtggaaataacagccttaatctgcttggtagacaaaaaatcaggagaaaaaagtaagacccgaccccgttttgtcaaacaagatcaagtatgcattgctcgcttaaggacagcaggaaccatctgccttgagacctttaaagacttccctcagatgggtcgtttcaccttaagagatgagggtaagaccattgcaattggaaaagttctgaaactggttccagagaaagactaagcattttcttgatgaccctgcacaatactgtgaggaaaattgactgcagaagcctacttcacaccgccttctcttattttctgcccattgataaacctctccccatattttgcaaagaggaaattcacagcaaaagtccacattatgtcagctttctcatattgagagctctgctatgccactgttgaatttttcccaagattcctgtccctagccctcacttcaaactctgcttccttggacagatttggcaatagctttgtaagtgatgtggacataattgcctacaataatgaaaacctacaggaatttttttatttttcattttccccttaggcatatttagtatttttcccccaggcagatcattctgagtgtgcgagtgtgtgtgcacatgttacaaaggcaactaccatgttaataaaatattcaatttgaaatccttttcggtatttgaattgcttttgaataatgttttttatctggatgtaacattgttgcattagctttttaactttcccaagtaattgaatacattttattacttggacttttataaactctttccctacccactataaatgagacattcacagcgttcaagtttgtattaaaggaaaggattagtttgaccccttcttttgatggttaatgcatacatgcagttaaatccctttatgcaaatgtgacactgctttactaggtcttttagttatttatttattttttttttttttgccaatttatattgtaacatgatttcttgaacacagtaagttgttttaaaataaaagaacagcatactgtagtttttataagtaaagcgtaatgaaattgtacccctagagaaaattccattaacttgttaaattagtggaattaacaacaaataaagcatgtttgagacctggcaaaaattcctctggtagtatttataaatagagctgcatgcctctagtatgaaaaccgtatcagttgcaagtgccacttctacaagttactcagtttactctttgtatcagtaactttaaaggttggatgatccttgctggttaaagctaaatctcaacctagcaactaaatgaaaatatttagaatcatcagaatctgaacagactaaaattatcagcgataagcagaatcaagcagggtataagttttatctcaattatttgaaattgactgagttttcttaagtgtaaagctgaaatttgctaaccatgtttttgatgaaccacagtgcagcattgtgtgggttttagattgaatgactctctgctataattatcatgactttgaaatttttcatgagaataaatgaggaatggaggcaatttgtgggtttatccaaagcccccttgatgttgagtgttgccattgatcaaagatagcctcttttagattgtgatttctctctaaataagatactttgtatatttaatgacaagtctcttccctataattttgctcctcagaaaagaaaagcctagacagactgtatttccagtcacagaacataaaacttaatctaatgggtgttttgttttgttttgagacagaggctcactctgtcacctaggctggagtgcagtggctcgatctcagctcactgcagcctccacctcccggattcaagcaatttcctgcctcagcctcttgagtagctgggattacaggagccctccacgaggcccagttaatttttgtatctttagtggagacgaggtttccccctattggtcaggctggtctcaaacttctgacctcaagtgatccactcgcctcagcctctcaaaagtgctgggattacaggcatgaggcgccgcacttggcctagtgttttcttaactgtgaaattcccattcatttcttgaatgaggctacatcttatggacagagcaaagttattgtcctacagattcttaaaactataattatggctattgcatgaaatttaaatagattttattatgtctgcaaatctctgggcttttatttttctggaaaatataggagctttaatcaaaacataatagttctttttgtaattccatgttaataaaaacaaatactagcaattgcttgaattttaatgaatatttaaaagttcaagagccacggaaatcacttccagagataagagttccctttctaaatagaacacatttttaaaaaataagttatgtttgctactaaaacatttacactgttagactattatgtgcatgttgccaagactcttaagtaacttggatatcaactgtgaagggcctacctctaaaaagtaacaggtcatacaaatacaaatgtaactgtaaaaattccactggattcttgcatatttgcaagattagattattcaaaagaaatttcagtgctaaaattaaccagcaacataagttctatgggctttgaaaattgttctcatctttttaaagttgatgcattttcaatcctgcttacacaggctgttcatttggataagtaaataaaatgtctaaggtgaacttggcattatgtggagatgttggaccgttatagagcaatacaaattcctatgctgtcattctgttttctgcaaatgcaaacgtgcttatatggtcaacagtgcaaaaatagggtagttggctgcatatttagggtattacctaagcatttgttctctaacgttgctctactagaatgatttttttcttgcatcttttcacattaatgatgttctttatataactttcatgcgattatttagttttttaaattaataaagtgaatttaagaaatattgaaataaacatctaagtaattgccattttaaacccttgtttcttactgtgggagagggggaaatacagcactcatttcttgtttttaatttgcagaagtaagtgaaaatctatgtaaaatcaaaccaaaagagttggactgagtgtgtattgtcttgagattaagtgacaaatagtaaagtgttactgagtaattaagcccatgtattttttttttgtgagttgaaaatctttgaaatatgtgataaccgaatgtcaaaagttcctaaactctaacagtgcaggttgttcactgtaacgaggtaactcatatttgctggttacataaactacaagtactgctctcacaatatgggactttgaactgtgatgtagttcaacagttgccggcatcctctcagctgatacgctgcgaatattttgggttagacttgcagccagatgcagttttgcaacccaagaaaaaagttgaacctatgatcaaaaactgctcccaagatgaacctggaaaaaaatcagctaagctcccttggcgatctgcaggaacactagtaatgactggaattactccgtgatctttgatgactattacacataacagcactctagcaccttttcttactggcatggacttcctcatggactgctacttcatggatgatagcttcattgctttgggtagggatttaaggtagtcaaggggaaaatacgcagttttattacaggtcttaacatcaggcaactttcaactttaaaaccctttgtgaaaaatgtggttatagcactatagctctgattttaggatggttaaatgttatattcattgttggcttaccttatcaaactgtgccattaatcctttcacagacataggtaaggaagagaacaaccagtggattcaggggacaattatctatctccaaataataggcttttatttcttgcagctaactttttcagtgattctagcagatgccatctagtacatccttgatcttgtttctttcgtgagagatctcgccatggcagcatcttgttaagtaagtgtaattgcacatgcacaaaagacttaactagctttacatttagcagtcagttggttagattaggtttcatagtaaatgaataggaatagaaagaataggaagtgtttttattttccagtagtaattccgtggattccatttgacccagtttactatcagttcagttcaggtagatttggttcaacttttggtggtttttggctctaggatattcttgactttaatatcctagaacttactgagtcttcccttcaataaatacacttctcacatacctctaatcctatgcttccttgaaacaataatgctagctgagttgtttactaaggattattataagggcctgaaggtgtgggagtggagattaattaaaacctttatgttctccaatataagggaaaagcaggttggtactacttctgattaggcagaaaacaccaggattccttaagtgatccttgaaatggttattgttttctgccttgtcacatttgccactgtgccctttaaaacgatgtggaaacctcaggtttgtggacagcacaggtggaatgacatcttgtgcttcctgaggctcccctctaccaggcacattagcttagtgcttcagatgtcagcccaagtccttgttacctccttttcctgctgcccagggaagagtgtgtgtgctggagctggagcgcttgcactcttcaggtgactattctcacctccatttcctccacatgcattaggtgaaactgaggtctaagcctcctgcaaggtctacattttaaggactcacacatcaggctctcagaaatgtacacaggtattagttctgtttgttctaaaggaaatgtgggtatctctcaggccaggacttagtgactagttttcgctagacagcaggttaatacctagatctcatttaaaaaaaaaaaaaaaaaacaggattaaagggaactgatcaggtttgttgagttttttagcctaattccaaagcatggaagagtgctctaggtaggaaagaaagctttttcttacgatttgtagctacctactgtgcctgacttggtgcctgtgtgaggattaagcccttagtctgctcttgcaattattcaaatgacaaattaaatttgcttttgtaataacaataaaagttgtcatcttcccttttg

SEQ ID NO: 11699 - DNA, 2844 bp, Homo sapiens
  source 1..2844: mol_type = unassigned DNA
ggttggggtttgggggaggagatccgctcacacacaagaggagagtgttgagccgccatatctgctgctgccgccgcagttgcgaatgcagcatcggcgcttagctgcctccgcggtgcagctaaggttcgtgtcgctaccccttggcccttcgctcttgctgccttaaccccgccggcggagcccgctcttctggcctgttgagcccgctccctcactgccacacagcaagttccgagaccatggattcgggcagcagcagcagcgactcggcgcccgattgctgggaccaggtggacatggaatccccggggtcggccccgagcggggatggagtctcctctgcggtggccgaggcccagcgcgagcccctcagctcggctttcagccgtaagctcaacgtcaacgccaagcccttcgtgcctaacgtacacgccgcggagttcgtgccgtccttcctgcggggcccgactcagccgcccaccctcccggccggctccggcagcaacgatgaaacctgcaccggcgcgggataccctcaaggtaaaaggatgggacggggggcacctgtggaaccttcccgagaggaaccgttagtgtcgcttgaaggttccaattcagccgttaccatggaactttcagaacctgttgtagaaaatggagaggtggaaatggccctagaagaatcatgggagcacagtaaagaagtaagtgaagccgagcctgggggtggttcctcgggagattcagggcccccagaagaaagtggccaggaaatgatggaggaaaaagaggaaataagaaaatccaaatctgtgatcgtaccctcaggtgcacctaagaaagaacacgtaaatgtagtattcattggccatgtagacgctggcaagtcaaccatcggaggacagataatgtttttgactggaatggttgacaaaagaacactggagaaatatgaaagagaagctaaggaaaaaaacagagaaacctggtatttgtcctgggccttagatacaaatcaggaggaacgagacaagggtaaaacagtcgaagtgggtcgtgcctattttgaaacagaaaggaaacatttcacaattttagatgcccctggccacaagagttttgtcccaaatatgattggtggtgcttctcaagctgatttggctgtgctggtcatctctgccaggaaaggagagtttgaaactggatttgaaaaaggtggacagacaagagaacatgcgatgttggcaaaaacggcaggggtaaaacatttaatagtgcttattaataagatggatgatcccacagtaaattggagcatcgagagatatgaagaatgtaaagaaaaactggtgccctttttgaaaaaagtaggcttcagtccaaaaaaggacattcactttatgccctgctcaggactgaccggagcaaatattaaagagcagtcagatttctgcccttggtacactggattaccatttattccgtatttggataacttgccaaacttcaacagatcaattgatggaccaataagactgccaattgtggataagtacaaagatatgggcactgtggtcctgggaaagctggaatccgggtccatttttaaaggccagcagctcgtgatgatgccaaacaagcacaatgtagaagttcttggaatactttctgatgatactgaaactgattttgtagccccaggtgaaaacctcaaaatcagactgaagggaattgaagaagaagagattcttccaggattcatactttgtgatcctagtaacctctgccattctggacgcacgtttgatgttcagatagtgattattgagcacaaatccatcatctgcccaggttataatgcggtgctgcacattcatacttgtattgaggaagttgagataacagcgttaatctccttggtagacaaaaaatcaggagaaaaaagtaagacacgaccccgcttcgtgaaacaagatcaagtatgcattgctcgtttaaggacagcaggaaccatctgcctcgagacgttcaaagattttcctcagatgggtcgttttactttaagagatgagggtaagaccattgcaattggaaaagttctgaaattggtcccagagaaggactaagcaattttcttgatgcctctgcaagatactgtgaggagaattgacagcaaaagttcaccacctactcttatttactgcccattgattgacttttcttcatattttgcaaagagaaatttcacagcaaaaattcatgttttgtcagctttctcatgttgagatctgttatgtcactgatgaatttaccctcaagtttccttcctctgtaccactctgcttccttggacaatatcagtaatagctttgtaagtgatgtggacgtaattgcctacagtaatgaaaaattaatgtactttaatttttcattttcttttaggatatttagaccacccttgttccacgcaaaccagagtgtgtcagtgtttgtgtgtgtgttaaaatgataactaacatgtgaataaaatactccatttgaaactcttcggttatttgaaatgcttttgaataatgtttaaatgtcattatgtaatgctattcaattagctttattactttctcaaatagttgaatatgttctatcacttaaaaacttaaaaactcttcaccacttactgttttaagtgaggaatttacaaacaatgcataagtgtgtattaaaggaataattttaattttgagaaaaaaacgtatgttaaggctcttcccagtgggctttgttttctctgtccaagtccagtcaataaaggagctcttctgcttccccacttgtgatttg

SEQ ID NO: 11700 - DNA, 1872 bp, Homo sapiens
  source 1..1872: mol_type = unassigned DNA
atatctgctgctgccgccgcagttgcgaatgcagcatcggcgcttagctgcctccgcggtgcagctaaggttcgtgtcgctaccccttggcccttcgctcttgctgccttaaccccgccggcggagcccgctcttctggcctgttgagcccgctccctcactgccacacagcaagttccgagaccatggattcgggcagcaacgatgaaacctgcaccggcgcgggataccctcaaggtaaaaggatgggacggggggcacctgtggaaccttcccgagaggaaccgttagtgtcgcttgaaggttccaattcagccgttaccatggaactttcagaacctgttgtagaaaatggagaggtggaaatggccctagaagaatcatgggagcacagtaaagaagtaagtgaagccgagcctgggggtggttcctcgggagattcagggcccccagaagaaagtggccaggaaatgatggaggaaaaagaggaaataagaaaatccaaatctgtgatcgtaccctcaggtgcacctaagaaagaacacgtaaatgtagtattcattggccatgtagacgctggcaagtcaaccatcggaggacagataatgtttttgactggaatggttgacaaaagaacactggagaaatatgaaagagaagctaaggaaaaaaacagagaaacctggtatttgtcctgggccttagatacaaatcaggaggaacgagacaagggtaaaacagtcgaagtgggtcgtgcctattttgaaacagaaaggaaacatttcacaattttagatgcccctggccacaagagttttgtcccaaatatgattggtggtgcttctcaagctgatttggctgtgctggtcatctctgccaggaaaggagagtttgaaactggatttgaaaaaggtggacagacaagagaacatgcgatgttggcaaaaacggcaggggtaaaacatttaatagtgcttattaataagatggatgatcccacagtaaattggagcatcgagagatatgaagaatgtaaagaaaaactggtgccctttttgaaaaaagtaggcttcagtccaaaaaaggacattcactttatgccctgctcaggactgaccggagcaaatattaaagagcagtcagatttctgcccttggtacactggattaccatttattccgtatttggataacttgccaaacttcaacagatcaattgatggaccaataagactgccaattgtggataagtacaaagatatgggcactgtggtcctgggaaagctggaatccgggtccatttttaaaggccagcagctcgtgatgatgccaaacaagcacaatgtagaagttcttggaatactttctgatgatactgaaactgattttgtagccccaggtgaaaacctcaaaatcagactgaagggaattgaagaagaagagattcttccaggattcatactttgtgatcctagtaacctctgccattctggacgcacgtttgatgttcagatagtgattattgagcacaaatccatcatctgcccaggttataatgcggtgctgcacattcatacttgtattgaggaagttgagataacagcgttaatctccttggtagacaaaaaatcaggagaaaaaagtaagacacgaccccgcttcgtgaaacaagatcaagtatgcattgctcgtttaaggacagcaggaaccatctgcctcgagacgttcaaagattttcctcagatgggtcgttttactttaagagatgagggtaagaccattgcaattggaaaagttctgaaattggtcccagagaaggactaagcaattttcttgatgcctctgcaagatactgtgaggagaattgacagca

SEQ ID NO: 11701 - DNA, 5120 bp, Homo sapiens
  source 1..5120: mol_type = unassigned DNA
gccccagccaggctgcgggcccgagacccccgggcctccctgccccccgcgccgccccgatttgccctcagagagggtatcgatcttatttctgggtctacggcaaactccaaggtctacaaacgtagaggtcagctgtgaccccgggccaggccgtgaaggtccccaggacacagagctgctctctcctcctagtaaaggtgagaggcagcccaggcctcgtgaaaaaacccagaactggagtcccaaaaggccacgctgatctagctaccctcccagtcaccttgcactcagtcccgagctgccaaagcctccgccgccaccacctccgctctacttccggccctggctccgcccccacacgcctacccgccatcgcaatgcattatgggccgccgtttcagtcggtcgacgctcaccggacaggaagcgtctcggagacagtctgcgaccggacgggtctaggtgagacagaagccaaacaggaggaggaagtggagggactgatcctttgaaatactccagccatgactaaaagagaagcagaggagctgatagaaattgagattgatggaacagagaaagcagagtgcacagaagaaagcattgtagaacaaacctacgcgccagctgaatgtgtaagccaggccatagacatcaatgaaccaataggcaatttaaagaaactgctagaaccaagactacagtgttctttggatgctcatgaaatttgtctgcaagatatccagctggatccagaacgaagtttatttgaccaaggagtaaaaacagatggaactgtacagcttagtgtacaggtaatttcttaccaaggaattgaaccaaagttaaacatccttgaaattgttaaacctgcggacactgttgaggttgttattgatccagatgcccaccatgctgaatcagaagcacatcttgttgaagaagctcaagtgataactcttgatggcacaaaacacatcacaaccatttcagatgaaacttcagaacaagtgacaagatgggctgctgcactggaaggctataggaaagaacaagaacgccttgggataccctatgatcccatacagtggtccacagaccaagtcctgcattgggtggtttgggtaatgaaggaattcagcatgaccgatatagacctcaccacactcaacatttcggggagagaattatgtagtctcaaccaagaagatttttttcagcgggttcctcggggagaaattctctggagtcatctggaacttctccgaaaatatgtattggcaagtcaagaacaacagatgaatgaaatagttacaattgatcaacctgtgcaaattattccagcatcagtgcaatctgctacacctactaccattaaagttataaatagtagtgcgaaagcagccaaagtacaaagagcgccgaggatttcaggagaagatagaagctcacctgggaacagaacaggaaacaatggccaaatccaactatggcagtttttgctagaacttcttactgataaggacgctcgagactgcatttcttgggttggtgatgaaggtgaatttaagctaaatcagcctgaactggttgcacagaaatggggacagcgtaaaaataagcctacgatgaactatgagaaactcagtcgtgcattaagatattattacgatggggacatgatttgtaaagttcaaggcaagagatttgtgtacaagtttgtctgtgacttgaagactcttattggatacagtgcagcggagttgaaccgtttggtcacagaatgtgaacagaagaaacttgcaaagatgcagctccatggaattgcccagccagtcacagcagtagctctggctactgcttctctgcaaacggaaaaggataattgagccccaggacattctgagactccaaagtctttcttaaaatgtttagagcaagtatagctcttacctttattactgaatttgaatcttcttttatttctaggctgtacagtctgatgcatgatttttttataaatatttcatactcttgtgaatttggatctttttactttgagcatatattttagaatatgtgtatgttaaaggatctccacaatgtctgcagtgtgaaggcaggttcattgtggaatagtttaacagtcaggaaggctaaactggtcagtattaatgtgtagccctaccaaaaatagccagtagtatctgaaaatgaaaaataaatgaagtatctctaggaaacagtctggcttaactatttttgaaaatataactgtttcccctctctgctgctttagatgttgctttacatagaaccagaaaatggaatttctcagctaaagcatgtgtgcctgtttcatctaatcaagcagagctaaaatgttcataccgaataaatttatattaataaattactaaactaagagtatcaggttatttatatatttgcaagcaaaggacagtaagaagttgactggcaaaagagcagtgctgaaggaggagatccaggtttaaatctggcttattaactcaagccaattttaaggattttctgtatagattactcatgtcagaccaagaatttaaattattttgagagaggcatttaattctaataaaccagctgttataaaaattataaaatgatctctgtttttcctgtcagagatttaaaaaactgaaaaggtatacctcaacccaaaaataaaggtttgttttggtttgttatggcttccttttttaaaaaattaccctgtagtgccagtttattatgcaaagcagcttatattcctttgtttctgataaaatgaagactttaaatcagtcagtagtactttacctttcaaggcattagtaaattacttgcaaatagttttaaaaggaaaatacgacctttgttataggcagtcttctctttaagacaatacttttccacttgttttccttttccatattatatatgtgtattcatatagctgtatacatattcagttgatcattttataaacatatgaaggcataaagatatacagaagaaaaattattaaacaactcattttaagattcaaattaactaattcctgcatatatgacattccttacataagcgaacactaaacaaaaatggctagaaatgtctttttctttcttttctctctttgttgtttaaggtattaagcacgaattattacatgagactggcagatagctattaatcctcttacagatttgagaaagttgattctcaaatatttatgcaccttctccttcattgttttctttaaatctgtcctcttaaaaagcttcttaagagctcagttaatgcttttgacttaactaggagaaaaaggcatgataatacaggcaagatggcattgttagcaattctggtagtggtttggaatgaatcctaagaggcagggatcttaaggacaaggaagagaagagagagagggagggatctttgatctctttctctggtaatcttaatgcataattttactaatacatgttctcaattcattcatattattaagctcttcctgcagttgatatctgagcagagtaagatttgtatttccatttttacttttttgaaagagaatatatggacagattattagtacaatttgggcactgtggttttaagaatatctgagtaaaataacaatatgaaataataaacagaagctctaacgtcaggtaacaaatagacagcaagaaaggttttgcaccatcctcttacggcctagagagttgacaagttgcttgtagttttaaaaaaataataaagtatacccttctggtatatcatcaagagcttaagaatcttggctttcatatttaaaatgcttttggggagacatatattaaaattttagccaagatgatagacatgtctcaattatatatgtgtgtgtatgtttttaaagctaaaaacattacttttagatccctagaatgaaaatttttttctcatctatgcaattcccatatggtttttttttaaatcatattttattcattttctccctttagcaattttcattttatttctcataatttgaacagagacagttctcatacatgatcagatgctttttttttcttcttaccatcatttatgcatgacataggtaatgtgactaatttctccagttgattcaagaaactcattactttgcctcaaattatatgtaaaatatttgttttacttaggttacagttatcagaaaggtagtttttttcttctattaaaatataacattgtgaaagaaaataaaatttatgctattctttgctttgtttttataaatgaatttttcatagaatttacagtatattcaaaggaagaaagataaaattattggtcatcatttgtaccttagaagtacaagaatttaagtaaaagaaatgttcatttttgttttaaaatttgttttccatgtgaagtttttattgagccaactttcatacatatcttgctagcctaaagtctaaatatttgtgttggcatcagaaaaacaaatgaggcagaattgctatgtgtggttgatcttcagataaattgactgatcacagttatttttgtatcagtctatgttattaggaaaaattgtttagttgttttctcccctgattaatggtgatattcaagtatgatacaaaaagaattgtaccaccaaatatttttgtgaggtctgctgttttccatattcattttatgctactgcctttaagaaagaactagtgtatccttgaaatagcacaaaaatgttttaaaattcataattgcaaaacaaatctgtgactaacttaatgtcttcagatctaaagggtgtaaaaatattgatacttcaatatttcacttgctgccaggaaaaacaaaattctcaatcttttgtaaatgggaggaggacttttgcatacatttttactctttaaataacgacaacgacacttatactgtcataataacaattatgtatttctttgtggttttaattttttttgtaattttacataaaacagttattttctatttttacgcagataaatatttgtgcataaaatgtaaaaatagtaaaatgagaaaaataaaactattatacagta

SEQ ID NO: 11702 - DNA, 4814 bp, Homo sapiens
  source 1..4814: mol_type = unassigned DNA
aggtgcctgggaggcgggaggggggttggggcttctcagcgccgattccgcgggaagggccctgggacctcacacttctagtcgcgggagctgcaggtcttacccggagagacgctgcacgtggagccctcgccgctgccgttctcagccggctctggagtgcgggcgggggcgacagggccgattccggagtgggactgatcctttgaaatactccagccatgactaaaagagaagcagaggagctgatagaaattgagattgatggaacagagaaagcagagtgcacagaagaaagcattgtagaacaaacctacgcgccagctgaatgtgtaagccaggccatagacatcaatgaaccaataggcaatttaaagaaactgctagaaccaagactacagtgttctttggatgctcatgaaatttgtctgcaagatatccagctggatccagaacgaagtttatttgaccaaggagtaaaaacagatggaactgtacagcttagtgtacaggtaatttcttaccaaggaattgaaccaaagttaaacatccttgaaattgttaaacctgcggacactgttgaggttgttattgatccagatgcccaccatgctgaatcagaagcacatcttgttgaagaagctcaagtgataactcttgatggcacaaaacacatcacaaccatttcagatgaaacttcagaacaagtgacaagatgggctgctgcactggaaggctataggaaagaacaagaacgccttgggataccctatgatcccatacagtggtccacagaccaagtcctgcattgggtggtttgggtaatgaaggaattcagcatgaccgatatagacctcaccacactcaacatttcggggagagaattatgtagtctcaaccaagaagatttttttcagcgggttcctcggggagaaattctctggagtcatctggaacttctccgaaaatatgtattggcaagtcaagaacaacagatgaatgaaatagttacaattgatcaacctgtgcaaattattccagcatcagtgcaatctgctacacctactaccattaaagttataaatagtagtgcgaaagcagccaaagtacaaagagcgccgaggatttcaggagaagatagaagctcacctgggaacagaacaggaaacaatggccaaatccaactatggcagtttttgctagaacttcttactgataaggacgctcgagactgcatttcttgggttggtgatgaaggtgaatttaagctaaatcagcctgaactggttgcacagaaatggggacagcgtaaaaataagcctacgatgaactatgagaaactcagtcgtgcattaagatattattacgatggggacatgatttgtaaagttcaaggcaagagatttgtgtacaagtttgtctgtgacttgaagactcttattggatacagtgcagcggagttgaaccgtttggtcacagaatgtgaacagaagaaacttgcaaagatgcagctccatggaattgcccagccagtcacagcagtagctctggctactgcttctctgcaaacggaaaaggataattgagccccaggacattctgagactccaaagtctttcttaaaatgtttagagcaagtatagctcttacctttattactgaatttgaatcttcttttatttctaggctgtacagtctgatgcatgatttttttataaatatttcatactcttgtgaatttggatctttttactttgagcatatattttagaatatgtgtatgttaaaggatctccacaatgtctgcagtgtgaaggcaggttcattgtggaatagtttaacagtcaggaaggctaaactggtcagtattaatgtgtagccctaccaaaaatagccagtagtatctgaaaatgaaaaataaatgaagtatctctaggaaacagtctggcttaactatttttgaaaatataactgtttcccctctctgctgctttagatgttgctttacatagaaccagaaaatggaatttctcagctaaagcatgtgtgcctgtttcatctaatcaagcagagctaaaatgttcataccgaataaatttatattaataaattactaaactaagagtatcaggttatttatatatttgcaagcaaaggacagtaagaagttgactggcaaaagagcagtgctgaaggaggagatccaggtttaaatctggcttattaactcaagccaattttaaggattttctgtatagattactcatgtcagaccaagaatttaaattattttgagagaggcatttaattctaataaaccagctgttataaaaattataaaatgatctctgtttttcctgtcagagatttaaaaaactgaaaaggtatacctcaacccaaaaataaaggtttgttttggtttgttatggcttccttttttaaaaaattaccctgtagtgccagtttattatgcaaagcagcttatattcctttgtttctgataaaatgaagactttaaatcagtcagtagtactttacctttcaaggcattagtaaattacttgcaaatagttttaaaaggaaaatacgacctttgttataggcagtcttctctttaagacaatacttttccacttgttttccttttccatattatatatgtgtattcatatagctgtatacatattcagttgatcattttataaacatatgaaggcataaagatatacagaagaaaaattattaaacaactcattttaagattcaaattaactaattcctgcatatatgacattccttacataagcgaacactaaacaaaaatggctagaaatgtctttttctttcttttctctctttgttgtttaaggtattaagcacgaattattacatgagactggcagatagctattaatcctcttacagatttgagaaagttgattctcaaatatttatgcaccttctccttcattgttttctttaaatctgtcctcttaaaaagcttcttaagagctcagttaatgcttttgacttaactaggagaaaaaggcatgataatacaggcaagatggcattgttagcaattctggtagtggtttggaatgaatcctaagaggcagggatcttaaggacaaggaagagaagagagagagggagggatctttgatctctttctctggtaatcttaatgcataattttactaatacatgttctcaattcattcatattattaagctcttcctgcagttgatatctgagcagagtaagatttgtatttccatttttacttttttgaaagagaatatatggacagattattagtacaatttgggcactgtggttttaagaatatctgagtaaaataacaatatgaaataataaacagaagctctaacgtcaggtaacaaatagacagcaagaaaggttttgcaccatcctcttacggcctagagagttgacaagttgcttgtagttttaaaaaaataataaagtatacccttctggtatatcatcaagagcttaagaatcttggctttcatatttaaaatgcttttggggagacatatattaaaattttagccaagatgatagacatgtctcaattatatatgtgtgtgtatgtttttaaagctaaaaacattacttttagatccctagaatgaaaatttttttctcatctatgcaattcccatatggtttttttttaaatcatattttattcattttctccctttagcaattttcattttatttctcataatttgaacagagacagttctcatacatgatcagatgctttttttttcttcttaccatcatttatgcatgacataggtaatgtgactaatttctccagttgattcaagaaactcattactttgcctcaaattatatgtaaaatatttgttttacttaggttacagttatcagaaaggtagtttttttcttctattaaaatataacattgtgaaagaaaataaaatttatgctattctttgctttgtttttataaatgaatttttcatagaatttacagtatattcaaaggaagaaagataaaattattggtcatcatttgtaccttagaagtacaagaatttaagtaaaagaaatgttcatttttgttttaaaatttgttttccatgtgaagtttttattgagccaactttcatacatatcttgctagcctaaagtctaaatatttgtgttggcatcagaaaaacaaatgaggcagaattgctatgtgtggttgatcttcagataaattgactgatcacagttatttttgtatcagtctatgttattaggaaaaattgtttagttgttttctcccctgattaatggtgatattcaagtatgatacaaaaagaattgtaccaccaaatatttttgtgaggtctgctgttttccatattcattttatgctactgcctttaagaaagaactagtgtatccttgaaatagcacaaaaatgttttaaaattcataattgcaaaacaaatctgtgactaacttaatgtcttcagatctaaagggtgtaaaaatattgatacttcaatatttcacttgctgccaggaaaaacaaaattctcaatcttttgtaaatgggaggaggacttttgcatacatttttactctttaaataacgacaacgacacttatactgtcataataacaattatgtatttctttgtggttttaattttttttgtaattttacataaaacagttattttctatttttacgcagataaatatttgtgcataaaatgtaaaaatagtaaaatgagaaaaataaaactattatacagta

SEQ ID NO: 11703 - DNA, 2726 bp, Homo sapiens
  source 1..2726: mol_type = unassigned DNA
ggggattttgggcgccgaccagacgcggcattttcggaaaatagcgccctgtgcagctgaagcgctttgtgtgtagcggggccgcgtcagcccggccgggtacgaggcgcctcgggtccccgcaccacctcctgctgccttcccgtcgccgctcccgaagcttttccagatgtccctggtagatttgggaaagaagcttttagaagcggcacgagcaggtcaagatgatgaagttcgtattttgatggcaaatggagctccctttactacagactggctgggaacttctccacttcatctagcagcacagtatggtcattattccaccacagaggtactgctgcgagctggtgtgagcagagatgccagaaccaaagtggaccgaacaccattacatatggcagcttctgagggccatgccagcatagtagaggttttacttaagcatggtgctgatgtcaatgcaaaggacatgttaaagatgacagctctccattgggccacagaacacaatcatcaagaggtggtggaacttttaatcaaatatggtgctgatgtacacacgcaaagtaaattttgtaaaactgcatttgatatttcaatagacaatggaaatgaagatttagcagagatattacagattgctatgcagaaccaaatcaacacaaacccagagagtcctgacactgtgacaatacatgctgcaacaccacagtttatcattggacctggaggggtggtgaacctaacaggtctggtatcttcagaaaattcatccaaggcaacagatgaaacgggtgtatctgctgttcagtttggaaactcttctacatcagtattagctacattagctgccttagctgaagcatctgctccattgtccaattcttcagaaactccagtagtggccacagaagaagtagttactgcagaatctgtggatggtgccattcagcaagtagttagttcagggggtcagcaagtcatcacaatagttacagatggaattcagcttggaaatttgcactctattccaaccagtggaattggtcagcccatcattgtgaccatgccagatggacaacaagtattaacagtaccagcaacagacattgctgaagaaactgttataagtgaagaaccaccagctaagagacaatgtatcgaaataattgaaaaccgggtggaatctgcagaaatagaagagagagaagctcttcagaaacagctggatgaagcaaatcgagaagcacaaaaatatcgacagcagctcctaaagaaagaacaggaagcagaggcctacagacagaagttggaagctatgactcgtcttcagactaataaagaagctgtttaattgaaatgaacatgtagtttgattttacttttggtcaagaaagaatacaatcttgaactgtacacaacaaaggtacagccatgggaatacagaatgatagaagagactacagatggataattggacttaagccatgagctctgagttcttgtaacataaaactttactttagaagttgtgaaatgtatttaaaactgaattctgtaaatagtttttttttttttacagttccaaatgagttgataaagattgttgaagagatccaaaaccagaataagccactgtttttgtgaattctttttgattttagtacaaaccttaatttctcagaaacggaacagttttaagggtgatcgttgttggttaggccaaatgttgtgtaataattatggtggactgatgctggaattactcctgtaggtataaacctctgtatgaagagaagatttctcccaggaaatctttgtacagctttaagttgtgtcagattctctgaaaacattttttagaaagcaaaatttttatatttgttcaatttcagctatacccaagtagatttacatgtatatgaagcaaatatttttaaaaatttctgtttgtacatattctgcatgttttataatttcaaaatgcatcacttacataggtatttctcccacagaaatgatgaaagtgaccagaaaaaaacaaaaacaaaacccctttactctgtaggtcattgaaacgaagtaagctggcagctggttttattggaatgacagtgttctcggaaggagcagcctacaagataacttgaatttgccaattctgcaaaatctgtgcttttttgaaaatttaagagtggggacgtgaaactgtattctgtgccttccatcatgatttccacatgaaagcactttaaggcactgattttaagataatgtttttggaaaacccaatgcatatgggtttctgaaatattttatggacttatttctccccaggaaatgattcttacggaaaaaaattgcttttgtatgtagaacaggaactttttgtattacagtgatgcaatagacatgtctaatgtaacttctacttttccttttgaaagctcagtgtctgtgctatgacttgctctcatcacaatattgttgaattccacaatgtatggacattaaacactggcagactgttcactttttcttttttttttttggtaaaatattacttcaaacccctttttcttgctttatttttcagtgttttattgctttatgaactgtttaaccctgaaatccctctaggttatctatactgtataaaaaagcaattacccttaaaactgtactctggcctacttttctattttgcaattaaatatcttttt

SEQ ID NO: 11704 - DNA, 1633 bp, Homo sapiens
  source 1..1633: mol_type = unassigned DNA
gctttctttgtgtggctgaagcgctagaaatggcatattttctttcccttcgttaaaaaatcagaccctctttcccctctctccccgcgggaacacagctagggagtgggtaggagcaggatctgccgacgagggcagaggcggaaaatcctcgggcgatgagctgaagagggccgggtccgggagggatgctgggagcttgactcactcgcacaccatgtgtccctccgcgcgcagcacgggggacttttcggtggggattttgggcgccgaccagacgcggcattttcggaaaatagcgccctgtgcagctgaagcgctttgtgtgtagcggggccgcgtcagcccggccgggtacgaggcgcctcgggtccccgcaccacctcctgctgccttcccgtcgccgctcccgaagcttttccaggtcacagcatatttgtggaggaagatgtccctggtagatttgggaaagaagcttttagaagcggcacgagcaggtcaagatgatgaagttcgtattttgatggcaaatggagctccctttactacagactggctgggaacttctccacttcatctagcagcacagtatggtcattattccaccacagaggtactgctgcgagctggtgtgagcagagatgccagaaccaaagtggaccgaacaccattacatatggcagcttctgagggccatgccagcatagtagaggttttacttaagcatggtgctgatgtcaatgcaaaggacatgttaaagatgacagctctccattgggccacagaacacaatcatcaagaggtggtggaacttttaatcaaatatggtgctgatgtacacacgcaaagtaaattttgtaaaactgcatttgatatttcaatagacaatggaaatgaagatttagcagagatattacagattgctatgcagaaccaaatcaacacaaacccagagagtcctgacactgtgacaatacatgctgcaacaccacagtttatcattggacctggaggggtggtgaacctaacagatgaaacgggtgtatctgctgttcagtttggaaactcttctacatcagtattagctacattagctgccttagctgaagcatctgctccattgtccaattcttcagaaactccagtagtggccacagaagaagtagttactgcagaatctgtggatggtgccattcagcaagtagttagttcagggggtcagcaagtcatcacaatagttacagatggaattcagcttggaaatttgcactctattccaaccagtggaattggtcagcccatcattgtgaccatgccagatggacaacaagtattaacagtaccagcaacagacattgctgaagaaactgttataagtgaagaaccaccagctaagagacaatgtatcgaaataattgaaaaccgggtggaatctgcagaaatagaagtaaggagtcttttacccggtgtgctttgccgcagtcatccaaaataaattcaattttttttgtcttttatatttattactgacagtattgttttgatacagaatgaaagtgcgtagtattttcattttgtttatttttgccttatacatatagcaagccctcaataaataaatattgaatgaatg

SEQ ID NO: 11705 - DNA, 3016 bp, Homo sapiens
  source 1..3016: mol_type = unassigned DNA
gctttctttgtgtggctgaagcgctagaaatggcatattttctttcccttcgttaaaaaatcagaccctctttcccctctctccccgcgggaacacagctagggagtgggtaggagcaggatctgccgacgagggcagaggcggaaaatcctcgggcgatgagctgaagagggccgggtccgggagggatgctgggagcttgactcactcgcacaccatgtgtccctccgcgcgcagcacgggggacttttcggtggggattttgggcgccgaccagacgcggcattttcggaaaatagcgccctgtgcagctgaagcgctttgtgtgtagcggggccgcgtcagcccggccgggtacgaggcgcctcgggtccccgcaccacctcctgctgccttcccgtcgccgctcccgaagcttttccagatgtccctggtagatttgggaaagaagcttttagaagcggcacgagcaggtcaagatgatgaagttcgtattttgatggcaaatggagctccctttactacagactggctgggaacttctccacttcatctagcagcacagtatggtcattattccaccacagaggtactgctgcgagctggtgtgagcagagatgccagaaccaaagtggaccgaacaccattacatatggcagcttctgagggccatgccagcatagtagaggttttacttaagcatggtgctgatgtcaatgcaaaggacatgttaaagatgacagctctccattgggccacagaacacaatcatcaagaggtggtggaacttttaatcaaatatggtgctgatgtacacacgcaaagtaaattttgtaaaactgcatttgatatttcaatagacaatggaaatgaagatttagcagagatattacagattgctatgcagaaccaaatcaacacaaacccagagagtcctgacactgtgacaatacatgctgcaacaccacagtttatcattggacctggaggggtggtgaacctaacagatgaaacgggtgtatctgctgttcagtttggaaactcttctacatcagtattagctacattagctgccttagctgaagcatctgctccattgtccaattcttcagaaactccagtagtggccacagaagaagtagttactgcagaatctgtggatggtgccattcagcaagtagttagttcagggggtcagcaagtcatcacaatagttacagatggaattcagcttggaaatttgcactctattccaaccagtggaattggtcagcccatcattgtgaccatgccagatggacaacaagtattaacagtaccagcaacagacattgctgaagaaactgttataagtgaagaaccaccagctaagagacaatgtatcgaaataattgaaaaccgggtggaatctgcagaaatagaagagagagaagctcttcagaaacagctggatgaagcaaatcgagaagcacaaaaatatcgacagcagctcctaaagaaagaacaggaagcagaggcctacagacagaagttggaagctatgactcgtcttcagactaataaagaagctgtttaattgaaatgaacatgtagtttgattttacttttggtcaagaaagaatacaatcttgaactgtacacaacaaaggtacagccatgggaatacagaatgatagaagagactacagatggataattggacttaagccatgagctctgagttcttgtaacataaaactttactttagaagttgtgaaatgtatttaaaactgaattctgtaaatagtttttttttttttacagttccaaatgagttgataaagattgttgaagagatccaaaaccagaataagccactgtttttgtgaattctttttgattttagtacaaaccttaatttctcagaaacggaacagttttaagggtgatcgttgttggttaggccaaatgttgtgtaataattatggtggactgatgctggaattactcctgtaggtataaacctctgtatgaagagaagatttctcccaggaaatctttgtacagctttaagttgtgtcagattctctgaaaacattttttagaaagcaaaatttttatatttgttcaatttcagctatacccaagtagatttacatgtatatgaagcaaatatttttaaaaatttctgtttgtacatattctgcatgttttataatttcaaaatgcatcacttacataggtatttctcccacagaaatgatgaaagtgaccagaaaaaaacaaaaacaaaacccctttactctgtaggtcattgaaacgaagtaagctggcagctggttttattggaatgacagtgttctcggaaggagcagcctacaagataacttgaatttgccaattctgcaaaatctgtgcttttttgaaaatttaagagtggggacgtgaaactgtattctgtgccttccatcatgatttccacatgaaagcactttaaggcactgattttaagataatgtttttggaaaacccaatgcatatgggtttctgaaatattttatggacttatttctccccaggaaatgattcttacggaaaaaaattgcttttgtatgtagaacaggaactttttgtattacagtgatgcaatagacatgtctaatgtaacttctacttttccttttgaaagctcagtgtctgtgctatgacttgctctcatcacaatattgttgaattccacaatgtatggacattaaacactggcagactgttcactttttcttttttttttttggtaaaatattacttcaaacccctttttcttgctttatttttcagtgttttattgctttatgaactgtttaaccctgaaatccctctaggttatctatactgtataaaaaagcaattacccttaaaactgtactctggcctacttttctattttgcaattaaatatctttttcacatatgttcattgtagacttatgtttttatcacatcttattaacacattaaaaatgttatcctactgca

SEQ ID NO: 11706 - DNA, 1401 bp, Homo sapiens
  source 1..1401: mol_type = unassigned DNA
gcacaccatgtgtccctccgcgcgcagcacgggggacttttcggtggggattttgggcgccgaccagacgcggcattttcggaaaatagcgccctgtgcagctgaagcgctttgtgtgtagcggggccgcgtcagcccggccgggtacgaggcgcctcgggtccccgcaccacctcctgctgccttcccgtcgccgctcccgaagcttttccagatgtccctggtagatttgggaaagaagcttttagaagcggcacgagcaggtcaagatgatgaagttcgtattttgatggcaaatggagctccctttactacagactggctgggaacttctccacttcatctagcagcacagtatggtcattattccaccacagaggtactgctgcgagctggtgtgagcagagatgccagaaccaaagtggaccgaacaccattacatatggcagcttctgagggccatgccagcatagtagaggttttacttaagcatggtgctgatgtcaatgcaaaggacatgttaaagatgacagctctccattgggccacagaacacaatcatcaagaggtggtggaacttttaatcaaatatggtgctgatgtacacacgcaaagtaaattttgtaaaactgcatttgatatttcaatagacaatggaaatgaagatttagcagagatattacagattgctatgcagaaccaaatcaacacaaacccagagagtcctgacactgtgacaatacatgctgcaacaccacagtttatcattggacctggaggggtggtgaacctaacagatgaaacgggtgtatctgctgttcagtttggaaactcttctacatcagtattagctacattagctgccttagctgaagcatctgctccattgtccaattcttcagaaactccagtagtggccacagaagaagtagttactgcagaatctgtggatggtgccattcagcaagtagttagttcagggggtcagcaagtcatcacaatagttacagatggaattcagcttggaaatttgcactctattccaaccagtggaattggtcagcccatcattgtgaccatgccagatggacaacaagtattaacagtaccagcaacagacattgctgaagaaactgttataagtgaagaaccaccagctaagagacaatgtatcgaaataattgaaaaccgggtggaatctgcagaaatagaagtaaggagtcttttacccggtgtgctttgccgcagtcatccaaaataaattcaattttttttgtcttttatatttattactgacagtattgttttgatacagaatgaaagtgcgtagtattttcattttgtttatttttgccttatacatatagcaagccctcaataaataaatattgaatgaatgaa

SEQ ID NO: 11707 - DNA, 1392 bp, Homo sapiens
  source 1..1392: mol_type = unassigned DNA
ggggattttgggcgccgaccagacgcggcattttcggaaaatagcgccctgtgcagctgaagcgctttgtgtgtagcggggccgcgtcagcccggccgggtacgaggcgcctcgggtccccgcaccacctcctgctgccttcccgtcgccgctcccgaagcttttccagatgtccctggtagatttgggaaagaagcttttagaagcggcacgagcaggtcaagatgatgaagttcgtattttgatggcaaatggagctccctttactacagactggctgggaacttctccacttcatctagcagcacagtatggtcattattccaccacagaggtactgctgcgagctggtgtgagcagagatgccagaaccaaagtggaccgaacaccattacatatggcagcttctgagggccatgccagcatagtagaggttttacttaagcatggtgctgatgtcaatgcaaaggacatgttaaagatgacagctctccattgggccacagaacacaatcatcaagaggtggtggaacttttaatcaaatatggtgctgatgtacacacgcaaagtaaattttgtaaaactgcatttgatatttcaatagacaatggaaatgaagatttagcagagatattacagattgctatgcagaaccaaatcaacacaaacccagagagtcctgacactgtgacaatacatgctgcaacaccacagtttatcattggacctggaggggtggtgaacctaacaggtctggtatcttcagaaaattcatccaaggcaacagatgaaacgggtgtatctgctgttcagtttggaaactcttctacatcagtattagctacattagctgccttagctgaagcatctgctccattgtccaattcttcagaaactccagtagtggccacagaagaagtagttactgcagaatctgtggatggtgccattcagcaagtagttagttcagggggtcagcaagtcatcacaatagttacagatggaattcagcttggaaatttgcactctattccaaccagtggaattggtcagcccatcattgtgaccatgccagatggacaacaagtattaacagtaccagcaacagacattgctgaagaaactgttataagtgaagaaccaccagctaagagacaatgtatcgaaataattgaaaaccgggtggaatctgcagaaatagaagtaaggagtcttttacccggtgtgctttgccgcagtcatccaaaataaattcaattttttttgtcttttatatttattactgacagtattgttttgatacagaatgaaagtgcgtagtattttcattttgtttatttttgccttatacatatagcaagccctcaataaataaatattgaatgaatgaa

SEQ ID NO: 11708 - DNA, 406 bp, Homo sapiens
  source 1..406: mol_type = unassigned DNA
aggaggggatgtgtatgagaacttctgagaagaaaggatcagaatgtatgcattctttttttgagcagaatattgatggttcatttttgtgacttacaagaaccagcagtttattggcttcattttgtaggaagcagatgtccctggtagatttgggaaagaagcttttagaagcggcacgagcaggtcaagatgatgaagttcgtattttgatggcaaatggagctccctttactacagactggctgggaacttctccacttcatctagcagcacagtatggtcattattccaccacagaggtactgctgcgagctggtgtgagcagagatgccagaaccaaagtggaccgaacaccattacatatggcagcttctgagggccatgccagcatagtagaggtttt

SEQ ID NO: 11709 - DNA, 730 bp, Homo sapiens
  source 1..730: mol_type = unassigned DNA
atgtgtccctccgcgcgcagcacgggggacttttcggtggggattttgggcgccgaccagacgcggcattttcggaaaatagcgccctgtgcagctgaagcgctttgtgtgtagcggggccgcgtcagcccggccgggtacgaggcgcctcgggtccccgcaccacctcctgctgccttcccgtcgccgctcccgaagcttttccaggattattccctcctttgctggacctctagtatccatggcacttgcccattaaatgctagcagagcatcctcaccttcagtctccaaaatgcctctataaacatacaaagggccctgaagggggcagtgctgctaccaatgagaaccactgatttccaagaatccatctacattaatctaccatatggcggccgggcgcggtggctcacgcctgtaatcccagcactatgggaggccgaggcgggcagatcacgagatgtccctggtagatttgggaaagaagcttttagaagcggcacgagcaggtcaagatgatgaagttcgtattttgatggcaaatggagctccctttactacagactggctgggaacttctccacttcatctagcagcacagtatggtcattattccaccacagaggtactgctgcgagctggtgtgagcagagatgccagaaccaaagtggaccgaacaccattacatatggcagcttctgagggccatgccagcatagtagaggttt

SEQ ID NO: 11710 - DNA, 1317 bp, Homo sapiens
  source 1..1317: mol_type = unassigned DNA
tggcgcaaattcgtggatcgctccgctgaatccgcccgcgcgtcgccgccgtcgtcgccgccccccgtcccggcccccctgggttccctcagcccagccctgtccagcccggttcccgggaggatgaagttcgtgtacaaagaagagcatccgttcgagaagcgccgctctgagggcgagaagatccgaaagaaatacccggaccgggtgccggtgatagtagaaaaggctcccaaagctcggataggagacctggacaaaaagaaatacctggtgccttctgatctcacagttggtcagttctacttcttgatccggaagcgaattcatctccgagctgaggatgccttgtttttctttgtcaacaatgtcattccacccaccagtgccacaatgggtcagctgtaccaggaacaccatgaagaagacttctttctctacattgcctacagtgacgaaagtgtctacggtctgtgaagctgctgcccctgagctggaggggggtctcattctacaaagagagaggtggcccccctttcttgacctcctcctccttcaagctcaaacaccacctcccttattcaggaccggcacttcttaatgtttgtggctttctctccagcctctcttaggaggggtaatggtggagttggcatcttgtaactctcctttctcctttcttcccctttctctgcccgcctttcccatcctgctgtagacttcttgattgtcagtctgtgtcacatccagtgattgttttggtttctgttccctttctgactgcccaaggggctcagaaccccagcaatcccttcctttcactaccttcttttttgggggtagttggaagggactgaaattgtggggggaaggtaggaggcacatcaataaagaggaaaccaccaagctgaactgaattttgccttgtgttgctcccctcgtcccgctgattttaagtctttccaaggtgtcagtgggtttcagtggtggggaaagaagagtactgggtacaagctggagggatagaagtatattttggtttattctgttcatgttgggcttttccctgtctgcaaaaagagggtgcttttgttgtgatggaatggaatactgaggattatttcttgaaactttagttttataacacgcatgtgaaactaaatgttaaaaatgctcatgtaaaaaaaaatttttttttactgtgggttcctgtggagaaagttccgaagtacctgctttaggtgaacatccacatttgctagaacattctaactaagatattttcatgtgtgcaagctagtaaaacggctgttctca

SEQ ID NO: 11711 - DNA, 1955 bp, Homo sapiens
  source 1..1955: mol_type = unassigned DNA
ctgggcgcctggcgcatggggggcggggcggggctcgcggggtgacgtcacagcccgacgcgccacccagctgtttttgtgctcccagctctagcgaaaagccgccggtatttctccatctggctctcctctacctccaggcaggctcacccgagatccccgccccgaaccccccctgcacactcggcccagcgctgttgcccccggagcggacgtttctgcagctattctgagcacaccttgacgtcggctgagggagcgggacagggtcagcggcgaaggaggcaggccccgcgcggggatctcggaagccctgcggtgcatcatgaagttccagtacaaggaggaccatccctttgagtatcggaaaaaggaaggagaaaagatccggaagaaatatccggacagggtccccgtgattgtagagaaggctccaaaagccagggtgcctgatctggacaagaggaagtacctagtgccctctgaccttactgttggccagttctacttcttaatccggaagagaatccacctgagacctgaggacgccttattcttctttgtcaacaacaccatccctcccaccagtgctaccatgggccaactgtatgaggacaatcatgaggaagactattttctgtatgtggcctacagtgatgagagtgtctatgggaaatgagtggttggaagcccagcagatgggagcacctggacttgggggtaggggaggggtgtgtgtgcgcgacatggggaaagagggtggctcccaccgcaaggagacagaaggtgaagacatctagaaacattacaccacacacaccgtcatcacattttcacatgctcaattgatattttttgctgcttcctcggcccagggagaaagcatgtcaggacagagctgttggattggctttgatagaggaatggggatgatgtaagtttacagtattcctggggtttaattgttgtgcagtttcatagatgggtcaggaggtggacaagttggggccagagatgatggcagtccagcagcaactccctgtgctcccttctctttgggcagagattctatttttgacatttgcacaagacaggtagggaaaggggacttgtggtagtggaccatacctggggaccaaaagagacccactgtaattgatgcattgtggcccctgatcttccctgtctcacacttcttttctcccatcccggttgcaatctcactcagacatcacagtaccaccccaggggtggcagtagacaacaacccagaaatttagacagggatctcttacctttggaaaataggggttaggcatgaaggtggttgtgattaagaagatggttttgttattaaatagcattaaactggaattgacaagagtgttgagcatccctgtctaacctgctctttctctttggtgccccttatctcaccccttccttggaatttaataagtctcaggcatttccaattgtagactaaaaccactcttagcatctcctctagtattttccatgtatcaggacagaggtgtcttatgtagggagggggcaagtatgaagtaaggtaattatatactactctcattcaggattcttgctcccatgctgctgtcccttcaggctcacatgcacaggaatgctacatgatggccagctgcttccctccttggttatcatccactgcagctgctagttagaaaggtttggagggatgacttttagtaaatcatggggattttattgatttattttcacttttgggattttgtggggtgggagtggggagcaggaattgcactcagacatgacatttcaattcatctctgctaatgaaaagggttctttctcttgggggaaatgtgtgtgtcagttctgtcagctgcaagttcttgtataatgaagtcaatgccatcaggccaaggaaataaaataattgcttaccttaaaaa

SEQ ID NO: 11712 - DNA, 855 bp, Homo sapiens
  source 1..855: mol_type = unassigned DNA
ggctcgcggggtgacgtcacagcccgacgcgccacccagctgtttttgtgctcccagctctagcgaaaagccgccggtatttctccatctggctctcctctacctccaggcaggctcacccgagatccccgccccgaaccccccctgcacactcggcccagcgctgttgcccccggagcggacgtttctgcagctattctgagcacaccttgacgtcggctgagggagcgggacagggtcagcggcgaaggaggcaggccccgcgcggggatctcggaagccctgcggtgcatcatgaagttccagtacaaggaggaccatccctttgagtatcggaaaaaggaaggagaaaagatccggaagaaatatccggacagggtccccgtgattgtagagaaggctccaaaagccagggtgcctgatctggacaagaggaagtacctagtgccctctgaccttactgttggccagttctacttcttaatccggaagagaatccacctgagacctgaggacgccttattcttctttgtcaacaacaccatccctcccaccagtgctaccatgggccaactgtatgaggtaatggttctggttgcacaatactggatgccgtccagtgcagtctggcatcctctagcccttgttctagatgcgttgataacacatctgagaagtggggcagaaggtgttatttatccggatcctcttacatatggcagtgtaaggctctgagagattagatacctcttgttttttagggattagccactctactagatttaatccttctgaaatcttgtctgactatagtcttgtctgactatagtgttttaatgctggactgtttattga

SEQ ID NO: 11713 - DNA, 653 bp, Homo sapiens
  source 1..653: mol_type = unassigned DNA
gtgctcccagctctagcgaaaagccgccggtatttctccatctggctctcctctacctccaggcaggctcacccgagatccccgccccgaaccccccctgcacactcggccccgcgcggggatctcggaagccctgcggtgcatcatgaagttccagtacaaggaggaccatccctttgagtatcggaaaaaggaaggagaaaagatccggaagaaatatccggacagggtccccgtgattgtagagaaggctccaaaagccagggtgcctgatctggacaagaggaagtacctagtgccctctgaccttactgttggccagttctacttcttaatccggaagagaatccacctgagacctgaggacgccttattcttctttgtcaacaacaccatccctcccaccagtgctaccatgggccaactgtatgaggtaatggttctggttgcacaatactggatgccgtccagtgcagtctggcatcctctagcccttgttctagatgcgttgataacacatctgagaagtggggcagaaggtgttatttatccggatcctcttacatatggcagtgtaaggctctgagagattagatacctcttgttttttagggattagccactctactagatttaatccttctgaaatcttg

SEQ ID NO: 11714 - DNA, 553 bp, Homo sapiens
  source 1..553: mol_type = unassigned DNA
gtatttgttttggggcccaaccaagaaaaacagtggagggggaataaaacatgtttaaatcttttttttgtcttaaaaccatctttaatttcacagtcacaaaataaaacataactcgaatgttttgatgtttgcagtgacatcgattgtgaaaaaggcaggctcacccgagatccccgccccgaaccccccctgcacactcggcccagcgctgttgcccccggagcggacgtttctgcagctattctgagcacaccttgacgtcggctgagggagcgggacagggtcagcggcgaaggaggcaggccccgcgcggggatctcggaagccctgcggtgcatcatgaagttccagtacaaggaggaccatccctttgagtatcggaaaaaggaaggagaaaagatccggaagaaatatccggacagggtccccgtgattgtagagaaggctccaaaagccagggtgcctgatctggacaagaggaagtacctagtgccctctgaccttactgttggccagttctacttcttaatccggaagagaatccacctga

SEQ ID NO: 11715 - DNA, 571 bp, Homo sapiens
  source 1..571: mol_type = unassigned DNA
ctctcctctacctccaggcaggctcacccgagatccccgccccgaaccccccctgcacactcggccccgcgcggggatctcggaagccctgcggtgcatcatgaagttccagtacaaggaggaccatccctttgagtatcggaaaaaggaaggagaaaagatccggaagaaatatccggacagggtccccgtgattgtagagaaggctccaaaagccagggtgcctgatctggacaagaggaagtacctagtgccctctgaccttactgttggccagttctacttcttaatccggaagagaatccacctgagacctgaggacgccttattcttctttgtcaacaacaccatccctcccaccagtgctaccatgggccaactgtatgaggacaatcatgaggaagactattttctgtatgtggcctacagtgatgagagtgtctatgggaaatgagtggttggaagcccagcagatgggagcacctggacttgggggtaggggaggggtgtgtgtgcgcgacatggggaaagagggtggctcccaccgcaaggagacagaaggtgaagacat

SEQ ID NO: 11716 - DNA, 1002 bp, Homo sapiens
  source 1..1002: mol_type = unassigned DNA
cgacagccggaagtcccgcctgccgtgtagtcgccgccgtcgctgccgctgccgctgccgccgtcgttgttgttgtgctcggtgcgctgagctccgcggctccgcgagccggttccgtccccttcccgccgccgccatgaagtggatgttcaaggaggaccactcgctggaacacagatgcgtggagtccgcgaagattcgagcgaaatatcccgacagggttccggtgattgtggaaaaggtctcaggctctcagattgttgacattgacaaacggaagtacttggttccatctgatatcactgtggctcagttcatgtggatcatcaggaaaaggatccagcttccttctgaaaaggcgatcttcctgtttgtggataagacagtcccacagtccagcctaactatgggacagctttacgagaaggaaaaagatgaagatggattcttatatgtggcctacagcggagagaacacttttggcttctgagggccattgctgggctaggtgcaccgtaactgcttgtgtatcttgtaaatagccagccattttcagttattataccagaacctcttcacatagacctattagtgcatttgtaactggatttatttcttaatatattggaaggttttgtttccttagactagtaaattatcatacagagttttattttgagtttttctttttgtgcattgtcctcatgcctgtattctccaggaaacttgtccttctggaaatcatattgaatgatatttctatatcgaagtgaggtaggtgcggtattaaagtgaaagggaaggtgatgcatttattctgggttatgcttgaagtgttagatggctaagtattaaaattatccaaattaaatccttagcagtcagaacacttgcttcactagaatatgccaactgccaatcatgttggactgagctaatttgttcctctttctgaaactattaaggtaaataattaacaataaaaattctcttataaaggca

SEQ ID NO: 11717 - DNA, 3222 bp, Homo sapiens
  source 1..3222: mol_type = unassigned DNA
gtttcctccgaagtggttggtgccttagcaactaaagctggcaactgggacatcgtccggtgctgcaggtctcagccgaagggcgtcggaaactgcgctcgcatcgagcagtttccagcctcctgggtaaaggagcagtctcctcccttgcttgggactctggacgcatctcattccggtgaaagtaagggacagcttaggaccagaagcctttcgcggagaaaaggctgacatgcccgtcctatatgacaggttactgaagctaaaggagatgtttaactccaagtttggatctattcccaagttttatgttcgagcaccaggaagagtcaacataataggagagcatatagattattgtggatattctgttcttcctatggctgtagaacaagatgtgctaatagctgtagaacctgtgaaaacgtacgctctccaactggccaatacaaatcccttgtatccggacttcagtactagtgctaataacatccagattgataaaaccaagcctttgtggcacaactatttcttatgtggacttaaaggaattcaggaacactttggtcttagtaacctgactggaatgaactgcctggtagatggaaatatcccaccaagttctggcctctccagctccagtgctttggtctgttgtgctggcttggtgacgctcacagtgctgggaaggaatctatccaaggtggaacttgcagaaatctgtgccaagagtgagcgttacattggcactgaaggaggaggcatggaccagtctatatcatttcttgcagaagaaggaactgccaagttgatagaatttagtcctctgagggcaaccgatgtaaaactcccaagtggagcagtgtttgtgattgccaacagttgtgtggagatgaataaggcagcaacttcccatttcaatatcagggtgatggagtgtcggctggctgcgaagctcctggctaaatacaaaagcttgcaatgggacaaagtactgaggctggaggaggtgcaggctaaactagggattagtctagaagaaatgctgttggtcacagaagatgcccttcatcctgaaccctataaccctgaggagatctgcaggtgtctgggaattagcctggaggaactccgaacccaaatcctgagtccaaacactcaagatgtgctcatcttcaaactctatcagcgggcaaagcatgtgtacagcgaggctgcgcgagtgctccagtttaagaagatatgtgaagaagcacctgaaaacatggtccagctgctgggagagttgatgaaccagagccacatgagctgccgggacatgtatgagtgcagctgccccgagctggatcagctggtggacatctgtcggaagtttggggctcaagggtcacgacttactggagcaggatggggaggctgcacagtatcaatggtacctgcggacaagctgcccagctttctagcaaatgtgcacaaagcttattaccagaggagtgatggaagcttagcaccggagaagcaaagtttgtttgctaccaaacctggaggtggggctttggttttgcttgaggcctgaaaaaatgtaaaaagtctgagagaaactacttagggcacttaggaattggcaggactttctgtgccacagtaaattaatcttccttctgttttgtattatgatgaacggttgctattatatcaagatatattttcaaagaaatggttgaaagctctctatgcttcataatgattctttttccatcttaaaatatggttttactattaagagccaagatcatgcttggacagatcttttaagaataacttactgagatttattgatttgaagattttaaagatgaatggtaaaacacactcttaatactgattacatggattggacttgaattaaatatattgttacaattaaactgataccactgaattgtatgcattattcttgaatagagttcatttctggtttctcttagtattcttcttcctcaaagttgtagttgtctgttgatgatggtgatgatgatgatgatgacgatagtgatgccacacattctctctcaatttcagcttcggaacgctatgaaaataatacatgattaaagtttcacagatcttcttggacattgtataattgaatttgaatgtgagatttctccagttatcaagagactaaggatttttttttttttttgacaaaaggaggatacaggaagaaaattcagactcatttgaatatttgtaaaccatgtaatatataaataaccactttcaattcttttggccctgagctatctccattacttaatagaaaaacttagataaaaaacactttaagactcttctattcacattgaaataaagaattatctagatgataattcagataattcagtttgttcatagaattactttcttatcactctttttctactactttttctcaaatacctctctaatccaagaggcacttccaagaaattccacacattccttatatcccttttttgcttgtctagcaaagcttgtttgtatatatgcaccccattgtaaagcaggtatgcaggtatgtgggtgaaagtgactatgaaaagacttaatgaattctgggatttgtaatggtattgatgggtatctctgtatgtatatcaagagtgggcagaaatgtttggctggtgatggcaaatgactggctttctcttgtggatggactataggaagcactttctgaattatgtaatgatttggaccaaaaagtattttgctgaaatactcaggtaattgagatagcaatggttttatggcatgaattatccaaaaaaatatcagaattacttattattctgtgatttcattagctcattaatgtttaactcacagattgggcatcaccatctagaatttcagtttaagggaggcctgcgcaaagctagttttatttcttaaaggataacagtcatacatagaatactaggaaagccaatattctatttaaaaataaacttctgatgcattttcattcttagcagaaaggtaaatgcttgagaaagcttgagtcaaatttgttaaaagaattttgagttctataaatccaaaaatctgaaacctgaatttatttaaatttataatcctttattttttaataccgtgccattttccacaaaggatttgtggttggtatataattctttaaagatacctggatcagtg

SEQ ID NO: 11718 - DNA, 1834 bp, Homo sapiens
  source 1..1834: mol_type = unassigned DNA
agggcgggagctgtttatctcccggaagaaaacggctcctgtcacagaagtctcgtgattgctctgggagctttgcttagacacttgaaactacaggagaaagaaggatctagcgaaatatggctacagagagccctgctacgcgtcgggtccaggttactgaagctaaaggagatgtttaactccaagtttggatctattcccaagttttatgttcgagcaccaggaagagtcaacataataggagagcatatagattattgtggatattctgttcttcctatggctgtagaacaagatgtgctaatagctgtagaacctgtgaaaacgtacgctctccaactggccaatacaaatcccttgtatccggacttcagtactagtgctaataacatccagattgataaaaccaagcctttgtggcacaactatttcttatgtggacttaaaggaattcaggaacactttggtcttagtaacctgactggaatgaactgcctggtagatggaaatatcccaccaagttctggcctctccagctccagtgctttggtctgttgtgctggcttggtgacgctcacagtgctgggaaggaatctatccaaggtggaacttgcagaaatctgtgccaagagtgagcgttacattggcactgaaggaggaggcatggaccagtctatatcatttcttgcagaagaaggaactgccaagttgatagaatttagtcctctgagggcaaccgatgtaaaactcccaagtggagcagtgtttgtgattgccaacagttgtgtggagatgaataaggcagcaacttcccatttcaatatcagggtgatggagtgtcggctggctgcgaagctcctggctaaatacaaaagcttgcaatgggacaaagtactgaggctggaggaggtgcaggctaaactagggattagtctagaagaaatgctgttggtcacagaagatgcccttcatcctgaaccctataaccctgaggagatctgcaggtgtctgggaattagcctggaggaactccgaacccaaatcctgagtccaaacactcaagatgtgctcatcttcaaactctatcagcgggcaaagcatgtgtacagcgaggctgcgcgagtgctccagtttaagaagatatgtgaagaagcacctgaaaacatggtccagctgctgggagagttgatgaaccagagccacatgagctgccgggacatgtatgagtgcagctgccccgagctggatcagctggtggacatctgtcggaagtttggggctcaagggtcacgacttactggagcaggatggggaggctgcacagtatcaatggtacctgcggacaagctgcccagctttctagcaaatgtgcacaaagcttattaccagaggagtgatggaagcttagcaccggagaagcaaagtttgtttgctaccaaacctggaggtggggctttggttttgcttgaggcctgaaaaaatgtaaaaagtctgagagaaactacttagggcacttaggaattggcaggactttctgtgccacagtaaattaatcttccttctgttttgtattatgatgaacggttgctattatatcaagatatattttcaaagaaatggttgaaagctctctatgcttcataatgattctttttccatcttaaaatatggttttactattaagagccaagatcatgcttggacagatcttttaagaataacttactgagatttattgatttgaagattttaaagatgaatggtaaaacacactcttaatactgattacatggattggacttgaattaaatatattgttacaattaaactg

SEQ ID NO: 11719 - DNA, 2053 bp, Homo sapiens
  source 1..2053: mol_type = unassigned DNA
gattgctctgggagctttgcttagacacttgaaactacaggagaaagaaggatctagcgaaatatggctacagagagccctgctacgcgtcgggtccaggttactgaagctaaaggagatgtttaactccaagtttggatctattcccaagttttatgttcgagcaccaggaagagtcaacataataggagagcatatagattattgtggatattctgttcttcctatggctgtagaacaagatgtgctaatagctgtagaacctgtgaaaacgtacgctctccaactggccaatacaaatcccttgtatccgaaataaaaagggtcagttggaggtagtttagtcactaaggccactgcaacttcctctcttaactcttagcagctggagatgttttgctgtagacacacagtttgaacataaaagggacttcagtactagtgctaataacatccagattgataaaaccaagcctttgtggcacaactatttcttatgtggacttaaaggaattcaggaacactttggtcttagtaacctgactggaatgaactgcctggtagatggaaatatcccaccaagttctggcctctccagctccagtgctttggtctgttgtgctggcttggtgacgctcacagtgctgggaaggaatctatccaaggtggaacttgcagaaatctgtgccaagagtgagcgttacattggcactgaaggaggaggcatggaccagtctatatcatttcttgcagaagaaggaactgccaagttgatagaatttagtcctctgagggcaaccgatgtaaaactcccaagtggagcagtgtttgtgattgccaacagttgtgtggagatgaataaggcagcaacttcccatttcaatatcagggtgatggagtgtcggctggctgcgaagctcctggctaaatacaaaagcttgcaatgggacaaagtactgaggctggaggaggtgcaggctaaactagggattagtctagaagaaatgctgttggtcacagaagatgcccttcatcctgaaccctataaccctgaggagatctgcaggtgtctgggaattagcctggaggaactccgaacccaaatcctgagtccaaacactcaagatgacggagtcgtgctctatcgcccaggctggagtgcaacggcgtgatctcagctcactgcaacctctgcctcccaggttcaagcaattctcccacttcagtctctcaaatagctgggattacatgcacccaccatcatcatgcccagtgctcatcttcaaactctatcagcgggcaaagcatgtgtacagcgaggctgcgcgagtgctccagtttaagaagatatgtgaagaagcacctgaaaacatggtccagctgctgggagagttgatgaaccagagccacatgagctgccgggacatgtatgagtgcagctgccccgagctggatcagctggtggacatctgtcggaagtttggggctcaagggtcacgacttactggagcaggatggggaggctgcacagtatcaatggtacctgcggacaagctgcccagctttctagcaaatgtgcacaaagcttattaccagaggagtgatggaagcttagcaccggagaagcaaagtttgtttgctaccaaacctggaggtggggctttggttttgcttgaggcctgaaaaaatgtaaaaagtctgagagaaactacttagggcacttaggaattggcaggactttctgtgccacagtaaattaatcttccttctgttttgtattatgatgaacggttgctattatatcaagatatattttcaaagaaatggttgaaagctctctatgcttcataatgattctttttccatcttaaaatatggttttactattaagagccaagatcatgcttggacagatcttttaagaataacttactgagatttattgatttgaagattttaaagatgaatggtaaaacacactcttaatactgattacatggattggacttgaattaaatatattgttacaattaaactgataccactgaattgt

SEQ ID NO: 11720 - DNA, 1950 bp, Homo sapiens
  source 1..1950: mol_type = unassigned DNA
agacacttgaaactacaggagaaagaaggatctagcgaaatatggctacagagagccctgctacgcgtcgggtccaggtggcagaacatcctagatggagtctcgctctgtcacctgtgctggaggctagagtgcaagtggcacgatcttggctcactgcaacctccgcctcctgggttgaagtgattctcctgcctccgcctccggagtagctgggattacaggttactgaagctaaaggagatgtttaactccaagtttggatctattcccaagttttatgttcgagcaccaggaagagtcaacataataggagagcatatagattattgtggatattctgttcttcctatggctgtagaacaagatgtgctaatagctgtagaacctgtgaaaacgtacgctctccaactggccaatacaaatcccttgtatccggacttcagtactagtgctaataacatccagattgataaaaccaagcctttgtggcacaactatttcttatgtggacttaaaggaattcaggaacactttggtcttagtaacctgactggaatgaactgcctggtagatggaaatatcccaccaagttctggcctctccagctccagtgctttggtctgttgtgctggcttggtgacgctcacagtgctgggaaggaatctatccaaggtggaacttgcagaaatctgtgccaagagtgagcgttacattggcactgaaggaggaggcatggaccagtctatatcatttcttgcagaagaaggaactgccaagttgatagaatttagtcctctgagggcaaccgatgtaaaactcccaagtggagcagtgtttgtgattgccaacagttgtgtggagatgaataaggcagcaacttcccatttcaatatcagggtgatggagtgtcggctggctgcgaagctcctggctaaatacaaaagcttgcaatgggacaaagtactgaggctggaggaggtgcaggctaaactagggattagtctagaagaaatgctgttggtcacagaagatgcccttcatcctgaaccctataaccctgaggagatctgcaggtgtctgggaattagcctggaggaactccgaacccaaatcctgagtccaaacactcaagatgtgctcatcttcaaactctatcagcgggcaaagcatgtgtacagcgaggctgcgcgagtgctccagtttaagaagatatgtgaagaagcacctgaaaacatggtccagctgctgggagagttgatgaaccagagccacatgagctgccgggacatgtatgagtgcagctgccccgagctggatcagctggtggacatctgtcggaagtttggggctcaagggtcacgacttactggagcaggatggggaggctgcacagtatcaatggtacctgcggacaagctgcccagctttctagcaaatgtgcacaaagcttattaccagaggagtgatggaagcttagcaccggagaagcaaagtttgtttgctaccaaacctggaggtggggctttggttttgcttgaggcctgaaaaaatgtaaaaagtctgagagaaactacttagggcacttaggaattggcaggactttctgtgccacagtaaattaatcttccttctgttttgtattatgatgaacggttgctattatatcaagatatattttcaaagaaatggttgaaagctctctatgcttcataatgattctttttccatcttaaaatatggttttactattaagagccaagatcatgcttggacagatcttttaagaataacttactgagatttattgatttgaagattttaaagatgaatggtaaaacacactcttaatactgattacatggattggacttgaattaaatatattgttacaattaaactgataccactgaattgtatgcattattcttgaatagagttcatttctgg

SEQ ID NO: 11721 - DNA, 1768 bp, Homo sapiens
  source 1..1768: mol_type = unassigned DNA
cggggagcaagtggaacccttgggattctataaggacacgtggctgggcttgcaaaaaagatcacgccgcaaacacattctaccttgactactacgaagggttactgaagctaaaggagatgtttaactccaagtttggatctattcccaagttttatgttcgagcaccaggaagagtcaacataataggagagcatatagattattgtggatattctgttcttcctatggctgtagaacaagatgtgctaatagctgtagaacctgtgaaaacgtacgctctccaactggccaatacaaatcccttgtatccggacttcagtactagtgctaataacatccagattgataaaaccaagcctttgtggcacaactatttcttatgtggacttaaaggaattcaggaacactttggtcttagtaacctgactggaatgaactgcctggtagatggaaatatcccaccaagttctggcctctccagctccagtgctttggtctgttgtgctggcttggtgacgctcacagtgctgggaaggaatctatccaaggtggaacttgcagaaatctgtgccaagagtgagcgttacattggcactgaaggaggaggcatggaccagtctatatcatttcttgcagaagaaggaactgccaagttgatagaatttagtcctctgagggcaaccgatgtaaaactcccaagtggagcagtgtttgtgattgccaacagttgtgtggagatgaataaggcagcaacttcccatttcaatatcagggtgatggagtgtcggctggctgcgaagctcctggctaaatacaaaagcttgcaatgggacaaagtactgaggctggaggaggtgcaggctaaactagggattagtctagaagaaatgctgttggtcacagaagatgcccttcatcctgaaccctataaccctgaggagatctgcaggtgtctgggaattagcctggaggaactccgaacccaaatcctgagtccaaacactcaagatgtgctcatcttcaaactctatcagcgggcaaagcatgtgtacagcgaggctgcgcgagtgctccagtttaagaagatatgtgaagaagcacctgaaaacatggtccagctgctgggagagttgatgaaccagagccacatgagctgccgggacatgtatgagtgcagctgccccgagctggatcagctggtggacatctgtcggaagtttggggctcaagggtcacgacttactggagcaggatggggaggctgcacagtatcaatggtacctgcggacaagctgcccagctttctagcaaatgtgcacaaagcttattaccagaggagtgatggaagcttagcaccggagaagcaaagtttgtttgctaccaaacctggaggtggggctttggttttgcttgaggcctgaaaaaatgtaaaaagtctgagagaaactacttagggcacttaggaattggcaggactttctgtgccacagtaaattaatcttccttctgttttgtattatgatgaacggttgctattatatcaagatatattttcaaagaaatggttgaaagctctctatgcttcataatgattctttttccatcttaaaatatggttttactattaagagccaagatcatgcttggacagatcttttaagaataacttactgagatttattgatttgaagattttaaagatgaatggtaaaacacactcttaatactgattacatggattggacttgaattaaatatattgtta

SEQ ID NO: 11722 - DNA, 2043 bp, Homo sapiens
  source 1..2043: mol_type = unassigned DNA
tagtcagcttcgcacgtgctctgcgcaggggctcctgcgaggccctagtccctccctgggagctaagagcaggacggaggctgtacctgactgctgcttggagggaaccctggctgagtccagggaggaggagccagaggaggggccgattggaagcagccacctcagcgaagctgcaggatttccgcagggcgggagctgtttatctcccggaagaaaacggctcctgtcacagaagtctcgtgattgctctgggagctttgcttagacacttgaaactacaggagaaagaaggatctagcgaaatatggctacagagagccctgctacgcgtcgggtccaggtggcagaacatcctaggttactgaagctaaaggagatgtttaactccaagtttggatctattcccaagttttatgttcgagcaccaggaagagtcaacataataggagagcatatagattattgtggatattctgttcttcctatggctgtagaacaagatgtgctaatagctgtagaacctgtgaaaacgtacgctctccaactggccaatacaaatcccttgtatccggacttcagtactagtgctaataacatccagattgataaaaccaagcctttgtggcacaactatttcttatgtggacttaaaggaattcaggaacactttggtcttagtaacctgactggaatgaactgcctggtagatggaaatatcccaccaagttctggcctctccagctccagtgctttggtctgttgtgctggcttggtgacgctcacagtgctgggaaggaatctatccaaggtggaacttgcagaaatctgtgccaagagtgagcgttacattggcactgaaggaggaggcatggaccagtctatatcatttcttgcagaagaaggaactgccaagttgatagaatttagtcctctgagggcaaccgatgtaaaactcccaagtggagcagtgtttgtgattgccaacagttgtgtggagatgaataaggcagcaacttcccatttcaatatcagggtgatggagtgtcggctggctgcgaagctcctggctaaatacaaaagcttgcaatgggacaaagtactgaggctggaggaggtgcaggctaaactagggattagtctagaagaaatgctgttggtcacagaagatgcccttcatcctgaaccctataaccctgaggagatctgcaggtgtctgggaattagcctggaggaactccgaacccaaatcctgagtccaaacactcaagatgtgctcatcttcaaactctatcagcgggcaaagcatgtgtacagcgaggctgcgcgagtgctccagtttaagaagatatgtgaagaagcacctgaaaacatggtccagctgctgggagagttgatgaaccagagccacatgagctgccgggacatgtatgagtgcagctgccccgagctggatcagctggtggacatctgtcggaagtttggggctcaagggtcacgacttactggagcaggatggggaggctgcacagtatcaatggtacctgcggacaagctgcccagctttctagcaaatgtgcacaaagcttattaccagaggagtgatggaagcttagcaccggagaagcaaagtttgtttgctaccaaacctggaggtggggctttggttttgcttgaggcctgaaaaaatgtaaaaagtctgagagaaactacttagggcacttaggaattggcaggactttctgtgccacagtaaattaatcttccttctgttttgtattatgatgaacggttgctattatatcaagatatattttcaaagaaatggttgaaagctctctatgcttcataatgattctttttccatcttaaaatatggttttactattaagagccaagatcatgcttggacagatcttttaagaataacttactgagatttattgatttgaagattttaaagatgaatggtaaaacacactcttaatactgattacatggattggacttgaattaaatatattgttacaattaaactgatac

SEQ ID NO: 11723 - DNA, 1728 bp, Homo sapiens
  source 1..1728: mol_type = unassigned DNA
agggtctcactgtgtcatccagagctggagtgcagcggcacagtcatggctcactggaactcaggctcaagcaatcctcccgcctcagccttccaagtaactaggactacaggcatgtgccaccacgcctggtgtctgagatgctgccaccgcagaagaagccctgggagtccatggctaaggggctggtgctgggcgcgctcttcactagtttcctgctgctggtgtactcctatgccgtgcccccgctgcatgccggcctggcctccacgaccccggaggccgcagcgtcctgctctccacctgcactcgagccagaggcagtgatccgggccaacggctcggcgggggagtgccagccgcggcgcaacatcgtgttcttgaagacgcacaagacggccagcagcaccctgctcaacatcctgttccgcttcggccagaagcaccggctcaagttcgccttccctaacggccgcaatgacttcgactacccgaccttcttcgcccgcagcctggtgcaggactatcggcccggggcctgcttcaacatcatctgcaaccacatgcgcttccactacgacgaggtgcgcggcctggtgccgaccaacgccatcttcatcacggtgctccgcgaccccgcccgcttgttcgagtcctccttccactacttcgggccggtggtgcccctcacgtggaagctctcggccggcgacaagctgaccgagttcctgcaagacccggatcgctactacgaccccaacggcttcaatgcccactacctccgaaacctgctcttcttcgacctgggctatgacaacagcctggaccccagcagcccgcaggtgcaggagcacatcctggaggtggagcgtcgcttccacctggtgctccttcaagagtacttcgacgagtcgctggtgctgctgaaggacctgctgtgctgggagctggaggacgtgctctacttcaagctcaacgcccgccgcgactcgcccgtgccgcggctctcgggggagctgtatgggcgcgccaccgcctggaacatgctggactcccacctctaccgccacttcaacgccagcttctggcgcaaggtggaggccttcgggcgggagcgcatggcccgcgaggtggccgccctgcgccatgccaacgagcgcatgcggaccatctgcatcgacgggggccacgccgtggacgccgccgccatccaggacgaggccatgcagccctggcagccgctgggcaccaagtccatcctgggctacaacctcaagaagagcatcgggcagcggcacgcgcagctctgccggcgcatgctcacgcccgagatccagtacctgatggacctcggcgccaacctgtgggtcaccaagctctggaagttcattcgcgatttcctgcggtggtgacgtcccaccgcccagcggcttgcctgcctgctcgctccctgcagaggggctgagcaggacgccgctggtgctggccgcccccagccccctcctggtgccacctcagaccccggggtgagggggggctccctggggggaggcagccagccaagactgggcccatgaacacagagagggcctaaccgagatcagtatttaactaattataccagtttttattaaacccctttccctccccgataaagaatgttctatttctgcctccccttaaaggggagacctcagaagtaaaggaatttgatgttgtgtttttgtt

SEQ ID NO: 11724 - DNA, 1791 bp, Homo sapiens
  source 1..1791: mol_type = unassigned DNA
ggcagcctgggagttggacgtggctcaggcagtgggtagaaaggggcagccagccacagcccgagggtctcactgtgtcatccagagctggagtgcagcggcacagtcatggctcactggaactcaggctcaagcaatcctcccgcctcagccttccaagtaactaggactacaggcatgtgccaccacgcctggtgtctgagatgctgccaccgcagaagaagccctgggagtccatggctaaggggctggtgctgggcgcgctcttcactagtttcctgctgctggtgtactcctatgccgtgcccccgctgcatgccggcctggcctccacgaccccggaggccgcagcgtcctgctctccacctgcactcgagccagaggcagtgatccgggccaacggctcggcgggggagtgccagccgcggcgcaacatcgtgttcttgaagacgcacaagacggccagcagcaccctgctcaacatcctgttccgcttcggccagaagcaccggctcaagttcgccttccctaacggccgcaatgacttcgactacccgaccttcttcgcccgcagcctggtgcaggactatcggcccggggcctgcttcaacatcatctgcaaccacatgcgcttccactacgacgaggtgcgcggcctggtgccgaccaacgccatcttcatcacggtgctccgcgaccccgcccgcttgttcgagtcctccttccactacttcgggccggtggtgcccctcacgtggaagctctcggccggcgacaagctgaccgagttcctgcaagacccggatcgctactacgaccccaacggcttcaatgcccactacctccgaaacctgctcttcttcgacctgggctatgacaacagcctggaccccagcagcccgcaggtgcaggagcacatcctggaggtggagcgtcgcttccacctggtgctccttcaagagtacttcgacgagtcgctggtgctgctgaaggacctgctgtgctgggagctggaggacgtgctctacttcaagctcaacgcccgccgcgactcgcccgtgccgcggctctcgggggagctgtatgggcgcgccaccgcctggaacatgctggactcccacctctaccgccacttcaacgccagcttctggcgcaaggtggaggccttcgggcgggagcgcatggcccgcgaggtggccgccctgcgccatgccaacgagcgcatgcggaccatctgcatcgacgggggccacgccgtggacgccgccgccatccaggacgaggccatgcagccctggcagccgctgggcaccaagtccatcctgggctacaacctcaagaagagcatcgggcagcggcacgcgcagctctgccggcgcatgctcacgcccgagatccagtacctgatggacctcggcgccaacctgtgggtcaccaagctctggaagttcattcgcgatttcctgcggtggtgacgtcccaccgcccagcggcttgcctgcctgctcgctccctgcagaggggctgagcaggacgccgctggtgctggccgcccccagccccctcctggtgccacctcagaccccggggtgagggggggctccctggggggaggcagccagccaagactgggcccatgaacacagagagggcctaaccgagatcagtatttaactaattataccagtttttattaaacccctttccctccccgataaagaatgttctatttctgcctccccttaaaggggagacctcagaagtaaaggaatttgatgttgtgtttttgtt

SEQ ID NO: 11725 - DNA, 1908 bp, Homo sapiens
  source 1..1908: mol_type = unassigned DNA
gaatctttctgtgcccttggatgaaagagctgcttgcttgttggggtccaaagagaggtgaggactggccagagctgtccagtggaggcagaaggcctgggcaacacctgcagggtactggggtgtgccacctgctatccccaggaagcaaactcatgaatattcacaccactggagtgggagggagccagccagcttgctgctgggtgtcattggagcattcctgtctcccagtgatcgcagaggcagcctgggagttggacgtggctcaggcagtgggtagaaaggggcagccagccacagcccgaggtgtctgagatgctgccaccgcagaagaagccctgggagtccatggctaaggggctggtgctgggcgcgctcttcactagtttcctgctgctggtgtactcctatgccgtgcccccgctgcatgccggcctggcctccacgaccccggaggccgcagcgtcctgctctccacctgcactcgagccagaggcagtgatccgggccaacggctcggcgggggagtgccagccgcggcgcaacatcgtgttcttgaagacgcacaagacggccagcagcaccctgctcaacatcctgttccgcttcggccagaagcaccggctcaagttcgccttccctaacggccgcaatgacttcgactacccgaccttcttcgcccgcagcctggtgcaggactatcggcccggggcctgcttcaacatcatctgcaaccacatgcgcttccactacgacgaggtgcgcggcctggtgccgaccaacgccatcttcatcacggtgctccgcgaccccgcccgcttgttcgagtcctccttccactacttcgggccggtggtgcccctcacgtggaagctctcggccggcgacaagctgaccgagttcctgcaagacccggatcgctactacgaccccaacggcttcaatgcccactacctccgaaacctgctcttcttcgacctgggctatgacaacagcctggaccccagcagcccgcaggtgcaggagcacatcctggaggtggagcgtcgcttccacctggtgctccttcaagagtacttcgacgagtcgctggtgctgctgaaggacctgctgtgctgggagctggaggacgtgctctacttcaagctcaacgcccgccgcgactcgcccgtgccgcggctctcgggggagctgtatgggcgcgccaccgcctggaacatgctggactcccacctctaccgccacttcaacgccagcttctggcgcaaggtggaggccttcgggcgggagcgcatggcccgcgaggtggccgccctgcgccatgccaacgagcgcatgcggaccatctgcatcgacgggggccacgccgtggacgccgccgccatccaggacgaggccatgcagccctggcagccgctgggcaccaagtccatcctgggctacaacctcaagaagagcatcgggcagcggcacgcgcagctctgccggcgcatgctcacgcccgagatccagtacctgatggacctcggcgccaacctgtgggtcaccaagctctggaagttcattcgcgatttcctgcggtggtgacgtcccaccgcccagcggcttgcctgcctgctcgctccctgcagaggggctgagcaggacgccgctggtgctggccgcccccagccccctcctggtgccacctcagaccccggggtgagggggggctccctggggggaggcagccagccaagactgggcccatgaacacagagagggcctaaccgagatcagtatttaactaattataccagtttttattaaacccctttccctccccgataaagaatgttctatttctgcctccccttaaaggggagacctcagaagtaaaggaatttgatgttgtgtttttgttaa

SEQ ID NO: 11726 - DNA, 1712 bp, Homo sapiens
  source 1..1712: mol_type = unassigned DNA
aggcctggtggagcggggggcccggccgggtgcgccccgccgcccagtgagcgcccgggcggcgcggcccgggccgagccagccacgctgaggcggaggaggacggggacaaggtgtctgagatgctgccaccgcagaagaagccctgggagtccatggctaaggggctggtgctgggcgcgctcttcactagtttcctgctgctggtgtactcctatgccgtgcccccgctgcatgccggcctggcctccacgaccccggaggccgcagcgtcctgctctccacctgcactcgagccagaggcagtgatccgggccaacggctcggcgggggagtgccagccgcggcgcaacatcgtgttcttgaagacgcacaagacggccagcagcaccctgctcaacatcctgttccgcttcggccagaagcaccggctcaagttcgccttccctaacggccgcaatgacttcgactacccgaccttcttcgcccgcagcctggtgcaggactatcggcccggggcctgcttcaacatcatctgcaaccacatgcgcttccactacgacgaggtgcgcggcctggtgccgaccaacgccatcttcatcacggtgctccgcgaccccgcccgcttgttcgagtcctccttccactacttcgggccggtggtgcccctcacgtggaagctctcggccggcgacaagctgaccgagttcctgcaagacccggatcgctactacgaccccaacggcttcaatgcccactacctccgaaacctgctcttcttcgacctgggctatgacaacagcctggaccccagcagcccgcaggtgcaggagcacatcctggaggtggagcgtcgcttccacctggtgctccttcaagagtacttcgacgagtcgctggtgctgctgaaggacctgctgtgctgggagctggaggacgtgctctacttcaagctcaacgcccgccgcgactcgcccgtgccgcggctctcgggggagctgtatgggcgcgccaccgcctggaacatgctggactcccacctctaccgccacttcaacgccagcttctggcgcaaggtggaggccttcgggcgggagcgcatggcccgcgaggtggccgccctgcgccatgccaacgagcgcatgcggaccatctgcatcgacgggggccacgccgtggacgccgccgccatccaggacgaggccatgcagccctggcagccgctgggcaccaagtccatcctgggctacaacctcaagaagagcatcgggcagcggcacgcgcagctctgccggcgcatgctcacgcccgagatccagtacctgatggacctcggcgccaacctgtgggtcaccaagctctggaagttcattcgcgatttcctgcggtggtgacgtcccaccgcccagcggcttgcctgcctgctcgctccctgcagaggggctgagcaggacgccgctggtgctggccgcccccagccccctcctggtgccacctcagaccccggggtgagggggggctccctggggggaggcagccagccaagactgggcccatgaacacagagagggcctaaccgagatcagtatttaactaattataccagtttttattaaacccctttccctccccgataaagaatgttctatttctgcctccccttaaaggggagacctcagaagtaaaggaatttgatgttgtgtttttgttaa

SEQ ID NO: 11727 - DNA, 1819 bp, Homo sapiens
  source 1..1819: mol_type = unassigned DNA
gcatggaccaggcctggtggagcggggggcccggccgggtgcgccccgccgcccagtgagcgcccgggcggcgcggcccgggccgagccagccacgctgaggcggaggaggacggggacaagggtctcactgtgtcatccagagctggagtgcagcggcacagtcatggctcactggaactcaggctcaagcaatcctcccgcctcagccttccaagtaactaggactacaggtgtctgagatgctgccaccgcagaagaagccctgggagtccatggctaaggggctggtgctgggcgcgctcttcactagtttcctgctgctggtgtactcctatgccgtgcccccgctgcatgccggcctggcctccacgaccccggaggccgcagcgtcctgctctccacctgcactcgagccagaggcagtgatccgggccaacggctcggcgggggagtgccagccgcggcgcaacatcgtgttcttgaagacgcacaagacggccagcagcaccctgctcaacatcctgttccgcttcggccagaagcaccggctcaagttcgccttccctaacggccgcaatgacttcgactacccgaccttcttcgcccgcagcctggtgcaggactatcggcccggggcctgcttcaacatcatctgcaaccacatgcgcttccactacgacgaggtgcgcggcctggtgccgaccaacgccatcttcatcacggtgctccgcgaccccgcccgcttgttcgagtcctccttccactacttcgggccggtggtgcccctcacgtggaagctctcggccggcgacaagctgaccgagttcctgcaagacccggatcgctactacgaccccaacggcttcaatgcccactacctccgaaacctgctcttcttcgacctgggctatgacaacagcctggaccccagcagcccgcaggtgcaggagcacatcctggaggtggagcgtcgcttccacctggtgctccttcaagagtacttcgacgagtcgctggtgctgctgaaggacctgctgtgctgggagctggaggacgtgctctacttcaagctcaacgcccgccgcgactcgcccgtgccgcggctctcgggggagctgtatgggcgcgccaccgcctggaacatgctggactcccacctctaccgccacttcaacgccagcttctggcgcaaggtggaggccttcgggcgggagcgcatggcccgcgaggtggccgccctgcgccatgccaacgagcgcatgcggaccatctgcatcgacgggggccacgccgtggacgccgccgccatccaggacgaggccatgcagccctggcagccgctgggcaccaagtccatcctgggctacaacctcaagaagagcatcgggcagcggcacgcgcagctctgccggcgcatgctcacgcccgagatccagtacctgatggacctcggcgccaacctgtgggtcaccaagctctggaagttcattcgcgatttcctgcggtggtgacgtcccaccgcccagcggcttgcctgcctgctcgctccctgcagaggggctgagcaggacgccgctggtgctggccgcccccagccccctcctggtgccacctcagaccccggggtgagggggggctccctggggggaggcagccagccaagactgggcccatgaacacagagagggcctaaccgagatcagtatttaactaattataccagtttttattaaacccctttccctccccgataaagaatgttctatttctgcctccccttaaaggggagacctcagaagtaaaggaatttgatgttg

SEQ ID NO: 11728 - DNA, 1635 bp, Homo sapiens
  source 1..1635: mol_type = unassigned DNA
actattgcagcctccctgattccagaaggtaccttggtgtctgagatgctgccaccgcagaagaagccctgggagtccatggctaaggggctggtgctgggcgcgctcttcactagtttcctgctgctggtgtactcctatgccgtgcccccgctgcatgccggcctggcctccacgaccccggaggccgcagcgtcctgctctccacctgcactcgagccagaggcagtgatccgggccaacggctcggcgggggagtgccagccgcggcgcaacatcgtgttcttgaagacgcacaagacggccagcagcaccctgctcaacatcctgttccgcttcggccagaagcaccggctcaagttcgccttccctaacggccgcaatgacttcgactacccgaccttcttcgcccgcagcctggtgcaggactatcggcccggggcctgcttcaacatcatctgcaaccacatgcgcttccactacgacgaggtgcgcggcctggtgccgaccaacgccatcttcatcacggtgctccgcgaccccgcccgcttgttcgagtcctccttccactacttcgggccggtggtgcccctcacgtggaagctctcggccggcgacaagctgaccgagttcctgcaagacccggatcgctactacgaccccaacggcttcaatgcccactacctccgaaacctgctcttcttcgacctgggctatgacaacagcctggaccccagcagcccgcaggtgcaggagcacatcctggaggtggagcgtcgcttccacctggtgctccttcaagagtacttcgacgagtcgctggtgctgctgaaggacctgctgtgctgggagctggaggacgtgctctacttcaagctcaacgcccgccgcgactcgcccgtgccgcggctctcgggggagctgtatgggcgcgccaccgcctggaacatgctggactcccacctctaccgccacttcaacgccagcttctggcgcaaggtggaggccttcgggcgggagcgcatggcccgcgaggtggccgccctgcgccatgccaacgagcgcatgcggaccatctgcatcgacgggggccacgccgtggacgccgccgccatccaggacgaggccatgcagccctggcagccgctgggcaccaagtccatcctgggctacaacctcaagaagagcatcgggcagcggcacgcgcagctctgccggcgcatgctcacgcccgagatccagtacctgatggacctcggcgccaacctgtgggtcaccaagctctggaagttcattcgcgatttcctgcggtggtgacgtcccaccgcccagcggcttgcctgcctgctcgctccctgcagaggggctgagcaggacgccgctggtgctggccgcccccagccccctcctggtgccacctcagaccccggggtgagggggggctccctggggggaggcagccagccaagactgggcccatgaacacagagagggcctaaccgagatcagtatttaactaattataccagtttttattaaacccctttccctccccgataaagaatgttctatttctgcctccccttaaaggggagacctcagaagtaaaggaatttgatgttgtgtttttgttaa

SEQ ID NO: 11729 - DNA, 572 bp, Homo sapiens
  source 1..572: mol_type = unassigned DNA
gatgcacaaatggaattctgggcccggctgcaggctcctgaagggctccttgcttcactttgactgggtgaggaatatggatgagcccttttaggggctccacacgactccaaacagggcagagcaggatggaacacaggtgcccatgggggtcatcaggctggggactgctggaatctccagccttagagcctgttctgggctctctgcaggcgtctgcggttgctgtgtccttggcccaaggatacctggaatctttctgtgcccttggatgaaagagctgcttgcttgttggggtccaaagagaggtgtctgagatgctgccaccgcagaagaagccctgggagtccatggctaaggggctggtgctgggcgcgctcttcactagtttcctgctgctggtgtactcctatgccgtgcccccgctgcatgccggcctggcctccacgaccccggaggccgcagcgtcctgctctccacctgcactcgagccagaggcagtgatccgggccaacggctcggcgggggagtgccagccgcggcgcaacatcgtgttcttgaagacgcacaag

SEQ ID NO: 11730 - DNA, 582 bp, Homo sapiens
  source 1..582: mol_type = unassigned DNA
acaaatggaattctgggcccggctgcaggctcctgaagggctccttgcttcactttgactgggtgtctgagatgctgccaccgcagaagaagccctgggagtccatggctaaggggctggtgctgggcgcgctcttcactagtttcctgctgctggtgtactcctatgccgtgcccccgctgcatgccggcctggcctccacgaccccggaggccgcagcgtcctgctctccacctgcactcgagccagaggcagtgatccgggccaacggctcggcgggggagtgccagccgcggcgcaacatcgtgttcttgaagacgcacaagacggccagcagcaccctgctcaacatcctgttccgcttcggccagaagcaccggctcaagttcgccttccctaacggccgcaatgacttcgactacccgaccttcttcgcccgcagcctggtgcaggactatcggcccggggcctgcttcaacatcatctgcaaccacatgcgcttccactacgacgaggtgcgcggcctggtgccgaccaacgccatcttcatcacggtgctccgcgaccccgcccgcttgttcg

SEQ ID NO: 11731 - DNA, 656 bp, Homo sapiens
  source 1..656: mol_type = unassigned DNA
attcctgtctcccagtgatcgcagaggcagcctgggagttggacgtggctcaggcagtgggtagaaaggggcagccagccacagcccgagggtctcactgtgtcatccagagctggagtgcagcggcacagtcatggctcactggaactcaggctcaagcaatcctcccgcctcagccttccaagtaactaggactacaggtgtctgagatgctgccaccgcagaagaagccctgggagtccatggctaaggggctggtgctgggcgcgctcttcactagtttcctgctgctggtgtactcctatgccgtgcccccgctgcatgccggcctggcctccacgaccccggaggccgcagcgtcctgctctccacctgcactcgagccagaggcagtgatccgggccaacggctcggcgggggagtgccagccgcggcgcaacatcgtgttcttgaagacgcacaagacggccagcagcaccctgctcaacatcctgttccgcttcggccagaagcaccggctcaagttcgccttccctaacggccgcaatgacttcgactacccgaccttcttcgcccgcagcctggtgcaggactatcggcccggggcctgcttcaacatcatctgcaaccacatgcgcttccactacgacgaggtg

SEQ ID NO: 11732 - DNA, 563 bp, Homo sapiens
  source 1..563: mol_type = unassigned DNA
tcctgaagggctccttgcttcactttgactgggtgaggaatatggatgagcccttttaggggctccacacgactccaaacagggcagagcaggatggaacacaggtgcccatgggggtcatcaggctggggactgctggaatctccagggtctcactgtgtcatccagagctggagtgcagcggcacagtcatggctcactggaactcaggctcaagcaatcctcccgcctcagccttccaagtaactaggactacaggtgtctgagatgctgccaccgcagaagaagccctgggagtccatggctaaggggctggtgctgggcgcgctcttcactagtttcctgctgctggtgtactcctatgccgtgcccccgctgcatgccggcctggcctccacgaccccggaggccgcagcgtcctgctctccacctgcactcgagccagaggcagtgatccgggccaacggctcggcgggggagtgccagccgcggcgcaacatcgtgttcttgaagacgcacaagacggccagcagcaccctgctcaacatcctgttccgcttcgg

SEQ ID NO: 11733 - DNA, 553 bp, Homo sapiens
  source 1..553: mol_type = unassigned DNA
agtgatcgcagaggcagcctgggagttggacgtggctcaggcagtgggtagaaaggggcagccagccacagcccgaggatgctaaataaacctgcgctttgactgagacctgtcacgtgaggtcagggtctcactgtgtcatccagagctggagtgcagcggcacagtcatggctcactggaactcaggctcaagcaatcctcccgcctcagccttccaagtaactaggactacaggtgtctgagatgctgccaccgcagaagaagccctgggagtccatggctaaggggctggtgctgggcgcgctcttcactagtttcctgctgctggtgtactcctatgccgtgcccccgctgcatgccggcctggcctccacgaccccggaggccgcagcgtcctgctctccacctgcactcgagccagaggcagtgatccgggccaacggctcggcgggggagtgccagccgcggcgcaacatcgtgttcttgaagacgcacaagacggccagcagcaccctgctcaacatcctgttccgcttcggccagaagcaccg

SEQ ID NO: 11734 - DNA, 755 bp, Homo sapiens
  source 1..755: mol_type = unassigned DNA
gattccagaaggtaccttgggtctcactgtgtcatccagagctggagtgcagcggcacagtcatggctcactggaactcaggctcaagcaatcctcccgcctcagccttccaagtaactaggactacaggcatgtgccaccacgcctggtgtctgagatgctgccaccgcagaagaagccctgggagtccatggctaaggggctggtgctgggcgcgctcttcactagtttcctgctgctggtgtactcctatgccgtgcccccgctgcatgccggcctggcctccacgaccccggaggccgcagcgtcctgctctccacctgcactcgagccagaggcagtgatccgggccaacggctcggcgggggagtgccagccgcggcgcaacatcgtgttcttgaagacgcacaagacggccagcagcaccctgctcaacatcctgttccgcttcggccagaagcaccggctcaagttcgccttccctaacggccgcaatgacttcgactacccgaccttcttcgcccgcagcctggtgcaggactatcggcccggggcctgcttcaacatcatctgcaaccacatgcgcttccactacgacgaggtgcgcggcctggtgccgaccaacgccatcttcatcacggtgctccgcgaccccgcccgcttgttcgagtcctccttccactacttcgggccggtggtgcccctcacgtggaagctctcggccggcgacaagctgaccgagttcctgcaagacc

SEQ ID NO: 11735 - DNA, 894 bp, Homo sapiens
  source 1..894: mol_type = unassigned DNA
cctagagagaaggcgactctggtctgccttgtggcagtttaagctctggtgtctgagatgctgccaccgcagaagaagccctgggagtccatggctaaggggctggtgctgggcgcgctcttcactagtttcctgctgctggtgtactcctatgccgtgcccccgctgcatgccggcctggcctccacgaccccggaggccgcagcgtcctgctctccacctgcactcgagccagaggcagtgatccgggccaacggctcggcgggggagtgccagccgcggcgcaacatcgtgttcttgaagacgcacaagacggccagcagcaccctgctcaacatcctgttccgcttcggccagaagcaccggctcaagttcgccttccctaacggccgcaatgacttcgactacccgaccttcttcgcccgcagcctggtgcaggactatcggcccggggcctgcttcaacatcatctgcaaccacatgcgcttccactacgacgaggtgcgcggcctggtgccgaccaacgccatcttcatcacggtgctccgcgaccccgcccgcttgttcgagtcctccttccactacttcgggccggtggtgcccctcacgtggaagctctcggccggcgacaagctgaccgagttcctgcaagacccggatcgctactacgaccccaacggcttcaatgcccactacctccgaaacctgctcttcttcgacctgggctatgacaacagcctggaccccagcagcccgcaggtgcaggagcacatcctggaggtggagcgtcgcttccacctggtgctccttcaagagtacttcgacgagtcgctggtgctgctgaaggacctgctgtgctgggagctggaggacgtgctctacttcaagctcaac

SEQ ID NO: 11736 - DNA, 1425 bp, Homo sapiens
  source 1..1425: mol_type = unassigned DNA
gaagggctccttgcttcactttgactgggtgaggaatatggatgagcccttttaggggctccacacgactccaaacagggcagagcaggatggaacacaggtgcccatgggggtcatcaggctggggactgctggaatctccaggtgtctgagatgctgccaccgcagaagaagccctgggagtccatggctaaggggctggtgctgggcgcgctcttcactagtttcctgctgctggtgtactcctatgccgtgcccccgctgcatgccggcctggcctccacgaccccggaggccgcagcgtcctgctctccacctgcactcgagccagaggcagtgatccgggccaacggctcggcgggggagtgccagccgcggcgcaacatcgtgttcttgaagacgcacaagacggccagcagcaccctgctcaacatcctgttccgcttcggccagaagcaccggctcaagttcgccttccctaacggccgcaatgacttcgactacccgaccttcttcgcccgcagcctggtgcaggactatcggcccggggcctgcttcaacatcatctgcaaccacatgcgcttccactacgacgaggtgcgcggcctggtgccgaccaacgccatcttcatcacggtgctccgcgaccccgcccgcttgttcgagtcctccttccactacttcgggccggtggtgcccctcacgtggaagctctcggccggcgacaagctgaccgagttcctgcaagacccggatcgctactacgaccccaacggcttcaatgcccactacctccgaaacctgctcttcttcgacctgggctatgacaacagcctggaccccagcagcccgcaggtgcaggagcacatcctggaggtggagcgtcgcttccacctggtgctccttcaagagtacttcgacgagtcgctggtgctgctgaaggacctgctgtgctgggagctggaggacgtgctctacttcaagctcaacgcccgccgcgactcgcccgtgccgcggctctcgggggagctgtatgggcgcgccaccgcctggaacatgctggactcccacctctaccgccacttcaacgccagcttctggcgcaaggtggaggccttcgggcgggagcgcatggcccgcgaggtggccgccctgcgccatgccaacgagcgcatgcggaccatctgcatcgacgggggccacgccgtggacgccgccgccatccaggacgaggccatgcagccctggcagccgctgggcaccaagtccatcctgggctacaacctcaagaagagcatcgggcagcggcacgcgcagctctgccggcgcatgctcacgcccgagatccagtacctgatggacctcggcgccaacctgtgggtcaccaagctctggaagttcattcgcgatttcctgcggtggtga

SEQ ID NO: 11737 - DNA, 584 bp, Homo sapiens
  source 1..584: mol_type = unassigned DNA
gaagggctccttgcttcactttgactgggtgaggaatatggatgagcccttttaggggctccacacgactccaaacagggcagagcaggatggaacacaggtgcccatgggggtcatcaggctggggactgctggaatctccaggtgtctgagatgctgccaccgcagaagaagccctgggagtccatggctaaggggctggtgctgggcgcgctcttcactagtttcctgctgctggtgtactcctatgccgtgcccccgctgcatgccggcctggcctccacgaccccggaggccgcagcgtcctgctctccacctgcactcgagccagaggcagtgatccgggccaacggctcggcgggggagtgccagccgcggcgcaacatcgtgttcttgaagacgcacaagacggccagcagcaccctgctcaacatcctgttccgcttcggccagaagcaccggctcaagttcgccttccctaacggccgcaatgacttcgactacccgaccttcttcgcccgcagcctggtgcaggactatcggcccggggcctgcttcaacatcatctgcaaccacatgcgctt

SEQ ID NO: 11738 - DNA, 567 bp, Homo sapiens
  source 1..567: mol_type = unassigned DNA
ggaattctgggcccggctgcaggctcctgaagggctccttgcttcactttgactgggtgaggaatatggatgagcccttttaggggctccacacgactccaaacagggcagagcaggatggaacacaggtgcccatgggggtcatcaggctggggactgctggaatctccaggatgctaaataaacctgcgctttgactgagacctgtcacgtgaggtcagggtctcactgtgtcatccagagctggagtgcagcggcacagtcatggctcactggaactcaggctcaagcaatcctcccgcctcagccttccaagtaactaggactacaggtgtctgagatgctgccaccgcagaagaagccctgggagtccatggctaaggggctggtgctgggcgcgctcttcactagtttcctgctgctggtgtactcctatgccgtgcccccgctgcatgccggcctggcctccacgaccccggaggccgcagcgtcctgctctccacctgcactcgagccagaggcagtgatccgggccaacggctcggcgggggagtgccagccgcggcg

SEQ ID NO: 11739 - DNA, 567 bp, Homo sapiens
  source 1..567: mol_type = unassigned DNA
gattccagaaggtaccttgaaaagttctccagagaatggctaggggcgcctccagctttctcattttacagatgaaaaactgagactccatgagggttcttggcttgtctgaaatcacagtgctggattgaaacacaggcttgagggtcccagagcctgagggtctcactgtgtcatccagagctggagtgcagcggcacagtcatggctcactggaactcaggctcaagcaatcctcccgcctcagccttccaagtaactaggactacaggtgtctgagatgctgccaccgcagaagaagccctgggagtccatggctaaggggctggtgctgggcgcgctcttcactagtttcctgctgctggtgtactcctatgccgtgcccccgctgcatgccggcctggcctccacgaccccggaggccgcagcgtcctgctctccacctgcactcgagccagaggcagtgatccgggccaacggctcggcgggggagtgccagccgcggcgcaacatcgtgttcttgaagacgcacaagacggccagcagcaccctgctcaacatcctgtt

SEQ ID NO: 11740 - DNA, 575 bp, Homo sapiens
  source 1..575: mol_type = unassigned DNA
gatgcacaaatggaattctgggcccggctgcaggctcctgaagggctccttgcttcactttgactggccttagagcctgttctgggctctctgcaggcgtctgcggttgctgtgtccttggcccaaggatacctggaatctttctgtgcccttggatgaaagagctgcttgcttgttggggtccaaagagaggatgctaaataaacctgcgctttgactgagacctgtcacgtgaggtcagggtctcactgtgtcatccagagctggagtgcagcggcacagtcatggctcactggaactcaggctcaagcaatcctcccgcctcagccttccaagtaactaggactacaggtgtctgagatgctgccaccgcagaagaagccctgggagtccatggctaaggggctggtgctgggcgcgctcttcactagtttcctgctgctggtgtactcctatgccgtgcccccgctgcatgccggcctggcctccacgaccccggaggccgcagcgtcctgctctccacctgcactcgagccagaggcagtgatccgggccaacggctcggcgggggagtg

SEQ ID NO: 11741 - DNA, 882 bp, Homo sapiens
  source 1..882: mol_type = unassigned DNA
actattgcagcctccctgattccagaaggtaccttgggtctcactgtgtcatccagagctggagtgcagcggcacagtcatggctcactggaactcaggctcaagcaatcctcccgcctcagccttccaagtaactaggactacaggtgtctgagatgctgccaccgcagaagaagccctgggagtccatggctaaggggctggtgctgggcgcgctcttcactagtttcctgctgctggtgtactcctatgccgtgcccccgctgcatgccggcctggcctccacgaccccggaggccgcagcgtcctgctctccacctgcactcgagccagaggcagtgatccgggccaacggctcggcgggggagtgccagccgcggcgcaacatcgtgttcttgaagacgcacaagacggccagcagcaccctgctcaacatcctgttccgcttcggccagaagcaccggctcaagttcgccttccctaacggccgcaatgacttcgactacccgaccttcttcgcccgcagcctggtgcaggactatcggcccggggcctgcttcaacatcatctgcaaccacatgcgcttccactacgacgaggtgcgcggcctggtgccgaccaacgccatcttcatcacggtgctccgcgaccccgcccgcttgttcgagtcctccttccactacttcgggccggtggtgcccctcacgtggaagctctcggccggcgacaagctgaccgagttcctgcaagacccggatcgctactacgaccccaacggcttcaatgcccactacctccgaaacctgctcttcttcgacctgggctatgacaacagcctggaccccagcagcccgcaggtgcaggagcacatcctggaggtgg

SEQ ID NO: 11742 - DNA, 639 bp, Homo sapiens
  source 1..639: mol_type = unassigned DNA
tcagccagcttaaaaattaaaaggagtggaaagtttggggccctggttctctacccggttcattttaatttttaaattttaaccttctccctgccccattccccaacctctctttgagttgcttcacccaccgtctctgcaaccctggggctgtctctttccaggtggttgtcagtctatctctccagtgcctctctgtccctgtctggaccctgctggggggccacagagcaggcaaaggcagggctcaactgccaggcctgggcagccttgggggctccctggggccagcttcctgacacttgccctactctgtgctgcccctgcaggtgtctgagatgctgccaccgcagaagaagccctgggagtccatggctaaggggctggtgctgggcgcgctcttcactagtttcctgctgctggtgtactcctatgccgtgcccccgctgcatgccggcctggcctccacgaccccggaggccgcagcgtcctgctctccacctgcactcgagccagaggcagtgatccgggccaacggctcggcgggggagtgccagccgcggcgcaacatcgtgttcttgaagacgcacaagacggccagcagcaccctgctcaacatcctgttccgcttcggccaga

SEQ ID NO: 11743 - DNA, 1370 bp, Homo sapiens
  source 1..1370: mol_type = unassigned DNA
tcacctgccccacagccgcaccctgcctgtgcctgcaccctggggagcccagagccggcaggggccgaggcggtgggacctcgggggagctcaagcctcgactgtcccctcgctggaggccagaggccaagatgatgtccatgctgggcggcttgcagagatacttccgggtcatcctcctcctcctcctggccctgactctgctcctgctggccggattcctgcactcggacttagagctggacacacccctgtttgggggccaggctgaggggccgccggtcaccaacatcatgttcctgaagacgcacaagacggccagcagcacggtgctcaacatcctctaccgcttcgccgagacccacaacctgtccgtggcgctgcccgccggctcacgcgtccacctgggctacccctggctcttcctggcgcgctacgtggaaggcgtggggtcgcagcagcgcttcaacatcatgtgcaaccacctgaggttcaacctgcctcaggtgcagaaagtcatgcccaacgacaccttctacttctccatcctgaggaaccccgtgttccagctggagtcctccttcatctactacaaaacctacgcccccgccttccggggcgccccgagcctggacgcgttcctggcctcgccgcggacgttctacaacgacagccgccacctcaggaacgtctacgccaagaacaacatgtggttcgacttcggcttcgaccccaacgcgcagtgcgaggagggctacgtgcgcgcgcgcatcgccgaggtggagcggcgcttccggctggtgctcatcgccgagcacctggacgagtccctggtgctgctgcggcgccggctgcgctgggcgctggacgacgtggtggccttcaggctcaactcccgcagcgcgcgctccgtggcccgcctgtcgcccgagacccgggagcgcgcgcggagctggtgcgcgctggactggcgcctgtacgagcatttcaaccgcaccctctgggcgcagctgcgcgccgagctggggccgcggcggctgcgcggggaggtggagcggctgcgcgcccggaggcgcgaactcgcgagcctgtgcctgcaggacggcggcgcgctcaagaaccacacgcagatcagagacccgcgcctgcgcccctaccagtccggcaaggccgacatcctgggttacaacctccggccgggcctggacaaccagacgctgggcgtgtgccagaggcttgtgatgcctgagctccagtacatggcccgcctgtacgccctgcagttcccggagaagcccctcaagaacatcccgttcctgggggcgtagaggggccgggccggggacgaggcctcctgcggacaccagctc

SEQ ID NO: 11744 - DNA, 2133 bp, Homo sapiens
  source 1..2133: mol_type = unassigned DNA
ctagcggacgctgccacctgatcccatccaggcgctgagaggcaagccaccggcactcggcgcgcagggccccgggcaccctcggaccccgtgcggatttcgagacaagggtccagagatagcggcggccgcccccaacccgggccagaggcagagcccaggcgtgcggtgcttctcgggaacactggccctgctaccagagccgcaggatcccccatgagtgcctgtgaagggagtcctggatagtgaggccctggctggtccaggggtgggtactccgccatgccacccatcctccagcgcctgcagcaggccaccaagatgatgagccgccggaaaatcctgctgctggtgctagggtgcagcaccgtaagccttctcatccaccagggggcgcagctcagctggtaccccaagctgttccccttgagctgccctcctctgcggaactcgccgccgcgccccaagcacatgactgtggccttcctgaagactcacaagacggcaggcacgacggtgcagaacatcctgtttcgctttgccgagcgccacaacctgacggtggccctgccgcacccgagctgcgagcaccagttctgctacccccgcaacttctcggcgcacttcgtgcacccggccacgcggccgccgcacgtgctggccagccacctgcgcttcgaccgtgcggagctggagcgcctcatgccgcccagcaccgtctatgtcaccatcctgcgcgagccggccgccatgttcgagtcgctcttcagctactacaaccagtactgcccggccttccggcgcgtacccaacgcctcgctcgaggccttcctgcgcgcgcccgaggcatactaccgcgctggcgagcacttcgccatgttcgcacacaacacgctggcctacgacctgggcggcgacaatgagcgcagcccgcgcgacgacgccgcctacctggcgggcctcatccgccaggtggaggaggttttctcgctcgtcatgatcgccgagtacttcgacgagtcgctagtgctgctgcggcgcctactggcctgggacctggacgacgtgctctacgccaagctcaacgcgcgcgccgccagctcgcgcctggccgccatccccgcggcgctggcgcgggcggcgcgcacctggaacgccctggacgccggcctctacgaccacttcaacgccaccttctggcgccacgtggcgcgcgcgggccgcgcgtgcgtggagcgcgaggcgcgcgagctgcgcgaggcccgccagcgcctactgcggcgctgcttcggggacgagccactgctgcggcctgccgcgcagatccgcaccaagcagctgcagccgtggcagcccagccgcaaggtggacattatgggctatgacctgcccggcggcggcgccggcccggccaccgaggcctgcctcaagctggccatgcccgaggtccagtactcgaactacctgttgcgcaagcagaagcgccggggcggtgcgcgggctcggcccgagcccgtcctggacaatcccccgcctcggcccatccgagtgctgcctcgcggccctcaaggtccctgagctccgcaggcctccaggagtatgggtcctgccctgccctcccaggagtccagccaggggctgcctccatgtcctgcccccatgagagccctttcttttcaaggggcttgagtccctcgctgaactttggggtacgcctccctatctgagcccccgctcccgatcgtgggctgaaccttgccttcgggcacggcgctgataggctggatccagcgctgggccaccctctccttcccagctggttggtgattttgacaagaggcctgagggctgtccagaactgctcaccctgcctttttctgggggctgagcccccacaacctgtcttttccaagtggataagcccaggccccatggagagaggctcagccctagggaaaggctgctcttgctctccctcccagggcttgaggctccctatacttttctgtcttccaggttctaccctccccacagacctaagctgctcccagtctcccagaaccaagagttcttgggttgggatttttgtttggttggtttttcttttttttaataaaacatctttaaaatgtg

SEQ ID NO: 11745 - DNA, 1599 bp, Homo sapiens
  source 1..1599: mol_type = unassigned DNA
atcccatctcctctgcccactgcaaacccgtctgccttcttctgccaggcttctcgggaacactggccctgctaccagagccgcaggatcccccatgagtgcctgtgaagggagtcctggatagtgaggccctggctggtccaggggtgggtactccgccatgccacccatcctccagcgcctgcagcaggccaccaagatgatgagccgccggaaaatcctgctgctggtgctagggtgcagcaccgtaagccttctcatccaccagggggcgcagctcagctggtaccccaagctgttccccttgagctgccctcctctgcggaactcgccgccgcgccccaagcacatgactgtggccttcctgaagactcacaagacggcaggcacgacggtgcagaacatcctgtttcgctttgccgagcgccacaacctgacggtggccctgccgcacccgagctgcgagcaccagttctgctacccccgcaacttctcggcgcacttcgtgcacccggccacgcggccgccgcacgtgctggccagccacctgcgcttcgaccgtgcggagctggagcgcctcatgccgcccagcaccgtctatgtcaccatcctgcgcgagccggccgccatgttcgagtcgctcttcagctactacaaccagtactgcccggccttccggcgcgtacccaacgcctcgctcgaggccttcctgcgcgcgcccgaggcatactaccgcgctggcgagcacttcgccatgttcgcacacaacacgctggcctacgacctgggcggcgacaatgagcgcagcccgcgcgacgacgccgcctacctggcgggcctcatccgccaggtggaggaggttttctcgctcgtcatgatcgccgagtacttcgacgagtcgctagtgctgctgcggcgcctactggcctgggacctggacgacgtgctctacgccaagctcaacgcgcgcgccgccagctcgcgcctggccgccatccccgcggcgctggcgcgggcggcgcgcacctggaacgccctggacgccggcctctacgaccacttcaacgccaccttctggcgccacgtggcgcgcgcgggccgcgcgtgcgtggagcgcgaggcgcgcgagctgcgcgaggcccgccagcgcctactgcggcgctgcttcggggacgagccactgctgcggcctgccgcgcagatccgcaccaagcagctgcagccgtggcagcccagccgcaaggtggacattatgggctatgacctgcccggcggcggcgccggcccggccaccgaggcctgcctcaagctggccatgcccgaggtccagtactcgaactacctgttgcgcaagcagaagcgccggggcggtgcgcgggctcggcccgagcccgtcctggacaatcccccgcctcggcccatccgagtgctgcctcgcggccctcaaggtccctgagctccgcaggcctccaggagtatgggtcctgccctgccctcccaggagtccagccaggggctgcctccatgtcctgcccccatgagagccctttcttttcaaggggcttgagtccctcgctgaactttggggtacgcctccct

SEQ ID NO: 11746 - DNA, 2537 bp, Homo sapiens
  source 1..2537: mol_type = unassigned DNA
gaggggaagatgcagcgagggagagacctagaaccgcgatcaaagctgcagcagctgctggggctggcggcacaaagggaggagggaggagcctgggcgctgagaaagttcttggggaaagttgagctgagccaagagtcgggcggtggctgggatgggcgggagggcccggcccgatttcccttgctgctccccttgtggcctgacgctgacagaggcaaaaatctgctaactcagggggcagactcaaccaagactgtgagcaggcctggggaatgaccccccgatctccaaccagtgccttccgcagctgcacggctgtctccagctgtctctgcccctcttcctggccctggctccatctctctgtcacctcacccttccctgtgccacatgggccctctctctcctgccaggacgctgcggctctggggacctcggagcctgggggtggctctgggagtcttcatgaccattggctttgcactccagctcttgggagggcccttccagaggaggctacctgggctacagctccgacagccctcggccccatccctacgaccagcccttccgtcctgcccaccccggcagcgactggtgttcctgaagacacataaatccgggagcagctctgtgctgagcctgcttcaccgctatggggaccagcacgggctgcgcttcgccctccctgcccgctaccagtttggctacccaaagctcttccaggcctctagggtaaaaggctaccgcccacagggtggaggcacccagctccccttccacatcctctgtcaccacatgaggttcaacctgaaagaggtacttcaggtcatgccttctgacagcttctttttttccattgtccgagacccagcggctctggctcgctctgccttctcctactataaatccacctcatcagccttccgcaagtcaccatctttggctgccttcctggccaatcctcgaggcttctacaggcctggggcccgtggggaccactacgctcgcaacttactatggtttgactttggcctgccctttcccccagagaagagggccaagagagggaatattcatccccccagagaccccaaccccccacagctgcaggtcttgccttctggtgctggccctcgagcccaaaccctcaatcccaatgccctcatccatcctgtttccactgttactgatcatcgcagccagatatcaagccctgcctctttcgatttggggtcttcatccttcatccagtggggtctggcatggctggactctgtctttgacctggtcatggtggctgagtacttcgatgagtcattggttctgctggcagatgccctgtgctggggtctagatgacgtggtgggcttcatgcacaatgcccaggctggacataagcagggcctcagcactgtcagcaacagtggactgactgcggaggaccggcagctgactgcacgggcccgagcctggaacaacctggactgggctctctatgtccacttcaaccgcagtctctgggcacggatagagaaatacggccagggccggctgcagacagctgtggccgagctccgggctcgccgagaggccctagcgaaacattgtctggtagggggtgaggcttctgaccccaaatacatcactgatcgccggttccgccccttccagtttgggtcagctaaggttttgggctatatacttcggagtggattgagcccccaagaccaagaggaatgtgagcgcctagctacccctgagctccagtacaaggacaagctggatgccaagcagttcccccctaccgtctcactgcccctcaagacttcaaggccactctccccataaacatcagactacagatttaggtggaagagcagccatgtttgaagggcacatgtgatgagtggggggcagcaagatgccatttctgcatctcccagaagggatgagtctttgtcccgatgcaagccccctcttcgctgggctcccagcagtgcttccctcctccaccctccactcattttgttctttccccccaactttttttttttttgaaacggagtcttgctctgtcccccaggctggagtgcagtggcatgatctcggctcactgcaacctctgcctcccaggttcaagcgattctcctgcctcagcctccagagtagctaggattacagatacgtgccaccatacccggctaatttttatatttttagagacagggattcaacatgttggttaggctggtcttgaactcctcacctcaggtgatccacatgactctgcctcccaaagtgctgccattacaggcgtgagccactaggcctgacctccccttcccctttcctgccccaaggcagatccacatcaccgaagctccctagaggggcaaaagatggagtgagccacaggaagtttggggcgtggtgagttggaatgatacgtccatttctctatgaaatatttgctactagactgttcatttctctctgacatgtttgttgaatgaataaataatttgaaactt

SEQ ID NO: 11747 - DNA, 2334 bp, Homo sapiens
  source 1..2334: mol_type = unassigned DNA
gacgctgacagaggcaaaaatctgctaactcagggggcagactcaaccaagactgtgagcaggcctggggaatgaccccccgatctccaaccagtgccttccgcagctgcacggctgtctccagctgtctctgcccctcttcctggccctggctccatctctctgtcacctcacccttccctgtgccacatgggccctctctctcctgccaggacgctgcggctctggggacctcggagcctgggggtggctctgggagtcttcatgaccattggctttgcactccagctcttgggagggcccttccagaggaggctacctgggctacagctccgacagccctcggccccatccctacgaccagcccttccgtcctgcccaccccggcagcgactggtgttcctgaagacacataaatccgggagcagctctgtgctgagcctgcttcaccgctatggggaccagcacgggctgcgcttcgccctccctgcccgctaccagtttggctacccaaagctcttccaggcctctagggtaaaaggctaccgcccacagggtggaggcacccagctccccttccacatcctctgtcaccacatgaggttcaacctgaaagaggtacttcaggtcatgccttctgacagcttctttttttccattgtccgagacccagcggctctggctcgctctgccttctcctactataaatccacctcatcagccttccgcaagtcaccatctttggctgccttcctggccaatcctcgaggcttctacaggcctggggcccgtggggaccactacgctcgcaacttactatggtttgactttggcctgccctttcccccagagaagagggccaagagagggaatattcatccccccagagaccccaaccccccacagctgcaggtcttgccttctggtgctggccctcgagcccaaaccctcaatcccaatgccctcatccatcctgtttccactgttactgatcatcgcagccagatatcaagccctgcctctttcgatttggggtcttcatccttcatccagtggggtctggcatggctggactctgtctttgacctggtcatggtggctgagtacttcgatgagtcattggttctgctggcagatgccctgtgctggggtctagatgacgtggtgggcttcatgcacaatgcccaggctggacataagcagggcctcagcactgtcagcaacagtggactgactgcggaggaccggcagctgactgcacgggcccgagcctggaacaacctggactgggctctctatgtccacttcaaccgcagtctctgggcacggatagagaaatacggccagggccggctgcagacagctgtggccgagctccgggctcgccgagaggccctagcgaaacattgtctggtagggggtgaggcttctgaccccaaatacatcactgatcgccggttccgccccttccagtttgggtcagctaaggttttgggctatatacttcggagtggattgagcccccaagaccaagaggaatgtgagcgcctagctacccctgagctccagtacaaggacaagctggatgccaagcagttcccccctaccgtctcactgcccctcaagacttcaaggccactctccccataaacatcagactacagatttaggtggaagagcagccatgtttgaagggcacatgtgatgagtggggggcagcaagatgccatttctgcatctcccagaagggatgagtctttgtcccgatgcaagccccctcttcgctgggctcccagcagtgcttccctcctccaccctccactcattttgttctttccccccaactttttttttttttgaaacggagtcttgctctgtcccccaggctggagtgcagtggcatgatctcggctcactgcaacctctgcctcccaggttcaagcgattctcctgcctcagcctccagagtagctaggattacagatacgtgccaccatacccggctaatttttatatttttagagacagggattcaacatgttggttaggctggtcttgaactcctcacctcaggtgatccacatgactctgcctcccaaagtgctgccattacaggcgtgagccactaggcctgacctccccttcccctttcctgccccaaggcagatccacatcaccgaagctccctagaggggcaaaagatggagtgagccacaggaagtttggggcgtggtgagttggaatgatacgtccatttctctatgaaatatttgctactagactgttcatttctctctgacatgtttgttgaatgaataaataatttgaaacttc

SEQ ID NO: 11748 - DNA, 1404 bp, Homo sapiens
  source 1..1404: mol_type = unassigned DNA
gtgagcaggcctggggaatgaccccccgatctccaaccagtgccttccgcagctgcacggctgtctccagctgtctctgcccctcttcctggccctggctccatctctctgtcacctcacccttccctgtgccacatgggccctctctctcctgccaggacgctgcggctctggggacctcggagcctgggggtggctctgggagtcttcatgaccattggctttgcactccagctcttgggagggcccttccagaggaggtacttcaggtcatgccttctgacagcttctttttttccattgtccgagacccagcggctctggctcgctctgccttctcctactataaatccacctcatcagccttccgcaagtcaccatctttggctgccttcctggccaatcctcgaggcttctacaggcctggggcccgtggggaccactacgctcgcaacttactatggtttgactttggcctgccctttcccccagagaagagggccaagagagggaatattcatccccccagagaccccaaccccccacagctgcaggtcttgccttctggtgctggccctcgagcccaaaccctcaatcccaatgccctcatccatcctgtttccactgttactgatcatcgcagccagatatcaagccctgcctctttcgatttggggtcttcatccttcatccagtggggtctggcatggctggactctgtctttgacctggtcatggtggctgagtacttcgatgagtcattggttctgctggcagatgccctgtgctggggtctagatgacgtggtgggcttcatgcacaatgcccaggctggacataagcagggcctcagcactgtcagcaacagtggactgactgcggaggaccggcagctgactgcacgggcccgagcctggaacaacctggactgggctctctatgtccacttcaaccgcagtctctgggcacggatagagaaatacggccagggccggctgcagacagctgtggccgagctccgggctcgccgagaggccctagcgaaacattgtctggtagggggtgaggcttctgaccccaaatacatcactgatcgccggttccgccccttccagtttgggtcagctaaggttttgggctatatacttcggagtggattgagcccccaagaccaagaggaatgtgagcgcctagctacccctgagctccagtacaaggacaagctggatgccaagcagttcccccctaccgtctcactgcccctcaagacttcaaggccactctccccataaacatcagactacagatttaggtggaagagcagccatgtttgaagggcacatgtgatgagtggggggcagcaagatgccatttctgcatctcccagaagggatgagtctttgt

SEQ ID NO: 11749 - DNA, 2018 bp, Homo sapiens
  source 1..2018: mol_type = unassigned DNA
agtcaagtgacgcgaagcggccggcctgggcgccgactgcagagccgggaggctggtggtcatgccggggttcctggttcgcatcctccctctgttgctggttctgctgcttctgggccctacgcgcggcttgcgcaatgccacccagaggatgtttgaaattgactatagccgggactccttcctcaaggatggccagccatttcgctacatctcaggaagcattcactactcccgtgtgccccgcttctactggaaggaccggctgctgaagatgaagatggctgggctgaacgccatccagacattacctggcagctgtggacaagtggttgggagtccttctgcccaagatgaagcctctcctctatcagaatggagggccagttataacagtgcaggcagcaacatcacagatgctttcctaagccagaggaagtgtgagcccaaaggacccttgatcaattctgaattctatactggctggctagatcactggggccaacctcactccacaatcaagaccgaagcagtggcttcctccctctatgatatacttgcccgtggggcgagtgtgaacttgtacatgtttataggtgggaccaattttgcctattggaatggggccaactcaccctatgcagcacagcccaccagctacgactatgatgccccactgagtgaggctggggacctcactgagaagtattttgctctgcgaaacatcatccagaagtttgaaaaagtaccagaaggtcctatccctccatctacaccaaagtttgcatatggaaaggtcactttggaaaagttaaagacagtgggagcagctctggacattctgtgtccctctgggcccatcaaaagcctttatcccttgacatttatccaggtgaaacagcattatgggtttgtgctgtaccggacaacacttcctcaagattgcagcaacccagcacctctctcttcacccctcaatggagtccacgatcgagcatatgttgctgtggatgggatcccccagggagtccttgagcgaaacaatgtgatcactctgaacataacagggaaagctggagccactctggaccttctggtagagaacatgggacgtgtgaactatggtgcatatatcaacgattttaagggtttggtttctaacctgactctcagttccaatatcctcacggactggacgatctttccactggacactgaggatgcagtgtgcagccacctggggggctggggacaccgtgacagtggccaccatgatgaagcctgggcccacaactcatccaactacacgctcccggccttttatatggggaacttctccattcccagtgggatcccagacttgccccaggacacctttatccagtttcctggatggaccaagggccaggtctggattaatggctttaaccttggccgctattggccagcccggggccctcagttgaccttgtttgtgccccagcacatcctgatgacctcggccccaaacaccatcaccgtgctggaactggagtgggcaccctgcagcagtgatgatccagaactatgtgctgtgacgttcgtggacaggccagttattggctcatctgtgacctacgatcatccctccaaacctgttgaaaaaagactcatgcccccacccccgcaaaaaaacaaagattcatggctggaccatgtatgatgatgaaagcctgtgtctttgagggattctaccctgaacatacctcacagatcctccctgtcatgccacatttcactgattggaatgtggaaatggaaaaggaatttaggatgtgcattttcacctgaggtttccctgcatccctgcagtgccaaagccccaccttcagggaccacctggaatgtgtgaggggctgacagcacagtaacgtgcatacatatctgcagggctggaatggaagctttaaaggtggtagtgatttttattttggaagaatcatgttacctttttgttaaataaaatttgtactcaaatg

SEQ ID NO: 11750 - DNA, 2501 bp, Homo sapiens
  source 1..2501: mol_type = unassigned DNA
gggcgggccgggcggggcgcgcgtccttccaggcagctcggtcgcttgtgcgttccgctccggccgccctttgcgcttggatccacttccccatctgtaacgaggtgttgagacgagaatgccacccagaggatgtttgaaattgactatagccgggactccttcctcaaggatggccagccatttcgctacatctcaggaagcattcactactcccgtgtgccccgcttctactggaaggaccggctgctgaagatgaagatggctgggctgaacgccatccagacgtatgtgccctggaactttcatgagccctggccaggacagtaccagttttctgaggaccatgatgtggaatattttcttcggctggctcatgagctgggactgctggttatcctgaggcccgggccctacatctgtgcagagtgggaaatgggaggattacctgcttggctgctagagaaagagtctattcttctccgctcctccgacccagattacctggcagctgtggacaagtggttgggagtccttctgcccaagatgaagcctctcctctatcagaatggagggccagttataacagtgcaggttgaaaatgaatatggcagctactttgcctgtgattttgactacctgcgcttcctgcagaagcgctttcgccaccatctgggggatgatgtggttctgtttaccactgatggagcacataaaacattcctgaaatgtggggccctgcagggcctctacaccacggtggactttggaacaggcagcaacatcacagatgctttcctaagccagaggaagtgtgagcccaaaggacccttgatcaattctgaattctatactggctggctagatcactggggccaacctcactccacaatcaagaccgaagcagtggcttcctccctctatgatatacttgcccgtggggcgagtgtgaacttgtacatgtttataggtgggaccaattttgcctattggaatggggccaactcaccctatgcagcacagcccaccagctacgactatgatgccccactgagtgaggctggggacctcactgagaagtattttgctctgcgaaacatcatccagaagtttgaaaaagtaccagaaggtcctatccctccatctacaccaaagtttgcatatggaaaggtcactttggaaaagttaaagacagtgggagcagctctggacattctgtgtccctctgggcccatcaaaagcctttatcccttgacatttatccaggtgaaacagcattatgggtttgtgctgtaccggacaacacttcctcaagattgcagcaacccagcacctctctcttcacccctcaatggagtccacgatcgagcatatgttgctgtggatgggatcccccagggagtccttgagcgaaacaatgtgatcactctgaacataacagggaaagctggagccactctggaccttctggtagagaacatgggacgtgtgaactatggtgcatatatcaacgattttaagggtttggtttctaacctgactctcagttccaatatcctcacggactggacgatctttccactggacactgaggatgcagtgtgcagccacctggggggctggggacaccgtgacagtggccaccatgatgaagcctgggcccacaactcatccaactacacgctcccggccttttatatggggaacttctccattcccagtgggatcccagacttgccccaggacacctttatccagtttcctggatggaccaagggccaggtctggattaatggctttaaccttggccgctattggccagcccggggccctcagttgaccttgtttgtgccccagcacatcctgatgacctcggccccaaacaccatcaccgtgctggaactggagtgggcaccctgcagcagtgatgatccagaactatgtgctgtgacgttcgtggacaggccagttattggctcatctgtgacctacgatcatccctccaaacctgttgaaaaaagactcatgcccccacccccgcaaaaaaacaaagattcatggctggaccatgtatgatgatgaaagcctgtgtctttgagggattctaccctgaacatacctcacagatcctccctgtcatgccacatttcactgattggaatgtggaaatggaaaaggaatttaggatgtgcattttcacctgaggtttccctgcatccctgcagtgccaaagccccaccttcagggaccacctggaatgtgtgaggggctgacagcacagtaacgtgcatacatatctgcagggctggaatggaagctttaaaggtggtagtgatttttattttggaagaatcatgttacctttttgttaaataaaatttgtactcaaatgatgatgtcactgtttttaatgtgcaggtattgaattatatggtctgacttaaatcataactagacttgagtgggctgaataaaccacttcactaacttgaagttcaaaa

SEQ ID NO: 11751 - DNA, 2604 bp, Homo sapiens
  source 1..2604: mol_type = unassigned DNA
cacagcggggcggggcgcggggctgagcaggcgcgagggctggctgctgggccgacgaggggcggtgccaggccgtgggtccttagtcaagtgacgcgaagcggccggcctgggcgccgactgcagagccgggaggctggtggtcatgccggggttcctggttcgcatcctccctctgttgctggttctgctgcttctgggccctacgcgcggcttgcgcaatgccacccagaggatgtttgaaattgactatagccgggactccttcctcaaggatggccagccatttcgctacatctcaggaagcattcactactcccgtgtgccccgcttctactggaaggaccggctgctgaagatgaagatggctgggctgaacgccatccagacgtatgtgccctggaactttcatgagccctggccaggacagtaccagttttctgaggaccatgatgtggaatattttcttcggctggctcatgagctgggactgctggttatcctgaggcccgggccctacatctgtgcagagtgggaaatgggaggattacctgcttggctgctagagaaagagtctattcttctccgctcctccgacccagattacctggcagctgtggacaagtggttgggagtccttctgcccaagatgaagcctctcctctatcagaatggagggccagttataacagtgcaggttgaaaatgaatatggcagctactttgcctgtgattttgactacctgcgcttcctgcagaagcgctttcgccaccatctgggggatgatgtggttctgtttaccactgatggagcacataaaacattcctgaaatgtggggccctgcagggcctctacaccacggtggactttggaacaggcagcaacatcacagatgctttcctaagccagaggaagtgtgagcccaaaggacccttgatcaattctgaattctatactggctggctagatcactggggccaacctcactccacaatcaagaccgaagcagtggcttcctccctctatgatatacttgcccgtggggcgagtgtgaacttgtacatgtttataggtgggaccaattttgcctattggaatggggccaactcaccctatgcagcacagcccaccagctacgactatgatgccccactgagtgaggctggggacctcactgagaagtattttgctctgcgaaacatcatccagaagtttgaaaaagtaccagaaggtcctatccctccatctacaccaaagtttgcatatggaaaggtcactttggaaaagttaaagacagtgggagcagctctggacattctgtgtccctctgggcccatcaaaagcctttatcccttgacatttatccaggtgaaacagcattatgggtttgtgctgtaccggacaacacttcctcaagattgcagcaacccagcacctctctcttcacccctcaatggagtccacgatcgagcatatgttgctgtggatgggatcccccagggagtccttgagcgaaacaatgtgatcactctgaacataacagggaaagctggagccactctggaccttctggtagagaacatgggacgtgtgaactatggtgcatatatcaacgattttaagggtttggtttctaacctgactctcagttccaatatcctcacggactggacgatctttccactggacactgaggatgcagtgtgcagccacctggggggctggggacaccgtgacagtggccaccatgatgaagcctgggcccacaactcatccaactacacgctcccggccttttatatggggaacttctccattcccagtgggatcccagacttgccccaggacacctttatccagtttcctggatggaccaagggccaggtctggattaatggctttaaccttggccgctattggccagcccggggccctcagttgaccttgtttgtgccccagcacatcctgatgacctcggccccaaacaccatcaccgtgctggaactggagtgggcaccctgcagcagtgatgatccagaactatgtgctgtgacgttcgtggacaggccagttattggctcatctgtgacctacgatcatccctccaaacctgttgaaaaaagactcatgcccccacccccgcaaaaaaacaaagattcatggctggaccatgtatgatgatgaaagcctgtgtctttgagggattctaccctgaacatacctcacagatcctccctgtcatgccacatttcactgattggaatgtggaaatggaaaaggaatttaggatgtgcattttcacctgaggtttccctgcatccctgcagtgccaaagccccaccttcagggaccacctggaatgtgtgaggggctgacagcacagtaacgtgcatacatatctgcagggctggaatggaagctttaaaggtggtagtgatttttattttggaagaatcatgttacctttttgttaaataaaatttgtactcaaatgatgatgtcactgtttttaatgtgcaggtattgaattatatggtctgacttaaatcataactagacttgagtgggctgaataaaccacttcactaacttgaagttcaaaa

SEQ ID NO: 11752 - DNA, 2557 bp, Homo sapiens
  source 1..2557: mol_type = unassigned DNA
agtcaagtgacgcgaagcggccggcctgggcgccgactgcagagccgggaggctggtggtcatgccggggttcctggttcgcatcctccctctgttgctggttctgctgcttctgggccctacgcgcggcttgcgctctcgattccttccttgggcttttcatctgccacggcaagcgcctaagtctcagctgccgcttcacaaaagaggtaccaagactgcaccgaatgagcacgcaagcagcaacaggagtgggagaagaaggaggcggcagcagtggaatgccacccagaggatgtttgaaattgactatagccgggactccttcctcaaggatggccagccatttcgctacatctcaggaagcattcactactcccgtgtgccccgcttctactggaaggaccggctgctgaagatgaagatggctgggctgaacgccatccagacgtatgtgccctggaactttcatgagccctggccaggacagtaccagttttctgaggaccatgatgtggaatattttcttcggctggctcatgagctgggactgctggttatcctgaggcccgggccctacatctgtgcagagtgggaaatgggaggattacctgcttggctgctagagaaagagtctattcttctccgctcctccgacccagattacctggcagctgtggacaagtggttgggagtccttctgcccaagatgaagcctctcctctatcagaatggagggccagttataacagtgcaggttgaaaatgaatatggcagctactttgcctgtgattttgactacctgcgcttcctgcagaagcgctttcgccaccatctgggggatgatgtggttctgtttaccactgatggagcacataaaacattcctgaaatgtggggccctgcagggcctctacaccacggtggactttggaacaggcagcaacatcacagatgctttcctaagccagaggaagtgtgagcccaaaggacccttgatcaattctgaattctatactggctggctagatcactggggccaacctcactccacaatcaagaccgaagcagtggcttcctccctctatgatatacttgcccgtggggcgagtgtgaacttgtacatgtttataggtgggaccaattttgcctattggaatggggccaactcaccctatgcagcacagcccaccagctacgactatgatgccccactgagtgaggctggggacctcactgagaagtattttgctctgcgaaacatcatccagaagtttgaaaaagtaccagaaggtcctatccctccatctacaccaaagtttgcatatggaaaggtcactttggaaaagttaaagacagtgggagcagctctggacattctgtgtccctctgggcccatcaaaagcctttatcccttgacatttatccaggtgaaacagcattatgggtttgtgctgtaccggacaacacttcctcaagattgcagcaacccagcacctctctcttcacccctcaatggagtccacgatcgagcatatgttgctgtggatgggatcccccagggagtccttgagcgaaacaatgtgatcactctgaacataacagggaaagctggagccactctggaccttctggtagagaacatgggacgtgtgaactatggtgcatatatcaacgattttaagggtttggtttctaacctgactctcagttccaatatcctcacggactggacgatctttccactggacactgaggatgcagtgtgcagccacctggggggctggggacaccgtgacagtggccaccatgatgaagcctgggcccacaactcatccaactacacgctcccggccttttatatggggaacttctccattcccagtgggatcccagacttgccccaggacacctttatccagtttcctggatggaccaagggccaggtctggattaatggctttaaccttggccgctattggccagcccggggccctcagttgaccttgtttgtgccccagcacatcctgatgacctcggccccaaacaccatcaccgtgctggaactggagtgggcaccctgcagcagtgatgatccagaactatgtgctgtgacgttcgtggacaggccagttattggctcatctgtgacctacgatcatccctccaaacctgttgaaaaaagactcatgcccccacccccgcaaaaaaacaaagattcatggctggaccatgtatgatgatgaaagcctgtgtctttgagggattctaccctgaacatacctcacagatcctccctgtcatgccacatttcactgattggaatgtggaaatggaaaaggaatttaggatgtgcattttcacctgaggtttccctgcatccctgcagtgccaaagccccaccttcagggaccacctggaatgtgtgaggggctgacagcacagtaacgtgcatacatatctgcagggctggaatggaagctttaaaggtggtagtgatttttattttggaagaatcatgttacctttttgttaaataaaatttgtactcaaatgat

SEQ ID NO: 11753 - DNA, 3883 bp, Homo sapiens
  source 1..3883: mol_type = unassigned DNA
actcaaaatggcggcggcggcgtcagcatcagcggcctcctgcccgtatctatcgtggcggcgacgggacccgcctccctgggcgccggagtcatgtgacccacacaatggctgagtggctactctcggcttcctggcaacgccgagcgaaagctatgactgcggccgcgggttcggcgggccgcgccgcggtgcccttgctgctgtgtgcgctgctggcgcccggcggcgcgtacgtgctcgacgactccgacgggctgggccgggagttcgacggcatcggcgcggtcagcggcggcggggcaacctcccgacttctagtaaattacccagagccctatcgttctcagatattggattatctctttaagccgaattttggtgcctctttgcatattttaaaagtggaaataggtggtgatgggcagacaacagacggcactgagccctcccacatgcattatgcactagatgagaattatttccgaggatacgagtggtggttgatgaaagaagctaagaagaggaatcccaatattacactcattgggttgccatggtcattccctggatggctgggaaaaggtttcgactggccttatgtcaatcttcagctgactgcctattatgtcgtgacctggattgtgggcgccaagcgttaccatgatttggacattgattatattggaatttggaatgagaggtcatataatgccaattatattaagatattaagaaaaatgctgaattatcaaggtctccagcgagtgaaaatcatagcaagtgataatctctgggagtccatctctgcatccatgctccttgatgccgaactcttcaaggtggttgatgttataggggctcattatcctggaacccattcagcaaaagatgcaaagttgactgggaagaagctttggtcttctgaagactttagcactttaaatagtgacatgggtgcaggctgctggggtcgcattttaaatcagaattatatcaatggctatatgacttccacaatcgcatggaatttagtggctagttactatgaacagttgccttatgggagatgcgggttgatgacggcccaggagccatggagtgggcactacgtggtagaatctcctgtctgggtatcagctcataccactcagtttactcaacctggctggtattacctgaagacagttggccatttagagaaaggaggaagctacgtagctctgactgatggcttagggaacctcaccatcatcattgaaaccatgagtcataaacattctaagtgcatacggccatttcttccttatttcaatgtgtcacaacaatttgccacctttgttcttaagggatcttttagtgaaataccagagctacaggtatggtataccaaacttggaaaaacatccgaaagatttctttttaagcagctggattctctatggctccttgacagcgatggcagtttcacactgagcctgcatgaagatgagctgttcacactcaccactctcaccactggtcgcaaaggcagctacccgcttcctccaaaatcccagcccttcccaagtacctataaggatgatttcaatgttgattacccattttttagtgaagctccaaactttgctgatcaaactggtgtatttgaatattttacaaatattgaagaccctggcgagcatcacttcacgctacgccaagttctcaaccagagacccattacatgggctgccgatgcatccaacacaatcagtattataggagactacaactggaccaatctgactataaagtgtgatgtatacatagagacccctgacacaggaggtgtgttcattgcaggaagagtaaataaaggtggtattttgattagaagtgccagaggaattttcttctggatttttgcaaatggatcttacagggttacaggtgatttagctggatggattatatatgctttaggacgtgttgaagttacagcaaaaaaatggtatacactcacgttaactattaagggtcatttcacctctggcatgctgaatgacaagtctctgtggacagacatccctgtgaattttccaaagaatggctgggctgcaattggaactcactcctttgaatttgcacagtttgacaactttcttgtggaagccacacgctaatacttaacagggcatcatagaatactctggattttcttcccttctttttggttttggttcagagccaattcttgtttcattggaacagtatatgaggcttttgagactaaaaataatgaagagtaaaaggggagagaaatttatttttaatttaccctgtggaagattttattagaattaattccaaggggaaaactggtgaatctttaacattacctggtgtgttccctaacattcaaactgtgcattggccatacccttaggagtggtttgagtagtacagacctcgaagccttgctgctaacactgaggtagctctcttcatcttatttgcaagcggtcctgtagatggcagtaacttgatcatcactgagatgtatttatgcatgctgaccgtgtgtccaagtgagccagtgtcttcatcacaagatgatgctgccataatagaaagctgaagaacactagaagtagctttttgaaaaccacttcaacctgttatgctttatgctctaaaaagtatttttttattttcctttttaagatgatacttttgaaatgcaggatatgatgagtgggatgattttaaaaatgcctctttaataaactacctctaacactatttctgcagtaatagatattagcagattaattgggttatttgcattatttaatttttttgattccaagttttggtcttgtaaccactataactctctgtgaacgtttttccaggtggctggaagaaggaagaaaacctgatatagccaatgctgttgtagtcgtttcctcagcctcatctcactgtgctgtggtctgtcctcacatgtgcactggtaacagactcacacagctgatgaatgcttttctctccttatgtgtggaaggaggggagcacttagacatttgctaactcccagaattggatcatctcctaagatgtacttactttttaaagtccaaatatgtttatatttaaatatacgtgagcgtgttcatcatgttgtatgatttatactaagcattaatgtggctctatgtagcaaatcagttattcatgtaggtaaagtaaatctagaattatttataagaattactcattgaactaattctactatttaggaatttgtaagagtctaacataggcttagctacagtgaagttttgcattgcttttgaagacaagaagataagtgctagaataaataagattacagagaaaattttttgttaaaaccaagtgatttccagctgatgtatctaatattttttaaaacgaacattatagaggtgtaatttatttacaataaaatgttcctactttaaatatacaattcagtgagttttgataaattgatatacccatgtaaccaacactccagtcaagcttcagaatatttccatcaccccagaaggttctcttgtatacctgctcagtcagttcctttcactcccaattgttggcagccattgataggaattctatcactataggttagttttctttgttccagaacatcatgaaagcggcgtcatgtactgtgtattcttatgaatggtttctttccatcagcataatgatttgagatttgtccatgttgtgtgattcagtggtttgttccttcttatttctgaagagttttccattgtatgaatataccacaatttgtttcctccccaccagtttctgatactacaattaaaactgtctacatttacaa

SEQ ID NO: 11754 - DNA, 2054 bp, Homo sapiens
  source 1..2054: mol_type = unassigned DNA
atgtgacccacacaatggctgagtggctactctcggcttcctggcaacgccgagcgaaagctatgactgcggccgcgggttcggcgggccgcgccgcggtgcccttgctgctgtgtgcgctgctggcgcccggcggcgcgtacgtgctcgacgactccgacgggctgggccgggagttcgacggcatcggcgcggtcagcggcggcgggccgaattttggtgcctctttgcatattttaaaagtggaaataggtggtgatgggcagacaacagacggcactgagccctcccacatgcattatgcactagatgagaattatttccgaggatacgagtggtggttgatgaaagaagctaagaagaggaatcccaatattacactcattgggttgccatggtcattccctggatggctgggaaaaggtttcgactggccttatgtcaatcttcagctgactgcctattatgtcgtgacctggattgtgggcgccaagcgttaccatgatttggacattgattatattggaatttggaatgagaggtcatataatgccaattatattaagatattaagaaaaatgctgaattatcaaggtctccagcgagtgaaaatcatagcaagtgataatctctgggagtccatctctgcatccatgctccttgatgccgaactcttcaaggtggttgatgttataggggctcattatcctggaacccattcagcaaaagatgcaaagttgactgggaagaagctttggtcttctgaagactttagcactttaaatagtgacatgggtgcaggctgctggggtcgcattttaaatcagaattatatcaatggctatatgacttccacaatcgcatggaatttagtggctagttactatgaacagttgccttatgggagatgcgggttgatgacggcccaggagccatggagtgggcactacgtggtagaatctcctgtctgggtatcagctcataccactcagtttactcaacctggctggtattacctgaagacagttggccatttagagaaaggaggaagctacgtagctctgactgatggcttagggaacctcaccatcatcattgaaaccatgagtcataaacattctaagtgcatacggccatttcttccttatttcaatgtgtcacaacaatttgccacctttgttcttaagggatcttttagtgaaataccagagctacaggtatggtataccaaacttggaaaaacatccgaaagatttctttttaagcagctggattctctatggctccttgacagcgatggcagtttcacactgagcctgcatgaagatgagctgttcacactcaccactctcaccactggtcgcaaaggcagctacccgcttcctccaaaatcccagcccttcccaagtacctataaggatgatttcaatgttgattacccattttttagtgaagctccaaactttgctgatcaaactggtgtatttgaatattttacaaatattgaagaccctggcgagcatcacttcacgctacgccaagttctcaaccagagacccattacatgggctgccgatgcatccaacacaatcagtattataggagactacaactggaccaatctgactataaagtgtgatgtatacatagagacccctgacacaggaggtgtgttcattgcaggaagagtaaataaaggtggtattttgattagaagtgccagaggaattttcttctggatttttgcaaatggatcttacagggttacaggtgatttagctggatggattatatatgctttaggacgtgttgaagttacagcaaaaaaatggtatacactcacgttaactattaagggtcatttcacctctggcatgctgaatgacaagtctctgtggacagacatccctgtgaattttccaaagaatggctgggctgcaattggaactcactcctttgaatttgcacagtttgacaactttcttgtggaagccacacgctaatacttaacagggcatcatagaatactctggattttcttcccttctttttgg

SEQ ID NO: 11755 - DNA, 2547 bp, Homo sapiens
  source 1..2547: mol_type = unassigned DNA
gtgcttattaacttttctctcagtccctcactctgctgctcttctcgcctcatctcacataagggaaaactcaggctccaaaagcaaagtgattccaccaagatgacaatggaatcgggacctggtgtccaagcctggtcctcgcacgaggtagatactccctgagatgctggggaagagccatggtagggccactcatggccctcttcctttggcggaccttggaatccaccttccctgcgttaaagtgctccaccaggtgacgccggaagagaagccagcagcaacctcccgacttctagtaaattacccagagccctatcgttctcagatattggattatctctttaagccgaattttggtgcctctttgcatattttaaaagtggaaataggtggtgatgggcagacaacagacggcactgagccctcccacatgcattatgcactagatgagaattatttccgaggatacgagtggtggttgatgaaagaagctaagaagaggaatcccaatattacactcattgggttgccatggtcattccctggatggctgggaaaaggtttcgactggccttatgtcaatcttcagctgactgcctattatgtcgtgacctggattgtgggcgccaagcgttaccatgatttggacattgattatattggaatttggaatgagaggtcatataatgccaattatattaagatattaagaaaaatgctgaattatcaaggtctccagcgagtgaaaatcatagcaagtgataatctctgggagtccatctctgcatccatgctccttgatgccgaactcttcaaggtggttgatgttataggggctcattatcctggaacccattcagcaaaagatgcaaagttgactgggaagaagctttggtcttctgaagactttagcactttaaatagtgacatgggtgcaggctgctggggtcgcattttaaatcagaattatatcaatggctatatgacttccacaatcgcatggaatttagtggctagttactatgaacagttgccttatgggagatgcgggttgatgacggcccaggagccatggagtgggcactacgtggtagaatctcctgtctgggtatcagctcataccactcagtttactcaacctggctggtattacctgaagacagttggccatttagagaaaggaggaagctacgtagctctgactgatggcttagggaacctcaccatcatcattgaaaccatgagtcataaacattctaagtgcatacggccatttcttccttatttcaatgtgtcacaacaatttgccacctttgttcttaagggatcttttagtgaaataccagagctacaggtatggtataccaaacttggaaaaacatccgaaagatttctttttaagcagctggattctctatggctccttgacagcgatggcagtttcacactgagcctgcatgaagatgagctgttcacactcaccactctcaccactggtcgcaaaggcagctacccgcttcctccaaaatcccagcccttcccaagtacctataaggatgatttcaatgttgattacccattttttagtgaagctccaaactttgctgatcaaactggtgtatttgaatattttacaaatattgaagaccctggcgagcatcacttcacgctacgccaagttctcaaccagagacccattacatgggctgccgatgcatccaacacaatcagtattataggagactacaactggaccaatctgactataaagtgtgatgtatacatagagacccctgacacaggaggtgtgttcattgcaggaagagtaaataaaggtggtattttgattagaagtgccagaggaattttcttctggatttttgcaaatggatcttacagggttacaggtgatttagctggatggattatatatgctttaggacgtgttgaagttacagcaaaaaaatggtatacactcacgttaactattaagggtcatttcacctctggcatgctgaatgacaagtctctgtggacagacatccctgtgaattttccaaagaatggctgggctgcaattggaactcactcctttgaatttgcacagtttgacaactttcttgtggaagccacacgctaatacttaacagggcatcatagaatactctggattttcttcccttctttttggttttggttcagagccaattcttgtttcattggaacagtatatgaggcttttgagactaaaaataatgaagagtaaaaggggagagaaatttatttttaatttaccctgtggaagattttattagaattaattccaaggggaaaactggtgaatctttaacattacctggtgtgttccctaacattcaaactgtgcattggccatacccttaggagtggtttgagtagtacagacctcgaagccttgctgctaacactgaggtagctctcttcatcttatttgcaagcggtcctgtagatggcagtaacttgatcatcactgagatgtatttatgcatgctgaccgtgtgt

SEQ ID NO: 11756 - DNA, 2276 bp, Homo sapiens
  source 1..2276: mol_type = unassigned DNA
atgtgacccacacaatggctgagtggctactctcggcttcctggcaacgccgagcgaaagctatgactgcggccgcgggttcggcgggccgcgccgcggtgcccttgctgctgtgtgcgctgctggcgcccggcggcgcgtacgtgctcgacgactccgacgggctgggccgggagttcgacggcatcggcgcggtcagcggcggcggggcaacctcccgacttctagtaaattacccagagccctatcgttctcagatattggattatctctttaagccgaattttggtgcctctttgcatattttaaaagtggaaataggtggtgatgggcagacaacagacggcactgagccctcccacatgcattatgcactagatgagaattatttccgaggatacgagtggtggttgatgaaagaagctaagaagaggaatcccaatattacactcattgggttgccatggtcattccctggatggctggattgtgggcgccaagcgttaccatgatttggacattgattatattggaatttggaatgagaggtcatataatgccaattatattaagatattaagaaaaatgctgaattatcaaggtctccagcgagtgaaaatcatagcaagtgataatctctgggagtccatctctgcatccatgctccttgatgccgaactcttcaaggtggttgatgttataggggctcattatcctggaacccattcagcaaaagatgcaaagttgactgggaagaagctttggtcttctgaagactttagcactttaaatagtgacatgggtgcaggctgctggggtcgcattttaaatcagaattatatcaatggctatatgacttccacaatcgcatggaatttagtggctagttactatgaacagttgccttatgggagatgcgggttgatgacggcccaggagccatggagtgggcactacgtggtagaatctcctgtctgggtatcagctcataccactcagtttactcaacctggctggtattacctgaagacagttggccatttagagaaaggaggaagctacgtagctctgactgatggcttagggaacctcaccatcatcattgaaaccatgagtcataaacattctaagtgcatacggccatttcttccttatttcaatgtgtcacaacaatttgccacctttgttcttaagggatcttttagtgaaataccagagctacaggtatggtataccaaacttggaaaaacatccgaaagatttctttttaagcagctggattctctatggctccttgacagcgatggcagtttcacactgagcctgcatgaagatgagctgttcacactcaccactctcaccactggtcgcaaaggcagctacccgcttcctccaaaatcccagcccttcccaagtacctataaggatgatttcaatgttgattacccattttttagtgaagctccaaactttgctgatcaaactggtgtatttgaatattttacaaatattgaagaccctggcgagcatcacttcacgctacgccaagttctcaaccagagacccattacatgggctgccgatgcatccaacacaatcagtattataggagactacaactggaccaatctgactataaagtgtgatgtatacatagagacccctgacacaggaggtgtgttcattgcaggaagagtaaataaaggtggtattttgattagaagtgccagaggaattttcttctggatttttgcaaatggatcttacagggttacaggtgatttagctggatggattatatatgctttaggacgtgttgaagttacagcaaaaaaatggtatacactcacgttaactattaagggtcatttcacctctggcatgctgaatgacaagtctctgtggacagacatccctgtgaattttccaaagaatggctgggctgcaattggaactcactcctttgaatttgcacagtttgacaactttcttgtggaagccacacgctaatacttaacagggcatcatagaatactctggattttcttcccttctttttggttttggttcagagccaattcttgtttcattggaacagtatatgaggcttttgagactaaaaataatgaagagtaaaaggggagagaaatttatttttaatttaccctgtggaagattttattagaattaattccaaggggaaaactggtgaatctttaacattacctggtgtgttccctaacattcaaactgtgcattggccatacccttaggag

SEQ ID NO: 11757 - DNA, 2528 bp, Homo sapiens
  source 1..2528: mol_type = unassigned DNA
agtcagcaggcggttggggcgggcccgctgcggggctggggcgggtgctttctcgtttaacacgaaccagacaggcagttaggtttgaacaaatgaggatccggaggtccagagagtataggtgcagagagtaaagtgacaggtctaagtagtgaagtagccggggctggaaccctcgtcccaggcagtggggcacaggctgtcttcatcgcggagatggcagtcggggagcgtcgctccagaaagggccagggagtgcgggagcgtccgtgtgcgaaagagaacgccccagtgggatgctttggctgtgtctctcccttttggaggagttggtgggtggtggagtcgttaagtcccgtgcagttgttagtgcagggtaagaatgggctcctccagagagggtagcgccgaataggatttcgtttggaggcaggactggtgcctcaaggtctctttaaaaggaagataagcgagcggcctgaaactaccgggtactccctctgggcccatgggcttcatggtggccgacctttgggcaacctcccgacttctagtaaattacccagagccctatcgttctcagatattggattatctctttaagccgaattttggtgcctctttgcatattttaaaagtggaaataggtggtgatgggcagacaacagacggcactgagccctcccacatgcattatgcactagatgagaattatttccgaggatacgagtggtggttgatgaaagaagctaagaagaggaatcccaatattacactcattgggttgccatggtcattccctggatggctgggaaaaggtttcgactggccttatgtcaatcttcagctgactgcctattatgtcgtgacctggattgtgggcgccaagcgttaccatgatttggacattgattatattggaatttggaatgagaggtcatataatgccaattatattaagatattaagaaaaatgctgaattatcaaggtctccagcgagtgaaaatcatagcaagtgataatctctgggagtccatctctgcatccatgctccttgatgccgaactcttcaaggtggttgatgttataggggctcattatcctggaacccattcagcaaaagatgcaaagttgactgggaagaagctttggtcttctgaagactttagcactttaaatagtgacatgggtgcaggctgctggggtcgcattttaaatcagaattatatcaatggctatatgacttccacaatcgcatggaatttagtggctagttactatgaacagttgccttatgggagatgcgggttgatgacggcccaggagccatggagtgggcactacgtggtagaatctcctgtctgggtatcagctcataccactcagtttactcaacctggctggtattacctgaagacagttggccatttagagaaaggaggaagctacgtagctctgactgatggcttagggaacctcaccatcatcattgaaaccatgagtcataaacattctaagtgcatacggccatttcttccttatttcaatgtgtcacaacaatttgccacctttgttcttaagggatcttttagtgaaataccagagctacaggtatggtataccaaacttggaaaaacatccgaaagatttctttttaagcagctggattctctatggctccttgacagcgatggcagtttcacactgagcctgcatgaagatgagctgttcacactcaccactctcaccactggtcgcaaaggcagctacccgcttcctccaaaatcccagcccttcccaagtacctataaggatgatttcaatgttgattacccattttttagtgaagctccaaactttgctgatcaaactggtgtatttgaatattttacaaatattgaagaccctggcgagcatcacttcacgctacgccaagttctcaaccagagacccattacatgggctgccgatgcatccaacacaatcagtattataggagactacaactggaccaatctgactataaagtgtgatgtatacatagagacccctgacacaggaggtgtgttcattgcaggaagagtaaataaaggtggtattttgattagaagtgccagaggaattttcttctggatttttgcaaatggatcttacagggttacaggtgatttagctggatggattatatatgctttaggacgtgttgaagttacagcaaaaaaatggtatacactcacgttaactattaaggtggctggaagaaggaagaaaacctgatatagccaatgctgttgtagtcgtttcctcagcctcatctcactgtgctgtggtctgtcctcacatgtgcactggtaacagactcacacagctgatgaatgcttttctctccttatgtgtggaaggaggggagcacttagacatttgctaactcccagaattggatcatctcctaagatgtacttactttttaaagtccaaatatgtttatatttaaatatacgtgagcgtgttcatcatgttgtatgat

SEQ ID NO: 11758 - DNA, 818 bp, Homo sapiens
  source 1..818: mol_type = unassigned DNA
ccggtgacgcgactccgggcggctcccgggtgcgccgcatatatagcagcggcggcggtggcggcggccacaccgggcggcggacacgtggagggacccggcccgcgccttctgcccctgctgccggccgcgccatgcggtgagcgccccaggccgccagagcccacccgacccggcccgacgcccggacctgccgcccagacccgccaccgcacccggaccccgacgctccgaacccgggcgcagccgcagctcaagatggcccgaggcagcgccctcctgctcgcctccctcctcctcgccgcggccctttctgcctctgcggggctctggtcgccggccaaggaaaaacgaggctggaccctgaacagcgcgggctacctgctgggcccacatgccgttggcaaccacaggtcattcagcgacaagaatggcctcaccagcaagcgggagctgcggcccgaagatgacatgaaaccaggaagctttgacaggtccatacctgaaaacaatatcatgcgcacaatcattgagtttctgtctttcttgcatctcaaagaggccggtgccctcgaccgcctcctggatctccccgccgcagcctcctcagaagacatcgagcggtcctgagagcctcctgggcatgtttgtctgtgtgctgtaacctgaagtcaaaccttaagataatggataatcttcggccaatttatgcagagtcagccattcctgttctctttgccttgatgttgtgttgttatcatttaagattttttttttttggtaattattttgagtggcaaaataaagaatagcaatta

SEQ ID NO: 11759 - DNA, 1050 bp, Homo sapiens
  source 1..1050: mol_type = unassigned DNA
atggagctggcggtcgggaacctcagcgagggcaacgcgagctggccggagccccccgccccggagcccgggccgctgttcggcatcggcgtggagaacttcgtcacgctggtggtgttcggcctgatcttcgcgctgggtgtgctgggcaacagcctagtgatcaccgtgctggcgcgcagcaagccgggcaagccgcggagcaccaccaacctgttcatcctcaacctgagcatcgccgacctggcctacctgctcttctgcatccccttccaggccaccgtgtacgcgctgcccacctgggtgctgggcgccttcatctgcaagttcatccactacttcttcaccgtgtccatgctggtgagcatcttcaccctggccgcgatgtccgtggaccgctacgtggccatcgtgcactcgcggcgctcctcctccctcagggtgtcccgcaacgcgctgctgggcgtgggctgcatctgggcgctgtccattgccatggcctcgcccgtggcctaccaccagggcctcttccacccgcgcgccagcaaccagaccttctgctgggagcagtggcccgaccctcgccacaagaaggcctacgtggtgtgcaccttcgtcttcggctacctgctgccgctcctgctcatctgcttctgctatgccaaggtccttaatcacttgcataaaaagttgaagaacatgtcaaagaagtctgaagcatccaagaaaaagactgcacagacagttctggtggtggttgtggtgtttggaatctcctggctgccgcaccacatcatccatctctgggctgagtttggagttttcccgctgacgccggcttccttcctcttcagaatcaccgcccactgcctggcgtacagcaattcctccgtgaatcctatcatttatgcatttctctctgaaaatttcaggaaggcctataaacaagtgttcaagtgtcacattcgcaaagattcacacctgagtgatactaaagaaagtaaaagtcgaatagacaccccaccatcaaccaattgtactcatgtgtga

SEQ ID NO: 11760 - DNA, 1364 bp, Homo sapiens
  source 1..1364: mol_type = unassigned DNA
gagttgcagcggccgcagccccgggagcttcccgctcgcggagacccagacggctgcaggagcccgggcagcctcggggtcagcggcaccatgaacgtctcgggctgcccaggggccgggaacgcgagccaggcgggcggcgggggaggctggcaccccgaggcggtcatcgtgcccctgctcttcgcgctcatcttcctcgtgggcaccgtgggcaacacgctggtgctggcggtgctgctgcgcggcggccaggcggtcagcactaccaacctgttcatccttaacctgggcgtggccgacctgtgtttcatcctgtgctgcgtgcccttccaggccaccatctacaccctggacggctgggtgttcggctcgctgctgtgcaaggcggtgcacttcctcatcttcctcaccatgcacgccagcagcttcacgctggccgccgtctccctggacaggtatctggccatccgctacccgctgcactcccgcgagctgcgcacgcctcgaaacgcgctggcagccatcgggctcatctgggggctgtcgctgctcttctccgggccctacctgagctactaccgccagtcgcagctggccaacctgaccgtgtgccatcccgcgtggagcgcccctcgccgccgcgccatggacatctgcaccttcgtcttcagctacctgcttcctgtgctggttctcggcctgacctacgcgcgcaccttgcgctacctctggcgcgccgtcgacccggtggccgcgggctcgggtgcccggcgcgccaagcgcaaggtgacacgcatgatcctcatcgtggccgcgctcttctgcctctgctggatgccccaccacgcgctcatcctctgcgtgtggttcggccagttcccgctcacgcgcgccacttatgcgcttcgcatcctctcgcacctggtctcctacgccaactcctgcgtcaaccccatcgtttacgcgctggtctccaagcacttccgcaaaggcttccgcacgatctgcgcgggcctgctgggccgtgccccaggccgagcctcgggccgtgtgtgcgctgccgcgcggggcacccacagtggcagcgtgttggagcgcgagtccagcgacctgttgcacatgagcgaggcggcgggggcccttcgtccctgccccggcgcttcccagccatgcatcctcgagccctgtcctggcccgtcctggcagggcccaaaggcaggcgacagcatcctgacggttgatgtggcctgaaagcacttagcgggcgcgctgggatgtcacagagttggagtcattgttgggggaccgtggggagagctttgcctgttaataaaacgcacaaaccatttcacacacagtga

SEQ ID NO: 11761 - DNA, 1157 bp, Homo sapiens
  source 1..1157: mol_type = unassigned DNA
tcccaggtgcccgtctgatggggagatggctgatgcccagaacatttcactggacagcccagggagtgtgggggccgtggcagtgcctgtggtctttgccctaatcttcctgctgggcacagtgggcaatgggctggtgctggcagtgctcctgcagcctggcccgagtgcctggcaggagcctggcagcaccacggacctgttcatcctcaacctggcggtggctgacctctgcttcatcctgtgctgcgtgcccttccaggccaccatctacacgctggatgcctggctctttggggccctcgtctgcaaggccgtgcacctgctcatctacctcaccatgtacgccagcagctttacgctggctgctgtctccgtggacaggtacctggccgtgcggcacccgctgcgctcgcgcgccctgcgcacgccgcgtaacgcccgcgccgcagtggggctggtgtggctgctggcggcgctcttctcggcgccctacctcagctactacggcaccgtgcgctacggcgcgctggagctctgcgtgcccgcctgggaggacgcgcgccgccgcgccctggacgtggccaccttcgctgccggctacctgctgcccgtggctgtggtgagcctggcctacgggcgcacgctgcgcttcctgtgggccgccgtgggtcccgcgggcgcggcggcggccgaggcgcggcggagggcgacgggccgcgcggggcgcgccatgctggcggtggccgcgctctacgcgctctgctggggtccgcaccacgcgctcatcctgtgcttctggtacggccgcttcgccttcagcccggccacctacgcctgccgcctggcctcacactgcctggcctacgccaactcctgcctcaacccgctcgtctacgcgctcgcctcgcgccacttccgcgcgcgcttccgccgcctgtggccgtgcggccgccgacgccgccaccgtgcccgccgcgccttgcgtcgcgtccgccccgcgtcctcgggcccacccggctgccccggagacgcccggcctagcgggaggctgctggctggtggcggccagggcccggagcccagggagggacccgtccacggcggagaggctgcccgaggaccggaataaaccctgccgcctggactccgcctgt

SEQ ID NO: 11762 - DNA, 2151 bp, Homo sapiens
  source 1..2151: mol_type = unassigned DNA
agaaggcctgggggcgaggaacaagacctcggagtatttcaaggggagacctagttccctgccctgccccgggcccagggcgccgcggtctgaactctgctcggctggaggactcgtctccgagctccgtcagaaatggggaacttgcagtcggagccatccgcgggcgggggctcccgaaaagtgcagccctcggaccgcgcccccgactcccgccggacgtccctggtggagcccgagatgacctcccaggccatgcgcctgactcgtgggctgggtgtctggttccctggcagcgccacacccccgggactcatggtaccccgggagccccaggcctcaccctcgaccctgcccctcaccttagaacggccctctccagtgatgccccctcctgaagaggcggccgcggtctctgcaccacccccggcccccgcggggactctgctgcccggcccgtctaaatggcaaaagcccgcgggcactccagttccccggatccgccgcctgctggaggcgagccatcgcggccagggcgaccctccgagcctccgcccgctgaagccgccgccgccgccccggcaactatccgtgaaggacactgtcccgagggccccatcccaatttccgccgcccctggagacttggaagccgccaccaccattaccttctgaacggcagccggcggaccgcagaatcactcctgctctggccacacccgcctcacccccgacagaaagccaggctgggccccgcaaccagggccagacggccggcagggctcgcggaggggcgcctccccatgcgggcgaaggcgaaatggcccagcctgcggattccgagtccggtctgagcctgctgtgtaaaatcaccttcaagtcgaggccctctttggcccctccggcagcctcgagttccttagcagccaaagcttcgctggggggcggcggaggcggcggcctctttgctgcctcaggtgccatctcttacgccgaggtcctgaagcaagggcccctgcctcctggagccgctcgccccttgggagaggtttctcgaggggcacaggaagccgagggaggtgatggagacggcgaagggtgctctggtcctccctcggcgcctgcgtcccaagcccgggccctaccgccgccaccctacaccaccttcccaggctcgaagcccaaattcgactgggttagcgctcccgacggccctgaacgccacttccgcttcaacggggctggcggaggcatcggggcgccgcgacggcgtgcggccgcactctctgggccttggggctcccctccgccaccaccagagcagatacactcagctcccgggccccggaggcccgcacctgccctgctggcgccgcctacgttcatcttcccagcacccaccaatggcgagcccatgcgcccggggcctccaggcctgcaggagttaccaccgctgccaccgcccacaccgccgcccacactgcagccaccagcgctccagccaacgccgctgccggtggctcccccgctcaccccgggtctgggccacaaggagtcagccctggctcccaccgcagcccctgctctgcccccagccttagccgccgaccaggccccggccccatccccggctccagctcccaccgtggctgagccctcgccgcctgtgtccgcgcccgcacccgcggctgcgcccatcaagacccgcacgcgcaggaacaagggttcccgtgcagcccggggcgcgacccgtaaggatggcttgcatggagatggtcctcgcgaacgagctacagctaccgtgcctgacagcagtggtggagggggtggtggcagcggggcctctcagactggggcagctaacacccgcgctgcgcgccactggctgcccttccaggtgcttaactcctgtccctgcaagtgttactgccaccaccagccacgccatcgccgcctgccacgcaacgtctctgcctggctgagcacatccaccaaccacctgggcgagccaccctgggttgccaccatcaagctgtccggctctctggtggccaagctggagcactacgacttgcaggccacccattccaactgagtgtagtcggctcaacaccctccaccttcccctccatgccaataaaataaccaatcc

SEQ ID NO: 11763 - DNA, 672 bp, Homo sapiens
  source 1..672: mol_type = unassigned DNA
atggggaacttgcagtcggagccatccgcgggcgggggctcccgaaaagtgcagccctcggaccgcgcccccgactcccgccggacgtccctggtggagcccgagatgacctcccaggccatgcgcctgactcgtgggctgggtgtctggttccctggcagcgccacacccccgggactcatggtaccccgggagccccaggcctcaccctcgaccctgcccctcaccttagaacggccctctccagtgatgccccctcctgaagaggcggccgcggtctctgcaccacccccggcccccgcggggactctgctgcccggcccgtctaaatggcaaaagcccgcgggcactccagttccccggatccgccgcctgctggaggcgagccatcgcggccagggcgaccctccgagcctccgcccgctgaagccgccgccgccgccccggcaactatccgtgaaggacactgtcccgagggccccatcccaatttccgccgcccctggagacttggaagccgccaccaccattaccttctgaacggcagccggcggaccgcagaatcactcctgctctggccacacccgcctgtgtccgcgcccgcacccgcggctgcgcccatcaagacccgcacgcgcaggaacaagggttcccgtgcagcccggggcgcgac

SEQ ID NO: 11764 - DNA, 2803 bp, Homo sapiens
  source 1..2803: mol_type = unassigned DNA
gcgagcggctgactgcccgtagaggaaacgacattcggagctgcgctcccgcccaggccggccctgacgcgggcctcgtcagccagtaacagggagcagaggtgggagttagcgaggcgaccacgaaaacggtgaaggtcggaaccgacagcctcctccgagaagggcaggagctgggaggaggcggcagcggcggcggcagaaacagcagcggcggcggcggcggcagctgggaggaggtggtgacggtggcaacggcagcgtcggggacgatggcgcgactcgtggcagtgtgcagggacggggaggaggagttccccttcgagaggaggcagattcccctctacatagacgacaccctgacgatggtgatggaatttcctgataatgtgttaaatctcgatggacatcagaataatggtgcacagctaaagcagttcattcagcgacatggtatgcttaagcaacaggatctaagtattgccatggtggtgacatcacgcgaagtcctgagtgcactttctcagcttgtcccatgtgttggttgtcgtcgcagtgtggagcgtctcttttcccagcttgtagagtctggaaatcctgctcttgaacccctaacagtagggcccaagggagtcctgtctgtaactagaagctgcatgactgatgcaaagaagctttatacattattttatgtacatgggtccaaactaaatgacatgatagatgctattccaaaaagtaagaagaataagagatgtcagttgcactccttagatacgcacaagccaaaacctttgggaggttgttggatggatgtatgggaactaatgtcgcaggaatgcagggatgaagtagttttaattgactcgagttgtcttttagaaacactagaaacatatctgcgaaaacacaggttttgcactgattgcaaaaataaagtcctccgagcatacaatatccttattggtgaacttgactgcagcaaagaaaagggctactgtgctgcactttatgaaggcttgcggtgctgtccacatgaacgacacatacatgtttgctgtgaaacagacttcattgcacatcttttgggtcgtgctgagccagagttcgcaggagggcgaagagaaaggcatgcaaagacaatagatatagctcaagaagaagttctgacctgcttgggaattcatctttatgaaagactgcatcgaatctggcagaagctacgggcagaagagcagacatggcagatgcttttctatcttggtgttgatgctttacgcaagagttttgagatgaccgtggaaaaagtacagggtattagcagattggaacaactttgtgaggaattttcagaagaggaacgagtaagagaactcaagcaagaaaagaaacgccaaaaacggaagaatagacgaaaaaataagtgtgtgtgtgatattcctactcccttacaaacagcagatgaaaaggaagtaagccaagagaaggaaacagacttcatagaaaatagcagctgcaaagcctgtggcagcactgaagatggtaatacttgtgtagaagtaattgttaccaatgaaaatacatcatgtacctgtcctagcagtggcaatcttttggggtcccctaaaataaagaaaggcttatctccacactgtaatggtagtgattgtggatattcatctagcatggaagggagtgaaacaggttctcgggagggttcggatgttgcctgcactgaaggcatttgtaatcatgatgaacacggtgatgactcttgtgttcatcactgtgaagacaaagaggatgatggtgatagttgtgttgaatgttgggcaaattctgaagagaacgacacaaaaggaaaaaataaaaagaagaagaagaaaagcaagatactgaaatgtgatgaacatatccagaagcttggaagctgtattacagatccaggtaatcgagagacctcaggaaataccatgcacacagtgtttcaccgtgacaagaccaaagatacacatcctgaaagctgttgcagctctgaaaagggtgggcagccattgccttggtttgagcataggaaaaatgtaccacagtttgcagaacctacagaaacgttgtttggtcccgattccggaaaaggtgccaagagcttagttgaactccttgatgagtctgaatgtacttcagatgaggaaatctttatctcacaagatgaaatacagtcatttatggctaataaccagtctttctacagcaatagagaacaataccgacagcatctgaaggagaaatttaataaatactgccggttaaatgatcacaagaggcccatttgtagtggctggttgacaacggctggagcaaattaaataaataaaatagctctgtctttcaatgaaacactcacgatgactactgcgccttctctttcgaaaaactcttaatttagtgacttatggcaaaattttatcttaaatcaatgtgattctttcttgttttgggagacggtggaggtatcctcattagttctttcttcaggcttgtgtctttagttgcgtggctgcgcaggcctgccatatgatttaagccatctcttttcattaaatgtttctcttcctgtgagacttactaaagcaacttagtggcaaaaagtaatgttgtacttataattctgtacagaaatgacaatgagctgaatatatggttttacaaagtagacatccacttgcaaaatgtttggatgtaatgttaaagcgcaatgtgcaaaatttaaaataaagaatatttattaatacgcacagtaaaa

SEQ ID NO: 11765 - DNA, 3927 bp, Homo sapiens
  source 1..3927: mol_type = unassigned DNA
cagagtgacgctttgatggtatctgcaagcgtttttgctgatcttatctctgccccctgaatattaattccctaatctggtagcaatccatctccccagtgaaggacctactagaggcaggtggggggagccaccatcagatcataagcataagaataatacaaaggggagggattcttctgcaaccaagaggcaagaggcgagagaaggaaaaaaaaaaaagcgatgagttcgccaaatatatggagcacaggaagctcagtctactcgactcctgtattttcacagaaaatgacggtgtggattctgctcctgctgtcgctctaccctggcttcactagccagaaatctgatgatgactatgaagattatgcttctaacaaaacatgggtcttgactccaaaagttcctgagggtgatgtcactgtcatcttaaacaacctgctggaaggatatgacaataaacttcggcctgatataggagtgaagccaacgttaattcacacagacatgtatgtgaatagcattggtccagtgaacgctatcaatatggaatacactattgatatattttttgcgcaaacgtggtatgacagacgtttgaaatttaacagcaccattaaagtcctccgattgaacagcaacatggtggggaaaatctggattccagacactttcttcagaaattccaaaaaagctgatgcacactggatcaccacccccaacaggatgctgagaatttggaatgatggtcgagtgctctacaccctaaggttgacaattgatgctgagtgccaattacaattgcacaactttccaatggatgaacactcctgccccttggagttctccagttggtctcgttctattgcccaggctggaatgtgcagtggtgtgatctcggctcactacagccttcgcttctggggctcaactgatcctcccaccttggcctccagagtagctgggatttcagatggctatccacgtgaagaaattgtttatcaatggaagcgaagttctgttgaagtgggcgacacaagatcctggaggctttatcaattctcatttgttggtctaagaaataccaccgaagtagtgaagacaacttccggagattatgtggtcatgtctgtctactttgatctgagcagaagaatgggatactttaccatccagacctatatcccctgcacactcattgtcgtcctatcctgggtgtctttctggatcaataaggatgctgttccagccagaacatctttaggtatcaccactgtcctgacaatgaccaccctcagcaccattgcccggaaatcgctccccaaggtctcctatgtcacagcgatggatctctttgtatctgtttgtttcatctttgtcttctctgctctggtggagtatggcaccttgcattattttgtcagcaaccggaaaccaagcaaggacaaagataaaaagaagaaaaaccctcttcttcggatgttttccttcaaggcccctaccattgatatccgcccaagatcagcaaccattcaaatgaataatgctacacaccttcaagagagagatgaagagtacggctatgagtgtctggacggcaaggactgtgccagttttttctgctgttttgaagattgtcgaacaggagcttggagacatgggaggatacatatccgcattgccaaaatggactcctatgctcggatcttcttccccactgccttctgcctgtttaatctggtctattgggtctcctacctctacctgtgaggaggtatgggttttactgatatggttcttattcactgagtctcatggagagatgtctgttctaagtccacttaaataatcctctatgtggttgataatgatctgaatctgtttctatgtccaaacctggtaaattttataatgtcatattgtttgtgcccagccctcctttggttagtgtactttgaacttcgatgtttgctgtgtttcaaacctgcaaggcaaagtaaaattagagcaagaacattcaaaccaaataagatatttttcagctacagcaaataaaacagtgaaagccctgactatttacagtagtggtatccttactagattcataatgcaattagatagaaaaggtccaaaactgtaccctatgttcactccgggtcaagttgtgataaatttgatcccaatagaatacctccctcatttaagaaaaatcataactcactttaaatatgaaagcctagtccagaaatctattacacctttatctcaagataggaagaaaatttcctccacattcatgtacaatgatgtaaatatttcaataacttagaatgcttcaagtttagtgcatgcatctctttagatccaaaataaatggactgaagttatcatcctattgtcttttattttgtgtccttgggctataaaagattcctgaatgtaattataaggatttgggtttggaaatggagggaggaattttcattgccttctccctcatgcatgaagattcgaacagcttattttttccttgtatgacatattacaacactttaagtaaaatatagactggataatcaacatttgccacctctaaatatgcccaatttcataactagagtataaagtaattgtatgtgcttgccgctatttttttcttccttttaggatgatagatcataacagaacttattctccatctcaagatctgcttctagtgattgtgagtgccttgtgggcagaatccttgtcatttcctctttgggtctgtagcaccttgcatagtgcctggcatatagttggtgctcaataaatatggtttgaagtgaattgccctcacatgcttctggcaaatctctgtgctggcctgaaaccagtgactcatcttctcacataggtgttgtcaagtgatatttgattttgtaaaaataaccagtaggatccaaagaactttagctatttatgttcatcttcaaaaaattattttaggcaaagtccatactccttttaaaacaatatttatgtcctatgtttgtgtatagacatgactctactagggcataattagagtttgtgtattatttttccaggtttggggatgagtcagtccttgcccatccacaattttgtttgtgaacttataacaggaataagcaaaattcatacctgactagtgttcagaatgtagcattctgtgcgaaaaagtattgaagattagcttttaaaaactgaaaaaaaaaaatgaatgactcacatagaggttgagccaatgactgtggcctcattagattacattgtagttaaacaaagcaatttctccagacttaaaacatgatgagttgagctctatcttcatgtactcatcctgaatccttatttttctaaaatagcaccctttgttaattatttttatggaaattattactctgtcataattaaatcatagctagtataactttacagataacctaaaaagaatagaaaagaagagagagtggctttgtcagtataaaaccatgtaaagtcatcatcaagtcatctggatgaatcttgaaacacatttagctgccagttttacaaacctttaatatatcagtgctccagtatataacctcaaacaaatgtaaatagaacgaattattttcttgttttgaattgtcaatatattaaatgttgactctttgggagagttgttggcaagtttcaatggtgagaaacattattgtcaacttgaaatgtgttctgtaatggggacactacaaaaagctagctttccaatgtgtgcatagtattggcaatatgaatatatattatatataatctaatacttattataagctgctccctgtctatgtatttggaaaccttttcacaaagggaattgcctaacatgtggacttttacaataaaaatgctgcattctaa

SEQ ID NO: 11766 - DNA, 1405 bp, Homo sapiens
  source 1..1405: mol_type = unassigned DNA
agagtagatacctgtcccgcccgccgcggccagcagcctcggaggaagccagggcaaagagggccggcggagaccaggtccgcgccggaggaagccgcgcccggccgaggccccggaccctgcgccccgagctccacggcaccatggccccgaagctgctgctcctcctctgcctgttctcgggcttgcacgcgcggtccagaaaggtggaagaggatgaatatgaagattcatcatcaaaccaaaagtgggtcttggctccaaaatcccaagacaccgacgtgactcttattctcaacaagttgctaagagaatatgataaaaagctgaggccagatattggaataaaaccgaccgtaattgacgttgacatttatgttaacagcattggtcctgtgtcatcaataaacatggaataccaaattgacatattttttgctcagacctggacagatagtcgccttcgattcaacagcacaatgaaaattcttactctgaacagcaacatggtggggttaatctggatcccagacaccatcttccgcaattctaaaaccgcagaggctcactggatcaccacacccaatcagctcctccggatttggaatgacgggaaaatcctttacactttgaggctcaccatcaatgctgagtgccagctgcagctgcacaacttccccatggacgaacactcctgcccgctgattttctccagctatggctatcccaaagaagaaatgatttatagatggagaaaaaattcagtggaggcagctgaccagaaatcatggcggctttatcagtttgacttcatgggcctcagaaacaccacagaaatcgtgacaacgtctgcaggtaggaatttactgaaagaggcacagctctcaaaagccagagaggcctaaggccatatgtagtcatatccttaatgtacaagccttttgggcaaccatgatacataagtgatatttgagacaaaacaagtgattcaaagtgaaactatgttttcatgttttaattggtatgggagagggatgttagaaataattcatatttttgaatccaggctgtgtttgcataatgtctataaacctagctataaacttaacctaactcattactgaccatatttacataaaccaattttgctgatggggagagttctgcaaatttccacgtacataagaagaatcaaatattattgagaatccacacataaaagaagctggtgtgatatgtcctttgagtttcaattgcttttatttactctaagttttatctttaactttgagtttctttttcaatgattgaaagtaattacctaccaatttgattttatgaagtgatcattatatgcatattcaaaatcctgtaattaaataaaaagagttgttctgcctatgaa

SEQ ID NO: 11767 - DNA, 2083 bp, Homo sapiens
  source 1..2083: mol_type = unassigned DNA
aacagaagatgccggagaaggggggggaaaagtagatgcggatttcgtcctgacttctaaaaattcctcctctccctctcccattttcctaatccgagaatgatggagctcgaggcaaaggaatgattccggaaatggagatatgattctcaaacctagaaatgatcggagtgatttattagttaaatattcttcgtccaggaacccagcacaattcagagctgcagattggatattgggaagcaaatttgggtgtgaaatcttcagcaaaggagcacgcagagtccatgatggctcagaccaagtgagtgagaggcagagcgaggacgcccctctgctctggcgcgcccggactcggactcgcagactcgcgctggctccagtctctccacgattctctctcccagacttttccccggtcttaagagatcctgtgtccagagggggccttagctgctccagcccgcgatgaggaaaagtccaggtctgtctgactgtctttgggcctggatcctccttctgagcacactgactggaagaagctatggacagccgtcattacaagatgaacttaaagacaataccactgtcttcaccaggattttggacagactcctagatggttatgacaatcgcctgagaccaggattgggagagcgtgtaaccgaagtgaagactgatatcttcgtcaccagtttcggacccgtttcagaccatgatatggaatatacaatagatgtatttttccgtcaaagctggaaggatgaaaggttaaaatttaaaggacctatgacagtcctccggttaaataacctaatggcaagtaaaatctggactccggacacatttttccacaatggaaagaagtcagtggcccacaacatgaccatgcccaacaaactcctgcggatcacagaggatggcaccttgctgtacaccatgaggctgacagtgagagctgaatgtccgatgcatttggaggacttccctatggatgcccatgcttgcccactaaaatttggaagttatgcttatacaagagcagaagttgtttatgaatggaccagagagccagcacgctcagtggttgtagcagaagatggatcacgtctaaaccagtatgaccttcttggacaaacagtagactctggaattgtccagtcaagtacaggagaatatgttgttatgaccactcatttccacttgaagagaaagattggctactttgttattcaaacatacctgccatgcataatgacagtgattctctcacaagtctccttctggctcaacagagagtctgtaccagcaagaactgtctttggagtaacaactgtgctcaccatgacaacattgagcatcagtgccagaaactccctccctaaggtggcttatgcaacagctatggattggtttattgccgtgtgctatgcctttgtgttctcagctctgattgagtttgccacagtaaactatttcactaagagaggttatgcatgggatggcaaaagtgtggttccagaaaagccaaagaaagtaaaggatcctcttattaagaaaaacaacacttacgctccaacagcaaccagctacacccctaatttggccaggggcgacccgggcttagccaccattgctaaaagtgcaaccatagaacctaaagaggtcaagcccgaaacaaaaccaccagaacccaagaaaacctttaacagtgtcagcaaaattgaccgactgtcaagaatagccttcccgctgctatttggaatctttaacttagtctactgggctacgtatttaaacagagagcctcagctaaaagcccccacaccacatcaatagatcttttactcacattctgttgttcagtcctctgcactgggaatttatttatgttctcaacgcagtaattcccatctgctttattgcctctgtcttaaagaatttgaaagtttccttattttcataattcatttaagaacaagagacccctgtctggcagtctggagcaaagcagactatgcagcttggagacaggattctgacagagcaagcgaaagagcaaagtcatgtcagaaggagacag

SEQ ID NO: 11768 - DNA, 2119 bp, Homo sapiens
  source 1..2119: mol_type = unassigned DNA
aaaaagagaagcttgcagcagattgtagaaggatttgagcctgcagctagagagaaggggattagggccagagtggtgcaagttaaattgtgctgcatataaaaaatgggcggattggtctccagatccagaggctggtaccaccttcctttctaaaataaaatctctctggcatgaagtcaccgcctatttcacatccggtttgccctgggacgtattactactgtcttggtaaagagaaatcttttgttgtatagctgcagattggatattgggaagcaaatttgggtgtgaaatcttcagcaaaggagcacgcagagtccatgatggctcagaccaagtgagtgagaggcagagcgaggacgcccctctgctctggcgcgcccggactcggactcgcagactcgcgctggctccagtctctccacgattctctctcccagacttttccccggtcttaagagatcctgtgtccagagggggccttagctgctccagcccgcgatgaggaaaagtccaggtctgtctgactgtctttgggcctggatcctccttctgagcacactgactggaagaagctatggacagccgtcattacaagatgaacttaaagacaataccactgtcttcaccaggattttggacagactcctagatggttatgacaatcgcctgagaccaggattgggagagcgtgtaaccgaagtgaagactgatatcttcgtcaccagtttcggacccgtttcagaccatgatatggaatatacaatagatgtatttttccgtcaaagctggaaggatgaaaggttaaaatttaaaggacctatgacagtcctccggttaaataacctaatggcaagtaaaatctggactccggacacatttttccacaatggaaagaagtcagtggcccacaacatgaccatgcccaacaaactcctgcggatcacagaggatggcaccttgctgtacaccatgaggctgacagtgagagctgaatgtccgatgcatttggaggacttccctatggatgcccatgcttgcccactaaaatttggaagttatgcttatacaagagcagaagttgtttatgaatggaccagagagccagcacgctcagtggttgtagcagaagatggatcacgtctaaaccagtatgaccttcttggacaaacagtagactctggaattgtccagtcaagtacaggagaatatgttgttatgaccactcatttccacttgaagagaaagattggctactttgttattcaaacatacctgccatgcataatgacagtgattctctcacaagtctccttctggctcaacagagagtctgtaccagcaagaactgtctttggagtaacaactgtgctcaccatgacaacattgagcatcagtgccagaaactccctccctaaggtggcttatgcaacagctatggattggtttattgccgtgtgctatgcctttgtgttctcagctctgattgagtttgccacagtaaactatttcactaagagaggttatgcatgggatggcaaaagtgtggttccagaaaagccaaagaaagtaaaggatcctcttattaagaaaaacaacacttacgctccaacagcaaccagctacacccctaatttggccaggggcgacccgggcttagccaccattgctaaaagtgcaaccatagaacctaaagaggtcaagcccgaaacaaaaccaccagaacccaagaaaacctttaacagtgtcagcaaaattgaccgactgtcaagaatagccttcccgctgctatttggaatctttaacttagtctactgggctacgtatttaaacagagagcctcagctaaaagcccccacaccacatcaatagatcttttactcacattctgttgttcagtcctctgcactgggaatttatttatgttctcaacgcagtaattcccatctgctttattgcctctgtcttaaagaatttgaaagtttccttattttcataattcatttaagaacaagagacccctgtctggcagtctggagcaaagcagactatgcagcttggagacaggattctgacagagcaagcgaaagagcaaagtcatgtcagaaggagacag

SEQ ID NO: 11769 - DNA, 4067 bp, Homo sapiens
  source 1..4067: mol_type = unassigned DNA
ggaaggcacgctcttgtcctggctgcaaaattgcctgtttttccctttccagtggacgctggtgaaatgccctcttgtgtaggggtctctcccattctgaacacgaaaactcaacttagtctttgatatggatggcatgggatgctgctccagcccgcgatgaggaaaagtccaggtctgtctgactgtctttgggcctggatcctccttctgagcacactgactggaagaagctatggacagccgtcattacaagatgaacttaaagacaataccactgtcttcaccaggattttggacagactcctagatggttatgacaatcgcctgagaccaggattgggagagcgtgtaaccgaagtgaagactgatatcttcgtcaccagtttcggacccgtttcagaccatgatatggaatatacaatagatgtatttttccgtcaaagctggaaggatgaaaggttaaaatttaaaggacctatgacagtcctccggttaaataacctaatggcaagtaaaatctggactccggacacatttttccacaatggaaagaagtcagtggcccacaacatgaccatgcccaacaaactcctgcggatcacagaggatggcaccttgctgtacaccatgaggctgacagtgagagctgaatgtccgatgcatttggaggacttccctatggatgcccatgcttgcccactaaaatttggaagttatgcttatacaagagcagaagttgtttatgaatggaccagagagccagcacgctcagtggttgtagcagaagatggatcacgtctaaaccagtatgaccttcttggacaaacagtagactctggaattgtccagtcaagtacaggagaatatgttgttatgaccactcatttccacttgaagagaaagattggctactttgttattcaaacatacctgccatgcataatgacagtgattctctcacaagtctccttctggctcaacagagagtctgtaccagcaagaactgtctttggagtaacaactgtgctcaccatgacaacattgagcatcagtgccagaaactccctccctaaggtggcttatgcaacagctatggattggtttattgccgtgtgctatgcctttgtgttctcagctctgattgagtttgccacagtaaactatttcactaagagaggttatgcatgggatggcaaaagtgtggttccagaaaagccaaagaaagtaaaggatcctcttattaagaaaaacaacacttacgctccaacagcaaccagctacacccctaatttggccaggggcgacccgggcttagccaccattgctaaaagtgcaaccatagaacctaaagaggtcaagcccgaaacaaaaccaccagaacccaagaaaacctttaacagtgtcagcaaaattgaccgactgtcaagaatagccttcccgctgctatttggaatctttaacttagtctactgggctacgtatttaaacagagagcctcagctaaaagcccccacaccacatcaatagatcttttactcacattctgttgttcagtcctctgcactgggaatttatttatgttctcaacgcagtaattcccatctgctttattgcctctgtcttaaagaatttgaaagtttccttattttcataattcatttaagaacaagagacccctgtctggcagtctggagcaaagcagactatgcagcttggagacaggattctgacagagcaagcgaaagagcaaagtcatgtcagaaggagacagaatgagagagaaaagagggggaagatggttcaaagatacaagaaaaagtagaaaaaaaaataacacttaactaaaacccctaggtcatttgtagatatatatttccaaatattctaaaaaagatactgtatatgtcaaaaatatttttatgtgaaggtgtttcaaagggtaaattataaatgtttcatgaagaaaaaattttaaaaatctacgtctttattacacaaactatggtgtgcttatgtttttgttttgctttttaaactgatgtatagctttaacattttgtttccaaagctgaagatccccattctttctctttgaaaaaaaaaaaggcctaatgcattattttgtcataaaatgctattttaaaattcatggaactttcatacgtaaaggtgcagttgctcattgtagagcacatttagtccaatgaagataaatgctttaaatagtttacttcactttcatctgagcttttaccactagactcaaggaagaataattttaacagacatgtatactccatagaaactaaactaaaatagtttaaaaatattccctttttcaccctattttcagatagcacatgagcccaacactcacttaattctcattatgaagatgtttttagaggggcaaaaatattttgcaagctctggaattgttgaatgtattcttttatataactacattaaaagctttagattgaaatttatgactagcaaacaaaaatagaatatataaacgatatatgtaaatatacagcatgagattgtacattttttacttttttaaaattgtgttcttaaaatattgtgtaagaatcactgcacttagctgttggaatgttgttaaatgctatggaaatacatttagaacctgcatttaagaacagaacagcaagtatgaaccacatggaacttaaaacatatgggtgtgaagtccacttatgtagacaaaacttataatttccaaactgttgtctagtatacagtgatcagttgctctctgttcaagtcattccacacatttccctattttaggctattataatatagaaagaaaatgggaagcattagttggagctagaaaatgaactgtatattattgctatatttgctaataccaactatttcaataagtgttgtaccatatgtagcattaaatataaaatacataaaagaatgtacagaaaatagcttttattgagtaatattacatttcatttatactgtagcaatatatttgtaggtatactatgtaagggctttaaataaaagaggtccattaatacttccttataaaaattctagtctgtttcattactgcccagatgttttagagataaatatttatgcagaaggtatttttgaagtctccttttgtctgatagagtttaacagatatttaaatttagtgctcagaatccacaagtcacggtctaaacacacttagaatactacagcataaatctgttagcattattgccaaataagacagttgggatccaaacccaagtcttgagcaatgtttttctcaaaaagctgctatccaatgatataggaaaatacattgtgttttcctaaacacacttttctttttaaatgtgcttcattgtttgatttggtcctgcctaaatttcacaagctaggccaatgaaggctgaatcaaagacatttcatccaccaatatcatgtgtagatattatgtatagaaaataaaataaattatggctctaacttctgtgttgctgtttatcttgttatttttcggcgttatactaatgtgtttattgagagcattttaccttccagacttctcatggctaacttttggtctgtattttgctccttagatgtgaatatttcttattagtctgcttcctgctacgcaatgactgcatttctatcatttctcagtttgttagtatatgtggatagtattctactgtataaatgattgcaaagtttatcaaaaacaaattattatatgtagcttttctacagtgctttgctaaaccatgtagtactagttaagtcttccttgaaaataaagatacactcttataggggacagttcctgttcactcccaggaaacttttttaaaagatgacactgaatgtttattgcactttagtgcagtgaagtggcaataaaacctaacatgaatcaaggttgtttatggcagatgcatgtgttgctttacagagtttagcaaaagctcttaattttatgtcatactgtattctactgaataataaagctaacattattcaataataaaatggaa

SEQ ID NO: 11770 - DNA, 4273 bp, Homo sapiens
  source 1..4273: mol_type = unassigned DNA
gggagagaggcgagacgagtgctctccccacacgtgtaaccctgcatctcccagtttcagagcttgcgttcattcatatgcaggcagtggtttaatatttgatcaaagctgcagattggatattgggaagcaaatttgggtgtgaaatcttcagcaaaggagcacgcagagtccatgatggctcagaccaagtgagtgagaggcagagcgaggacgcccctctgctctggcgcgcccggactcggactcgcagactcgcgctggctccagtctctccacgattctctctcccagacttttccccggtcttaagagatcctgtgtccagagggggccttagctgctccagcccgcgatgaggaaaagtccaggtctgtctgactgtctttgggcctggatcctccttctgagcacactgactggaagaagctatggacagccgtcattacaagatgaacttaaagacaataccactgtcttcaccaggattttggacagactcctagatggttatgacaatcgcctgagaccaggattgggagagcgtgtaaccgaagtgaagactgatatcttcgtcaccagtttcggacccgtttcagaccatgatatggaatatacaatagatgtatttttccgtcaaagctggaaggatgaaaggttaaaatttaaaggacctatgacagtcctccggttaaataacctaatggcaagtaaaatctggactccggacacatttttccacaatggaaagaagtcagtggcccacaacatgaccatgcccaacaaactcctgcggatcacagaggatggcaccttgctgtacaccatgaggctgacagtgagagctgaatgtccgatgcatttggaggacttccctatggatgcccatgcttgcccactaaaatttggaagttatgcttatacaagagcagaagttgtttatgaatggaccagagagccagcacgctcagtggttgtagcagaagatggatcacgtctaaaccagtatgaccttcttggacaaacagtagactctggaattgtccagtcaagtacaggagaatatgttgttatgaccactcatttccacttgaagagaaagattggctactttgttattcaaacatacctgccatgcataatgacagtgattctctcacaagtctccttctggctcaacagagagtctgtaccagcaagaactgtctttggagtaacaactgtgctcaccatgacaacattgagcatcagtgccagaaactccctccctaaggtggcttatgcaacagctatggattggtttattgccgtgtgctatgcctttgtgttctcagctctgattgagtttgccacagtaaactatttcactaagagaggttatgcatgggatggcaaaagtgtggttccagaaaagccaaagaaagtaaaggatcctcttattaagaaaaacaacacttacgctccaacagcaaccagctacacccctaatttggccaggggcgacccgggcttagccaccattgctaaaagtgcaaccatagaacctaaagaggtcaagcccgaaacaaaaccaccagaacccaagaaaacctttaacagtgtcagcaaaattgaccgactgtcaagaatagccttcccgctgctatttggaatctttaacttagtctactgggctacgtatttaaacagagagcctcagctaaaagcccccacaccacatcaatagatcttttactcacattctgttgttcagtcctctgcactgggaatttatttatgttctcaacgcagtaattcccatctgctttattgcctctgtcttaaagaatttgaaagtttccttattttcataattcatttaagaacaagagacccctgtctggcagtctggagcaaagcagactatgcagcttggagacaggattctgacagagcaagcgaaagagcaaagtcatgtcagaaggagacagaatgagagagaaaagagggggaagatggttcaaagatacaagaaaaagtagaaaaaaaaataacacttaactaaaacccctaggtcatttgtagatatatatttccaaatattctaaaaaagatactgtatatgtcaaaaatatttttatgtgaaggtgtttcaaagggtaaattataaatgtttcatgaagaaaaaattttaaaaatctacgtctttattacacaaactatggtgtgcttatgtttttgttttgctttttaaactgatgtatagctttaacattttgtttccaaagctgaagatccccattctttctctttgaaaaaaaaaaaggcctaatgcattattttgtcataaaatgctattttaaaattcatggaactttcatacgtaaaggtgcagttgctcattgtagagcacatttagtccaatgaagataaatgctttaaatagtttacttcactttcatctgagcttttaccactagactcaaggaagaataattttaacagacatgtatactccatagaaactaaactaaaatagtttaaaaatattccctttttcaccctattttcagatagcacatgagcccaacactcacttaattctcattatgaagatgtttttagaggggcaaaaatattttgcaagctctggaattgttgaatgtattcttttatataactacattaaaagctttagattgaaatttatgactagcaaacaaaaatagaatatataaacgatatatgtaaatatacagcatgagattgtacattttttacttttttaaaattgtgttcttaaaatattgtgtaagaatcactgcacttagctgttggaatgttgttaaatgctatggaaatacatttagaacctgcatttaagaacagaacagcaagtatgaaccacatggaacttaaaacatatgggtgtgaagtccacttatgtagacaaaacttataatttccaaactgttgtctagtatacagtgatcagttgctctctgttcaagtcattccacacatttccctattttaggctattataatatagaaagaaaatgggaagcattagttggagctagaaaatgaactgtatattattgctatatttgctaataccaactatttcaataagtgttgtaccatatgtagcattaaatataaaatacataaaagaatgtacagaaaatagcttttattgagtaatattacatttcatttatactgtagcaatatatttgtaggtatactatgtaagggctttaaataaaagaggtccattaatacttccttataaaaattctagtctgtttcattactgcccagatgttttagagataaatatttatgcagaaggtatttttgaagtctccttttgtctgatagagtttaacagatatttaaatttagtgctcagaatccacaagtcacggtctaaacacacttagaatactacagcataaatctgttagcattattgccaaataagacagttgggatccaaacccaagtcttgagcaatgtttttctcaaaaagctgctatccaatgatataggaaaatacattgtgttttcctaaacacacttttctttttaaatgtgcttcattgtttgatttggtcctgcctaaatttcacaagctaggccaatgaaggctgaatcaaagacatttcatccaccaatatcatgtgtagatattatgtatagaaaataaaataaattatggctctaacttctgtgttgctgtttatcttgttatttttcggcgttatactaatgtgtttattgagagcattttaccttccagacttctcatggctaacttttggtctgtattttgctccttagatgtgaatatttcttattagtctgcttcctgctacgcaatgactgcatttctatcatttctcagtttgttagtatatgtggatagtattctactgtataaatgattgcaaagtttatcaaaaacaaattattatatgtagcttttctacagtgctttgctaaaccatgtagtactagttaagtcttccttgaaaataaagatacactcttataggggacagttcctgttcactcccaggaaacttttttaaaagatgacactgaatgtttattgcactttagtgcagtgaagtggcaataaaacctaacatgaatcaaggttgtttatggcagatgcatgtgttgctttacagagtttagcaaaagctcttaattttatgtcatactgtattctactgaataataaagctaacattattcaataataaaatggaatacttgactc

SEQ ID NO: 11771 - DNA, 4087 bp, Homo sapiens
  source 1..4087: mol_type = unassigned DNA
gatacacagacagagctttgaacgtggcttttcctagctggagagacaggaatgttatagtcggggggggggggcggggggagacggggggagagagagagagagagaagaaggagagcgagcgagcgagcaagggagcgagcaggacaggagcctgatcccacagcagctgctccagcccgcgatgaggaaaagtccaggtctgtctgactgtctttgggcctggatcctccttctgagcacactgactggaagaagctatggacagccgtcattacaagatgaacttaaagacaataccactgtcttcaccaggattttggacagactcctagatggttatgacaatcgcctgagaccaggattgggagagcgtgtaaccgaagtgaagactgatatcttcgtcaccagtttcggacccgtttcagaccatgatatggaatatacaatagatgtatttttccgtcaaagctggaaggatgaaaggttaaaatttaaaggacctatgacagtcctccggttaaataacctaatggcaagtaaaatctggactccggacacatttttccacaatggaaagaagtcagtggcccacaacatgaccatgcccaacaaactcctgcggatcacagaggatggcaccttgctgtacaccatgaggctgacagtgagagctgaatgtccgatgcatttggaggacttccctatggatgcccatgcttgcccactaaaatttggaagttatgcttatacaagagcagaagttgtttatgaatggaccagagagccagcacgctcagtggttgtagcagaagatggatcacgtctaaaccagtatgaccttcttggacaaacagtagactctggaattgtccagtcaagtacaggagaatatgttgttatgaccactcatttccacttgaagagaaagattggctactttgttattcaaacatacctgccatgcataatgacagtgattctctcacaagtctccttctggctcaacagagagtctgtaccagcaagaactgtctttggagtaacaactgtgctcaccatgacaacattgagcatcagtgccagaaactccctccctaaggtggcttatgcaacagctatggattggtttattgccgtgtgctatgcctttgtgttctcagctctgattgagtttgccacagtaaactatttcactaagagaggttatgcatgggatggcaaaagtgtggttccagaaaagccaaagaaagtaaaggatcctcttattaagaaaaacaacacttacgctccaacagcaaccagctacacccctaatttggccaggggcgacccgggcttagccaccattgctaaaagtgcaaccatagaacctaaagaggtcaagcccgaaacaaaaccaccagaacccaagaaaacctttaacagtgtcagcaaaattgaccgactgtcaagaatagccttcccgctgctatttggaatctttaacttagtctactgggctacgtatttaaacagagagcctcagctaaaagcccccacaccacatcaatagatcttttactcacattctgttgttcagtcctctgcactgggaatttatttatgttctcaacgcagtaattcccatctgctttattgcctctgtcttaaagaatttgaaagtttccttattttcataattcatttaagaacaagagacccctgtctggcagtctggagcaaagcagactatgcagcttggagacaggattctgacagagcaagcgaaagagcaaagtcatgtcagaaggagacagaatgagagagaaaagagggggaagatggttcaaagatacaagaaaaagtagaaaaaaaaataacacttaactaaaacccctaggtcatttgtagatatatatttccaaatattctaaaaaagatactgtatatgtcaaaaatatttttatgtgaaggtgtttcaaagggtaaattataaatgtttcatgaagaaaaaattttaaaaatctacgtctttattacacaaactatggtgtgcttatgtttttgttttgctttttaaactgatgtatagctttaacattttgtttccaaagctgaagatccccattctttctctttgaaaaaaaaaaaggcctaatgcattattttgtcataaaatgctattttaaaattcatggaactttcatacgtaaaggtgcagttgctcattgtagagcacatttagtccaatgaagataaatgctttaaatagtttacttcactttcatctgagcttttaccactagactcaaggaagaataattttaacagacatgtatactccatagaaactaaactaaaatagtttaaaaatattccctttttcaccctattttcagatagcacatgagcccaacactcacttaattctcattatgaagatgtttttagaggggcaaaaatattttgcaagctctggaattgttgaatgtattcttttatataactacattaaaagctttagattgaaatttatgactagcaaacaaaaatagaatatataaacgatatatgtaaatatacagcatgagattgtacattttttacttttttaaaattgtgttcttaaaatattgtgtaagaatcactgcacttagctgttggaatgttgttaaatgctatggaaatacatttagaacctgcatttaagaacagaacagcaagtatgaaccacatggaacttaaaacatatgggtgtgaagtccacttatgtagacaaaacttataatttccaaactgttgtctagtatacagtgatcagttgctctctgttcaagtcattccacacatttccctattttaggctattataatatagaaagaaaatgggaagcattagttggagctagaaaatgaactgtatattattgctatatttgctaataccaactatttcaataagtgttgtaccatatgtagcattaaatataaaatacataaaagaatgtacagaaaatagcttttattgagtaatattacatttcatttatactgtagcaatatatttgtaggtatactatgtaagggctttaaataaaagaggtccattaatacttccttataaaaattctagtctgtttcattactgcccagatgttttagagataaatatttatgcagaaggtatttttgaagtctccttttgtctgatagagtttaacagatatttaaatttagtgctcagaatccacaagtcacggtctaaacacacttagaatactacagcataaatctgttagcattattgccaaataagacagttgggatccaaacccaagtcttgagcaatgtttttctcaaaaagctgctatccaatgatataggaaaatacattgtgttttcctaaacacacttttctttttaaatgtgcttcattgtttgatttggtcctgcctaaatttcacaagctaggccaatgaaggctgaatcaaagacatttcatccaccaatatcatgtgtagatattatgtatagaaaataaaataaattatggctctaacttctgtgttgctgtttatcttgttatttttcggcgttatactaatgtgtttattgagagcattttaccttccagacttctcatggctaacttttggtctgtattttgctccttagatgtgaatatttcttattagtctgcttcctgctacgcaatgactgcatttctatcatttctcagtttgttagtatatgtggatagtattctactgtataaatgattgcaaagtttatcaaaaacaaattattatatgtagcttttctacagtgctttgctaaaccatgtagtactagttaagtcttccttgaaaataaagatacactcttataggggacagttcctgttcactcccaggaaacttttttaaaagatgacactgaatgtttattgcactttagtgcagtgaagtggcaataaaacctaacatgaatcaaggttgtttatggcagatgcatgtgttgctttacagagtttagcaaaagctcttaattttatgtcatactgtattctactgaataataaagctaacattattcaataataaaa

SEQ ID NO: 11772 - DNA, 4223 bp, Homo sapiens
  source 1..4223: mol_type = unassigned DNA
agcttaaaaattttaatgcacagttcactgtggaaactgaaatcttaaaagtccaaatatttagatgataaacaacaagaagagaataaaccaaactatattctaaatataaaacctagagataaacaactcacagtttttatgttgagcaatactgtcacctgaaagcgtttcagcttgtattcttttacaggagaataaggacactgatatatttctgaatggagaaatggaagggaaagtggagaatggatggtccaggtttccattgcttccaatgaggtgtcatatcccagtgagctgctccagcccgcgatgaggaaaagtccaggtctgtctgactgtctttgggcctggatcctccttctgagcacactgactggaagaagctatggacagccgtcattacaagatgaacttaaagacaataccactgtcttcaccaggattttggacagactcctagatggttatgacaatcgcctgagaccaggattgggagagcgtgtaaccgaagtgaagactgatatcttcgtcaccagtttcggacccgtttcagaccatgatatggaatatacaatagatgtatttttccgtcaaagctggaaggatgaaaggttaaaatttaaaggacctatgacagtcctccggttaaataacctaatggcaagtaaaatctggactccggacacatttttccacaatggaaagaagtcagtggcccacaacatgaccatgcccaacaaactcctgcggatcacagaggatggcaccttgctgtacaccatgaggctgacagtgagagctgaatgtccgatgcatttggaggacttccctatggatgcccatgcttgcccactaaaatttggaagttatgcttatacaagagcagaagttgtttatgaatggaccagagagccagcacgctcagtggttgtagcagaagatggatcacgtctaaaccagtatgaccttcttggacaaacagtagactctggaattgtccagtcaagtacaggagaatatgttgttatgaccactcatttccacttgaagagaaagattggctactttgttattcaaacatacctgccatgcataatgacagtgattctctcacaagtctccttctggctcaacagagagtctgtaccagcaagaactgtctttggagtaacaactgtgctcaccatgacaacattgagcatcagtgccagaaactccctccctaaggtggcttatgcaacagctatggattggtttattgccgtgtgctatgcctttgtgttctcagctctgattgagtttgccacagtaaactatttcactaagagaggttatgcatgggatggcaaaagtgtggttccagaaaagccaaagaaagtaaaggatcctcttattaagaaaaacaacacttacgctccaacagcaaccagctacacccctaatttggccaggggcgacccgggcttagccaccattgctaaaagtgcaaccatagaacctaaagaggtcaagcccgaaacaaaaccaccagaacccaagaaaacctttaacagtgtcagcaaaattgaccgactgtcaagaatagccttcccgctgctatttggaatctttaacttagtctactgggctacgtatttaaacagagagcctcagctaaaagcccccacaccacatcaatagatcttttactcacattctgttgttcagtcctctgcactgggaatttatttatgttctcaacgcagtaattcccatctgctttattgcctctgtcttaaagaatttgaaagtttccttattttcataattcatttaagaacaagagacccctgtctggcagtctggagcaaagcagactatgcagcttggagacaggattctgacagagcaagcgaaagagcaaagtcatgtcagaaggagacagaatgagagagaaaagagggggaagatggttcaaagatacaagaaaaagtagaaaaaaaaataacacttaactaaaacccctaggtcatttgtagatatatatttccaaatattctaaaaaagatactgtatatgtcaaaaatatttttatgtgaaggtgtttcaaagggtaaattataaatgtttcatgaagaaaaaattttaaaaatctacgtctttattacacaaactatggtgtgcttatgtttttgttttgctttttaaactgatgtatagctttaacattttgtttccaaagctgaagatccccattctttctctttgaaaaaaaaaaaggcctaatgcattattttgtcataaaatgctattttaaaattcatggaactttcatacgtaaaggtgcagttgctcattgtagagcacatttagtccaatgaagataaatgctttaaatagtttacttcactttcatctgagcttttaccactagactcaaggaagaataattttaacagacatgtatactccatagaaactaaactaaaatagtttaaaaatattccctttttcaccctattttcagatagcacatgagcccaacactcacttaattctcattatgaagatgtttttagaggggcaaaaatattttgcaagctctggaattgttgaatgtattcttttatataactacattaaaagctttagattgaaatttatgactagcaaacaaaaatagaatatataaacgatatatgtaaatatacagcatgagattgtacattttttacttttttaaaattgtgttcttaaaatattgtgtaagaatcactgcacttagctgttggaatgttgttaaatgctatggaaatacatttagaacctgcatttaagaacagaacagcaagtatgaaccacatggaacttaaaacatatgggtgtgaagtccacttatgtagacaaaacttataatttccaaactgttgtctagtatacagtgatcagttgctctctgttcaagtcattccacacatttccctattttaggctattataatatagaaagaaaatgggaagcattagttggagctagaaaatgaactgtatattattgctatatttgctaataccaactatttcaataagtgttgtaccatatgtagcattaaatataaaatacataaaagaatgtacagaaaatagcttttattgagtaatattacatttcatttatactgtagcaatatatttgtaggtatactatgtaagggctttaaataaaagaggtccattaatacttccttataaaaattctagtctgtttcattactgcccagatgttttagagataaatatttatgcagaaggtatttttgaagtctccttttgtctgatagagtttaacagatatttaaatttagtgctcagaatccacaagtcacggtctaaacacacttagaatactacagcataaatctgttagcattattgccaaataagacagttgggatccaaacccaagtcttgagcaatgtttttctcaaaaagctgctatccaatgatataggaaaatacattgtgttttcctaaacacacttttctttttaaatgtgcttcattgtttgatttggtcctgcctaaatttcacaagctaggccaatgaaggctgaatcaaagacatttcatccaccaatatcatgtgtagatattatgtatagaaaataaaataaattatggctctaacttctgtgttgctgtttatcttgttatttttcggcgttatactaatgtgtttattgagagcattttaccttccagacttctcatggctaacttttggtctgtattttgctccttagatgtgaatatttcttattagtctgcttcctgctacgcaatgactgcatttctatcatttctcagtttgttagtatatgtggatagtattctactgtataaatgattgcaaagtttatcaaaaacaaattattatatgtagcttttctacagtgctttgctaaaccatgtagtactagttaagtcttccttgaaaataaagatacactcttataggggacagttcctgttcactcccaggaaacttttttaaaagatgacactgaatgtttattgcactttagtgcagtgaagtggcaataaaacctaacatgaatcaaggttgtttatggcagatgcatgtgttgctttacagagtttagcaaaagctcttaattttatgtcatactgtattctactgaataataaagctaacattattcaataataaaatggaa

SEQ ID NO: 11773 - DNA, 583 bp, Homo sapiens
  source 1..583: mol_type = unassigned DNA
atatttctgaatggagaaatggaagggaaagtggagaatggatggtccaggtttccattgcttccaatgaggtgtcatatcccagtgaggtcatttcctgacttcaaagcattcatctaaactgcctcagtcagccctggtggttataacctgatgtttcttgctagagacattgatctctacttattctacttttcagctgctccagcccgcgatgaggaaaagtccaggtctgtctgactgtctttgggcctggatcctccttctgagcacactgactggaagaagctatggacagccgtcattacaagatgaacttaaagacaataccactgtcttcaccaggattttggacagactcctagatggttatgacaatcgcctgagaccaggattgggagagcgtgtaaccgaagtgaagactgatatcttcgtcaccagtttcggacccgtttcagaccatgatatggaatatacaatagatgtatttttccgtcaaagctggaaggatgaaaggttaaaatttaaaggacctatgacagtcctccggttaaataacctaatggcaagtaaaatctggact

SEQ ID NO: 11774 - DNA, 2770 bp, Homo sapiens
  source 1..2770: mol_type = unassigned DNA
aaacgcgtcgtttcgcagcacttgatcggaacccggctgcctctaagacttggtcttgggcaaccgtgggtgggcaggaagggaaattatttattttattttgttaaggggagtgaagaaaagaagacgtgaggaccgcagttcactgtaatgtagagtaattgcaaaagtgggctgcctgcccctagcttttcccgctgtggttgcggaggtggtcttggttgagggggttgtggcgtgaagtacccatctctcctctcctctcctttcctcccctcccctccaacccattccctttccagctgctatgccagtttaaagtccagggtgttattattacgtgtgcgcaaaacagtgtttgctgacgatgaggctgggggacgttcctggcagagagaagtctgattacttggtcatcttgctgttaaagaaagaaagaaagaaaaaaagaaagaaagaaacagaaaggaaaagggtgggggtgggggtccataaaaaagaaatcgtctctcaatcatcaagtcctacacagagtccaggaagtaatctccatagctttaacacgaatccctaactaaaaggatattctttggggttacttggatagtgaaactgaaggcaattttaagtgtattttgtttttcattccatggctttgtaaagagcggcggtgatgaagacaaaattgaacatctacaacatgcagttcctgctttttgttttcttggtgtgggaccctgccaggttggtgctggctaacatccaagaagatgaggctaaaaataacattaccatctttacgagaattcttgacagacttctggatggttacgataatcggcttagaccaggactgggagacagtattactgaagtcttcactaacatctacgtgaccagttttggccctgtctcagatacagatatggaatatacaattgatgttttctttcgacaaaaatggaaagatgaacgtttaaaatttaaaggtcctatgaatatccttcgactaaacaatttaatggctagcaaaatctggactccagataccttttttcacaatgggaaaaaatcagtagctcataatatgacaatgccaaataagttgcttcgaattcaggatgatgggactctgctgtataccatgaggcttacagttcaagctgaatgcccaatgcacttggaggatttcccaatggatgctcattcatgtcctctgaaatttggcagctatgcatatacaacttcagaggtcacttatatttggacttacaatgcatctgattcagtacaggttgctcctgatggctctaggttaaatcaatatgacctgctgggccaatcaatcggaaaggagacaattaaatccagtacaggtgaatatactgtaatgacagctcatttccacctgaaaagaaaaattgggtattttgtgattcaaacctatctgccttgcatcatgactgtcattctctcccaagtttcattctggcttaacagagaatctgtgcctgcaagaactgtgtttggagtaacaactgtcctaacaatgacaactctaagcatcagtgctcggaattctctccccaaagtggcttatgcaactgccatggactggtttattgctgtttgttatgcatttgtgttctctgccctaattgaatttgcaactgttaattacttcaccaaaagaggatgggcttgggatgggaagagtgtagtaaatgacaagaaaaaagaaaaggcttccgttatgatacagaacaacgcttatgcagtggctgttgccaattatgccccgaatctttcaaaagatccagttctctccaccatctccaagagtgcaaccacgccagaacccaacaagaagccagaaaacaagccagctgaagcaaagaaaactttcaacagtgttagcaaaattgacagaatgtccagaatagtttttccagttttgtttggtacctttaatttagtttactgggctacatatttaaacagagaacctgtattaggggtcagtccttgaattgagacccatgttatctttgggatgtatagcaacattaaatttggtttgttttgctatgtacagtctgactaataactgctaatttgtgatccaacatgtacagtatgtatatagtgacatagcttaccagtagacctttaatggagacatgcatttgctaactcatggaactgcagacagaaagcactccatgcgaaaacagccattgccttttttaaagatttaccctaggacctgatttaaagtgaatttcaagtgacctgattaatttcctattcttccaaatgagatgaaaatggggatcctgtacaaccctttgtggacccttttggtttagctcttaagtaggggtattttctactgttgcttaattatgatggaagataacattgtcattcctagatgaatcctttgaagtaacaaacattgtatctgacatcagctctgttcatgagtgctcagagtccctgctaatgtaattggaagcttggtacacataagaaaaactagagatttgaaatcagctatgaattactctatatagtatctatagccatgtacatattacagcatgacaagctcaaataattatgagtcagcccgaaaggatgttaattatgcctacgatgtaataactattggaatgtcatggtcattacatttttagcttcagagtttatttgaaagtaataattgaaatcctacaatttattttaatcattggaaactaccttaatt

SEQ ID NO: 11775 - DNA, 2525 bp, Homo sapiens
  source 1..2525: mol_type = unassigned DNA
cctagcgctcctctccggcttccaccagcccatcgctccacgctctcttggctgctgcagtctcggtctctctctctctctctctctctctctctctctctctctctctctctctctctctctctcccaagtttcctatctcgtcaagatcagggcaaaaggaagaaaacaccgaattctgcttgccgtttcagagcggcggtgatgaagacaaaattgaacatctacaacatgcagttcctgctttttgttttcttggtgtgggaccctgccaggttggtgctggctaacatccaagaagatgaggctaaaaataacattaccatctttacgagaattcttgacagacttctggatggttacgataatcggcttagaccaggactgggagacagtattactgaagtcttcactaacatctacgtgaccagttttggccctgtctcagatacagatatggaatatacaattgatgttttctttcgacaaaaatggaaagatgaacgtttaaaatttaaaggtcctatgaatatccttcgactaaacaatttaatggctagcaaaatctggactccagataccttttttcacaatgggaaaaaatcagtagctcataatatgacaatgccaaataagttgcttcgaattcaggatgatgggactctgctgtataccatgaggcttacagttcaagctgaatgcccaatgcacttggaggatttcccaatggatgctcattcatgtcctctgaaatttggcagctatgcatatacaacttcagaggtcacttatatttggacttacaatgcatctgattcagtacaggttgctcctgatggctctaggttaaatcaatatgacctgctgggccaatcaatcggaaaggagacaattaaatccagtacaggtgaatatactgtaatgacagctcatttccacctgaaaagaaaaattgggtattttgtgattcaaacctatctgccttgcatcatgactgtcattctctcccaagtttcattctggcttaacagagaatctgtgcctgcaagaactgtgtttggagtaacaactgtcctaacaatgacaactctaagcatcagtgctcggaattctctccccaaagtggcttatgcaactgccatggactggtttattgctgtttgttatgcatttgtgttctctgccctaattgaatttgcaactgttaattacttcaccaaaagaggatgggcttgggatgggaagagtgtagtaaatgacaagaaaaaagaaaaggcttccgttatgatacagaacaacgcttatgcagtggctgttgccaattatgccccgaatctttcaaaagatccagttctctccaccatctccaagagtgcaaccacgccagaacccaacaagaagccagaaaacaagccagctgaagcaaagaaaactttcaacagtgttagcaaaattgacagaatgtccagaatagtttttccagttttgtttggtacctttaatttagtttactgggctacatatttaaacagagaacctgtattaggggtcagtccttgaattgagacccatgttatctttgggatgtatagcaacattaaatttggtttgttttgctatgtacagtctgactaataactgctaatttgtgatccaacatgtacagtatgtatatagtgacatagcttaccagtagacctttaatggagacatgcatttgctaactcatggaactgcagacagaaagcactccatgcgaaaacagccattgccttttttaaagatttaccctaggacctgatttaaagtgaatttcaagtgacctgattaatttcctattcttccaaatgagatgaaaatggggatcctgtacaaccctttgtggacccttttggtttagctcttaagtaggggtattttctactgttgcttaattatgatggaagataacattgtcattcctagatgaatcctttgaagtaacaaacattgtatctgacatcagctctgttcatgagtgctcagagtccctgctaatgtaattggaagcttggtacacataagaaaaactagagatttgaaatcagctatgaattactctatatagtatctatagccatgtacatattacagcatgacaagctcaaataattatgagtcagcccgaaaggatgttaattatgcctacgatgtaataactattggaatgtcatggtcattacatttttagcttcagagtttatttgaaagtaataattgaaatcctacaatttattttaatcattggaaactaccttaattaaaaaaaaagaaaagaaatgtgtcttaacatttccaggtatgtgttgtattgaaattgatcagctaaattttacgggtgctggagactggaaaaagcatccagtttggttgctgtggagcaacatgcatattggattagaaaattgtgccaaaaactcccactgatgagaattcataggtgccccacactatgacaaacacttatatgattctcctctttcctg

SEQ ID NO: 11776 - DNA, 596 bp, Homo sapiens
  source 1..596: mol_type = unassigned DNA
agcacttgatcggaacccggctgcctctaagacttggtcttgggcaaccgtgggtgggcaggaagggaaattatttattttattttgttaaggggagtgaagaaaagaagacgtgaggaccgcagttcactagcggcggtgatgaagacaaaattgaacatctacaacatgcagttcctgctttttgttttcttggtgtgggaccctgccaggttggtgctggctaacatccaagaagatgaggctaaaaataacattaccatctttacgagaattcttgacagacttctggatggttacgataatcggcttagaccaggactgggagacagtattactgaagtcttcactaacatctacgtgaccagttttggccctgtctcagatacagatatggaatatacaattgatgttttctttcgacaaaaatggaaagatgaacgtttaaaatttaaaggtcctatgaatatccttcgactaaacaatttaatggctagcaaaatctggactccagataccttttttcacaatgggaaaaaatcagtagctcataatatgacaatgccaaataagttgcttcgaattcaggatgatgg

SEQ ID NO: 11777 - DNA, 582 bp, Homo sapiens
  source 1..582: mol_type = unassigned DNA
gtcaaacgcgtcgtttcgcagcacttgatcggaacccggctgcctctaagacttggtcttgggcaaccgtgggtgggcaggaagggaaattatttattttattttgttaaggggagtgaagaaaagaagacgtgaggaccgcagttcactgtaatgtagaagcggcggtgatgaagacaaaattgaacatctacaacatgcagttcctgctttttgttttcttggtgtgggaccctgccaggttggtgctggctaacatccaagaagatgaggctaaaaataacattaccatctttacgagaattcttgacagacttctggatggttacgataatcggcttagaccaggactgggagacagtattactgaagtcttcactaacatctacgtgaccagttttggccctgtctcagatacagatatggaatatacaattgatgttttctttcgacaaaaatggaaagatgaacgtttaaaatttaaaggtcctatgaatatccttcgactaaacaatttaatggctagcaaaatctggactccagataccttttttcacaatgggaaaaaatcagtagctcata

SEQ ID NO: 11778 - DNA, 1562 bp, Homo sapiens
  source 1..1562: mol_type = unassigned DNA
ggcggtgatgaagacaaaattgaacatctacaacatgcagttcctgctttttgttttcttggtgtgggaccctgccaggttggtgctggctaacatccaagaagatgaggctaaaaataacattaccatctttacgagaattcttgacagacttctggatggttacgataatcggcttagaccaggactgggagacagtattactgaagtcttcactaacatctacgtgaccagttttggccctgtctcagatacagatatggaatatacaattgatgttttctttcgacaaaaatggaaagatgaacgtttaaaatttaaaggtcctatgaatatccttcgactaaacaatttaatggctagcaaaatctggactccagataccttttttcacaatgggaaaaaatcagtagctcataatatgacaatgccaaataagttgcttcgaattcaggatgatgggactctgctgtataccatgaggcttacagttcaagctgaatgcccaatgcacttggaggatttcccaatggatgctcattcatgtcctctgaaatttggcagctatgcatatacaacttcagaggtcacttatatttggacttacaatgcatctgattcagtacaggttgctcctgatggctctaggttaaatcaatatgacctgctgggccaatcaatcggaaaggagacaattaaatccagtacaggtgaatatactgtaatgacagctcatttccacctgaaaagaaaaattgggtattttgtgattcaaacctatctgccttgcatcatgactgtcattctctcccaagtttcattctggcttaacagagaatctgtgcctgcaagaactgtgtttggagtaacaactgtcctaacaatgacaactctaagcatcagtgctcggaattctctccccaaagtggcttatgcaactgccatggactggtttattgctgtttgttatgcatttgtgttctctgccctaattgaatttgcaactgttaattacttcaccaaaagaggatgggcttgggatgggaagagtgtagtaaatgacaagtccccttcaataaaagctgaaggcattacattaacatacaactcagtgaaagcaattcttcaaggagctaagctaatatggtccaagtatatagctttctcatggcccagtttattccaagaaaagactttagagtacttagagaagtggatggactgtttaaccttcaaacaatcttctaaaaaagaaaaggcttccgttatgatacagaacaacgcttatgcagtggctgttgccaattatgccccgaatctttcaaaagatccagttctctccaccatctccaagagtgcaaccacgccagaacccaacaagaagccagaaaacaagccagctgaagcaaagaaaactttcaacagtgttagcaaaattgacagaatgtccagaatagtttttccagttttgtttggtacctttaatttagtttactgggctacatatttaaacagagaacctgtattaggggtcagtccttgaattgagacccatgttatct

SEQ ID NO: 11779 - DNA, 3411 bp, Homo sapiens
  source 1..3411: mol_type = unassigned DNA
gagaacaagctttagagatgataaaagcacagtatcttggcaaccttttgtgttgggttatttttaaaaaatggataatattgtgctctagttctcatttattcagctacttgctgagtgatagcaacattacaactacagaacctgtatgtcatcttgacattagcggcggtgatgaagacaaaattgaacatctacaacatgcagttcctgctttttgttttcttggtgtgggaccctgccaggttggtgctggctaacatccaagaagatgaggctaaaaataacattaccatctttacgagaattcttgacagacttctggatggttacgataatcggcttagaccaggactgggagacagtattactgaagtcttcactaacatctacgtgaccagttttggccctgtctcagatacagatatggaatatacaattgatgttttctttcgacaaaaatggaaagatgaacgtttaaaatttaaaggtcctatgaatatccttcgactaaacaatttaatggctagcaaaatctggactccagataccttttttcacaatgggaaaaaatcagtagctcataatatgacaatgccaaataagttgcttcgaattcaggatgatgggactctgctgtataccatgaggcttacagttcaagctgaatgcccaatgcacttggaggatttcccaatggatgctcattcatgtcctctgaaatttggcagctatgcatatacaacttcagaggtcacttatatttggacttacaatgcatctgattcagtacaggttgctcctgatggctctaggttaaatcaatatgacctgctgggccaatcaatcggaaaggagacaattaaatccagtacaggtgaatatactgtaatgacagctcatttccacctgaaaagaaaaattgggtattttgtgattcaaacctatctgccttgcatcatgactgtcattctctcccaagtttcattctggcttaacagagaatctgtgcctgcaagaactgtgtttggagtaacaactgtcctaacaatgacaactctaagcatcagtgctcggaattctctccccaaagtggcttatgcaactgccatggactggtttattgctgtttgttatgcatttgtgttctctgccctaattgaatttgcaactgttaattacttcaccaaaagaggatgggcttgggatgggaagagtgtagtaaatgacaagaaaaaagaaaaggcttccgttatgatacagaacaacgcttatgcagtggctgttgccaattatgccccgaatctttcaaaagatccagttctctccaccatctccaagagtgcaaccacgccagaacccaacaagaagccagaaaacaagccagctgaagcaaagaaaactttcaacagtgttagcaaaattgacagaatgtccagaatagtttttccagttttgtttggtacctttaatttagtttactgggctacatatttaaacagagaacctgtattaggggtcagtccttgaattgagacccatgttatctttgggatgtatagcaacattaaatttggtttgttttgctatgtacagtctgactaataactgctaatttgtgatccaacatgtacagtatgtatatagtgacatagcttaccagtagacctttaatggagacatgcatttgctaactcatggaactgcagacagaaagcactccatgcgaaaacagccattgccttttttaaagatttaccctaggacctgatttaaagtgaatttcaagtgacctgattaatttcctattcttccaaatgagatgaaaatggggatcctgtacaaccctttgtggacccttttggtttagctcttaagtaggggtattttctactgttgcttaattatgatggaagataacattgtcattcctagatgaatcctttgaagtaacaaacattgtatctgacatcagctctgttcatgagtgctcagagtccctgctaatgtaattggaagcttggtacacataagaaaaactagagatttgaaatcagctatgaattactctatatagtatctatagccatgtacatattacagcatgacaagctcaaataattatgagtcagcccgaaaggatgttaattatgcctacgatgtaataactattggaatgtcatggtcattacatttttagcttcagagtttatttgaaagtaataattgaaatcctacaatttattttaatcattggaaactaccttaattaaaaaaaaagaaaagaaatgtgtcttaacatttccaggtatgtgttgtattgaaattgatcagctaaattttacgggtgctggagactggaaaaagcatccagtttggttgctgtggagcaacatgcatattggattagaaaattgtgccaaaaactcccactgatgagaattcataggtgccccacactatgacaaacacttatatgattctcctctttcctgtttactgcaaattctgccttaaggcttcttttcaagactcagaagccactaattataaaggaaagggcagttaattggcacatttttctcttgtgaaagcagttctttcagataagaattaatgtaaatctgcttttgtaaattgcaactttaaatttcgctgactcaaatttacaacagctttgtataccagaagaggttttggtaagggttgaacatttttacactgcaactttaaaacatcaccaatagattgtggattatttcacgtgcacaaacatacacacacacacacacacacacacacatacacagctaaattagaaaacacaattttaaattttatataattactagttattaatgggtaaaattcatttttcttttaatatcttaaaatattatttatgccccgaaatatgctaataaaagttaaagattgtgtattatgcctagattcaaagtttttggcaaacttcaaatacttttgattgacatgtacattagcagttattagttgacttttactaaaacatgcacctttacgatggtgtttttgtagaaacataagtagtcaaatagtaacatttattgcagttttgtacagtatttgagtatagtgcataaataggtatgttcataaaatcaataaaaggagtatctatggaaataagcaaaatatcagcaaaaattgctattcctttgcctcatttaatttttaaaatttctttgtttccatgtgattctattatatgctttgcatgcttgtataaaaccaaggtcacaaatgcaacttattaacggaatttgccaagaagacagccttgacattaaaaattccctcacaagaggtaatccataatccttaataaaataaaattgttacatgagccaataaatgtatttctttaattcc

SEQ ID NO: 11780 - DNA, 3401 bp, Homo sapiens
  source 1..3401: mol_type = unassigned DNA
tcaaacgcgtcgtttcgcagcacttgatcggaacccggctgcctctaagacttggtcttgggcaaccgtgggtgggcaggaagggaaattatttattttattttgttaaggggagtgaagaaaagaagacgtgaggaccgcagttcactgtaatgtagagtaattgcaaaaagcggcggtgatgaagacaaaattgaacatctacaacatgcagttcctgctttttgttttcttggtgtgggaccctgccaggttggtgctggctaacatccaagaagatgaggctaaaaataacattaccatctttacgagaattcttgacagacttctggatggttacgataatcggcttagaccaggactgggagacagtattactgaagtcttcactaacatctacgtgaccagttttggccctgtctcagatacagatatggaatatacaattgatgttttctttcgacaaaaatggaaagatgaacgtttaaaatttaaaggtcctatgaatatccttcgactaaacaatttaatggctagcaaaatctggactccagataccttttttcacaatgggaaaaaatcagtagctcataatatgacaatgccaaataagttgcttcgaattcaggatgatgggactctgctgtataccatgaggcttacagttcaagctgaatgcccaatgcacttggaggatttcccaatggatgctcattcatgtcctctgaaatttggcagctatgcatatacaacttcagaggtcacttatatttggacttacaatgcatctgattcagtacaggttgctcctgatggctctaggttaaatcaatatgacctgctgggccaatcaatcggaaaggagacaattaaatccagtacaggtgaatatactgtaatgacagctcatttccacctgaaaagaaaaattgggtattttgtgattcaaacctatctgccttgcatcatgactgtcattctctcccaagtttcattctggcttaacagagaatctgtgcctgcaagaactgtgtttggagtaacaactgtcctaacaatgacaactctaagcatcagtgctcggaattctctccccaaagtggcttatgcaactgccatggactggtttattgctgtttgttatgcatttgtgttctctgccctaattgaatttgcaactgttaattacttcaccaaaagaggatgggcttgggatgggaagagtgtagtaaatgacaagaaaaaagaaaaggcttccgttatgatacagaacaacgcttatgcagtggctgttgccaattatgccccgaatctttcaaaagatccagttctctccaccatctccaagagtgcaaccacgccagaacccaacaagaagccagaaaacaagccagctgaagcaaagaaaactttcaacagtgttagcaaaattgacagaatgtccagaatagtttttccagttttgtttggtacctttaatttagtttactgggctacatatttaaacagagaacctgtattaggggtcagtccttgaattgagacccatgttatctttgggatgtatagcaacattaaatttggtttgttttgctatgtacagtctgactaataactgctaatttgtgatccaacatgtacagtatgtatatagtgacatagcttaccagtagacctttaatggagacatgcatttgctaactcatggaactgcagacagaaagcactccatgcgaaaacagccattgccttttttaaagatttaccctaggacctgatttaaagtgaatttcaagtgacctgattaatttcctattcttccaaatgagatgaaaatggggatcctgtacaaccctttgtggacccttttggtttagctcttaagtaggggtattttctactgttgcttaattatgatggaagataacattgtcattcctagatgaatcctttgaagtaacaaacattgtatctgacatcagctctgttcatgagtgctcagagtccctgctaatgtaattggaagcttggtacacataagaaaaactagagatttgaaatcagctatgaattactctatatagtatctatagccatgtacatattacagcatgacaagctcaaataattatgagtcagcccgaaaggatgttaattatgcctacgatgtaataactattggaatgtcatggtcattacatttttagcttcagagtttatttgaaagtaataattgaaatcctacaatttattttaatcattggaaactaccttaattaaaaaaaaagaaaagaaatgtgtcttaacatttccaggtatgtgttgtattgaaattgatcagctaaattttacgggtgctggagactggaaaaagcatccagtttggttgctgtggagcaacatgcatattggattagaaaattgtgccaaaaactcccactgatgagaattcataggtgccccacactatgacaaacacttatatgattctcctctttcctgtttactgcaaattctgccttaaggcttcttttcaagactcagaagccactaattataaaggaaagggcagttaattggcacatttttctcttgtgaaagcagttctttcagataagaattaatgtaaatctgcttttgtaaattgcaactttaaatttcgctgactcaaatttacaacagctttgtataccagaagaggttttggtaagggttgaacatttttacactgcaactttaaaacatcaccaatagattgtggattatttcacgtgcacaaacatacacacacacacacacacacacacacatacacagctaaattagaaaacacaattttaaattttatataattactagttattaatgggtaaaattcatttttcttttaatatcttaaaatattatttatgccccgaaatatgctaataaaagttaaagattgtgtattatgcctagattcaaagtttttggcaaacttcaaatacttttgattgacatgtacattagcagttattagttgacttttactaaaacatgcacctttacgatggtgtttttgtagaaacataagtagtcaaatagtaacatttattgcagttttgtacagtatttgagtatagtgcataaataggtatgttcataaaatcaataaaaggagtatctatggaaataagcaaaatatcagcaaaaattgctattcctttgcctcatttaatttttaaaatttctttgtttccatgtgattctattatatgctttgcatgcttgtataaaaccaaggtcacaaatgcaacttattaacggaatttgccaagaagacagccttgacattaaaaattccctcacaagaggtaatccataatccttaataaaataaaattgttacatgagccaataaa

SEQ ID NO: 11781 - DNA, 2366 bp, Homo sapiens
  source 1..2366: mol_type = unassigned DNA
aagcggcctcggggagcagcccgaggctgcgcgtgggctccgctcctccggcgaggtgtgggcgaggggagcggcgctccgagcgcacccaggcgcccgacgccgcccgggtctgcgccgctgctagtgccaggcgggcgacgagcggcggtgatgaagacaaaattgaacatctacaacatgcagttcctgctttttgttttcttggtgtgggaccctgccaggttggtgctggctaacatccaagaagatgaggctaaaaataacattaccatctttacgagaattcttgacagacttctggatggttacgataatcggcttagaccaggactgggagacagtattactgaagtcttcactaacatctacgtgaccagttttggccctgtctcagatacagatatggaatatacaattgatgttttctttcgacaaaaatggaaagatgaacgtttaaaatttaaaggtcctatgaatatccttcgactaaacaatttaatggctagcaaaatctggactccagataccttttttcacaatgggaaaaaatcagtagctcataatatgacaatgccaaataagttgcttcgaattcaggatgatgggactctgctgtataccatgaggcttacagttcaagctgaatgcccaatgcacttggaggatttcccaatggatgctcattcatgtcctctgaaatttggcagctatgcatatacaacttcagaggtcacttatatttggacttacaatgcatctgattcagtacaggttgctcctgatggctctaggttaaatcaatatgacctgctgggccaatcaatcggaaaggagacaattaaatccagtacaggtgaatatactgtaatgacagctcatttccacctgaaaagaaaaattgggtattttgtgattcaaacctatctgccttgcatcatgactgtcattctctcccaagtttcattctggcttaacagagaatctgtgcctgcaagaactgtgtttggagtaacaactgtcctaacaatgacaactctaagcatcagtgctcggaattctctccccaaagtggcttatgcaactgccatggactggtttattgctgtttgttatgcatttgtgttctctgccctaattgaatttgcaactgttaattacttcaccaaaagaggatgggcttgggatgggaagagtgtagtaaatgacaaggtaagtgagagcttccgtgttatcattattaagaaaataccctaatgaattccgcttgtaacagatatgtttctaaaaactgacattaaagacatccatatatatatgaatttgaatcatatcaatttcttttaaagtgttcttgcctgaaatcctttaggagttcttgtagtactaatacttccattaaaaccactccgtagcatctgttgagctgtatgtgtcaggcactgtgctaagtgttttacatatgctctctcacataatctttatagcatccttatgactagactgccttcttattcttatttttactcatgaagaatctgaagcagtaaagttattttcttgcccaagcttacacaacttgttagtaagtatacttgaactccgatctacctgtctgactgttaagttcatggttttaacaccacactgcattattataaagagattagaaaaagaaaatgggcattaattttacttattatagaattccaggctctatcaatgaattgaatcctcttcacctgttccagtctctgctgattgattgtaaaagcccggatagcatttttttaaaatctttcccatgttgtatggaataaatatgtcggtgctggaatgcttaggaattttaaattgttcatatggtctaaaagggaaaagttatttgtttttaagattaacttcttttgagattattgctgtccatatttaggtttcaagtactgaatctaatgggagatttgtgcattgatataacagctgtttcctttcatactctgtagattatgtatctgcctaagaggaggctttgaatgtatcataatcatctatattcttaataatggtaaaaagttgtattcagaggatatctttaacattgtatcaacctaaatgcttcttttattaaatttggattaacatacttgcagatttgatttctttttcagttatttgaatatattttttcatttctatgaccatgttacagtttaaatatacaagcagtaaatgttatagtttaaaagtcttggtctttttccttaattttgtaagccatagaaattttaataagactgattatttatttcattttataagttgtgttttccctactaacggagccaacaaataaatattaaaaggaa

SEQ ID NO: 11782 - DNA, 2273 bp, Homo sapiens
  source 1..2273: mol_type = unassigned DNA
tcgtcaagatcagggcaaaaggaagaaaacaccgaattctgcttgccgtttcagagcggcggtgatgaagacaaaattgaacatctacaacatgcagttcctgctttttgttttcttggtgtgggaccctgccaggttggtgctggctaacatccaagaagatgaggctaaaaataacattaccatctttacgagaattcttgacagacttctggatggttacgataatcggcttagaccaggactgggaggaatatacaattgatgttttctttcgacaaaaatggaaagatgaacgtttaaaatttaaaggtcctatgaatatccttcgactaaacaatttaatggctagcaaaatctggactccagataccttttttcacaatgggaaaaaatcagtagctcataatatgacaatgccaaataagttgcttcgaattcaggatgatgggactctgctgtataccatgaggcttacagttcaagctgaatgcccaatgcacttggaggatttcccaatggatgctcattcatgtcctctgaaatttggcagctatgcatatacaacttcagaggtcacttatatttggacttacaatgcatctgattcagtacaggttgctcctgatggctctaggttaaatcaatatgacctgctgggccaatcaatcggaaaggagacaattaaatccagtacaggtgaatatactgtaatgacagctcatttccacctgaaaagaaaaattgggtattttgtgattcaaacctatctgccttgcatcatgactgtcattctctcccaagtttcattctggcttaacagagaatctgtgcctgcaagaactgtgtttggagtaacaactgtcctaacaatgacaactctaagcatcagtgctcggaattctctccccaaagtggcttatgcaactgccatggactggtttattgctgtttgttatgcatttgtgttctctgccctaattgaatttgcaactgttaattacttcaccaaaagaggatgggcttgggatgggaagagtgtagtaaatgacaagtccccttcaataaaagctgaaggcattacattaacatacaactcagtgaaagcaattcttcaaggagctaagctaatatggtccaagtatatagctttctcatggcccagtttattccaagaaaagactttagagtacttagagaagtggatggactgtttaaccttcaaacaatcttctaaaaaagaaaaggcttccgttatgatacagaacaacgcttatgcagtggctgttgccaattatgccccgaatctttcaaaagatccagttctctccaccatctccaagagtgcaaccacgccagaacccaacaagaagccagaaaacaagccagctgaagcaaagaaaactttcaacagtgttagcaaaattgacagaatgtccagaatagtttttccagttttgtttggtacctttaatttagtttactgggctacatatttaaacagagaacctgtattaggggtcagtccttgaattgagacccatgttatctttgggatgtatagcaacattaaatttggtttgttttgctatgtacagtctgactaataactgctaatttgtgatccaacatgtacagtatgtatatagtgacatagcttaccagtagacctttaatggagacatgcatttgctaactcatggaactgcagacagaaagcactccatgcgaaaacagccattgccttttttaaagatttaccctaggacctgatttaaagtgaatttcaagtgacctgattaatttcctattcttccaaatgagatgaaaatggggatcctgtacaaccctttgtggacccttttggtttagctcttaagtaggggtattttctactgttgcttaattatgatggaagataacattgtcattcctagatgaatcctttgaagtaacaaacattgtatctgacatcagctctgttcatgagtgctcagagtccctgctaatgtaattggaagcttggtacacataagaaaaactagagatttgaaatcagctatgaattactctatatagtatctatagccatgtacatattacagcatgacaagctcaaataattatgagtcagcccgaaaggatgttaattatgcctacgatgtaataactattggaatgtcatggtcattacatttttagcttcagagtttatttgaaagtaataattgaaatcctacaatttattttaatcattggaaactaccttaatt

SEQ ID NO: 11783 - DNA, 1785 bp, Homo sapiens
  source 1..1785: mol_type = unassigned DNA
tttgatgtacatttttctagctcattattgtccccagagatggaatctgaacagacaggattgtcaaacctttatttgcagcctgggttagaaggcacgcccataaggatataagggagacagagggaaaaaggaggaagctcactcttcagtctcggagcagcaagtaagcatcacacatcagctacaactgtgaatctcacaggtctctccaagtttgtgcctaagaagatgataatcacacaaacaagtcactgttacatgaccagccttgggattcttttcctgattaatattctccctggaaccactggtcaaggggaatcaagacgacaagaacccggggactttgtgaagcaggacattggcgggctgtctcctaagcatgccccagatattcctgatgacagcactgacaacatcactatcttcaccagaatcttggatcgtcttctggacggctatgacaaccggctgcgacctgggcttggagatgcagtgactgaagtgaagactgacatctacgtgaccagttttggccctgtgtcagacactgacatggagtacactattgatgtattttttcggcagacatggcatgatgaaagactgaaatttgatggccccatgaagatccttccactgaacaatctcctggctagtaagatctggacaccggacaccttcttccacaatggcaagaaatcagtggctcataacatgaccacgcccaacaagctgctcagattggtggacaacggaaccctcctctatacaatgaggttaacaattcatgctgagtgtcccatgcatttggaagattttcccatggatgtgcatgcctgcccactgaagtttggaagctatgcctatacaacagctgaagtggtttattcttggactctcggaaagaacaaatccgtggaagtggcacaggatggttctcgcttgaaccagtatgaccttttgggccatgttgttgggacagagataatccggtctagtacaggagaatatgtcgtcatgacaacccacttccatctcaagcgaaaaattggctactttgtgatccagacctacttgccatgtatcatgactgtcattctgtcacaagtgtcgttctggctcaacagagagtctgttcctgcccgtacagtctttggtgtcaccactgtgcttaccatgaccaccttgagtatcagtgccagaaattccttacctaaagtggcatatgcgacggccatggactggttcatagccgtctgttatgcctttgtattttctgcactgattgaatttgccactgtcaactatttcaccaagcggagttgggcttgggaaggcaagaaggtgccagaggccctggagatgaagaagaaaacaccagcagccccagcaaagaaaaccagcactaccttcaacatcgtggggaccacctatcccatcaacctggccaaggacactgaattttccaccatctccaagggcgctgctcccagtgcctcctcaaccccaacaatcattgcttcacccaaggccacctacgtgcaggacagcccgactgagaccaagacctacaacagtgtcagcaaggttgacaaaatttcccgcatcatctttcctgtgctctttgccatattcaatctggtctattgggccacatatgtcaaccgggagtcagctatcaagggcatgatccgcaaacagtagatagtggtggcagtgcagcaaccagagcactgtataccccgtgaagcatccaggcacccaaaccccggggctccc

SEQ ID NO: 11784 - DNA, 3712 bp, Homo sapiens
  source 1..3712: mol_type = unassigned DNA
agagagagagagagagagagagagagagagagcgagagagcgtgagcgcgcgcaagctagcgagcaaaccagagagacagaccgagagagggaccaggagagagacccagagagagaagaagaagccagaagccgagctctgtcagggctcaacctccaacttgtttcagttcattcatccttctctcctttccgctcagactgtagagctcggtctctccaagtttgtgcctaagaagatgataatcacacaaacaagtcactgttacatgaccagccttgggattcttttcctgattaatattctccctggaaccactggtcaaggggaatcaagacgacaagaacccggggactttgtgaagcaggacattggcgggctgtctcctaagcatgccccagatattcctgatgacagcactgacaacatcactatcttcaccagaatcttggatcgtcttctggacggctatgacaaccggctgcgacctgggcttggagatgcagtgactgaagtgaagactgacatctacgtgaccagttttggccctgtgtcagacactgacatggagtacactattgatgtattttttcggcagacatggcatgatgaaagactgaaatttgatggccccatgaagatccttccactgaacaatctcctggctagtaagatctggacaccggacaccttcttccacaatggcaagaaatcagtggctcataacatgaccacgcccaacaagctgctcagattggtggacaacggaaccctcctctatacaatgaggttaacaattcatgctgagtgtcccatgcatttggaagattttcccatggatgtgcatgcctgcccactgaagtttggaagctatgcctatacaacagctgaagtggtttattcttggactctcggaaagaacaaatccgtggaagtggcacaggatggttctcgcttgaaccagtatgaccttttgggccatgttgttgggacagagataatccggtctagtacaggagaatatgtcgtcatgacaacccacttccatctcaagcgaaaaattggctactttgtgatccagacctacttgccatgtatcatgactgtcattctgtcacaagtgtcgttctggctcaacagagagtctgttcctgcccgtacagtctttggtgtcaccactgtgcttaccatgaccaccttgagtatcagtgccagaaattccttacctaaagtggcatatgcgacggccatggactggttcatagccgtctgttatgcctttgtattttctgcactgattgaatttgccactgtcaactatttcaccaagcggagttgggcttgggaaggcaagaaggtgccagaggccctggagatgaagaagaaaacaccagcagccccagcaaagaaaaccagcactaccttcaacatcgtggggaccacctatcccatcaacctggccaaggacactgaattttccaccatctccaagggcgctgctcccagtgcctcctcaaccccaacaatcattgcttcacccaaggccacctacgtgcaggacagcccgactgagaccaagacctacaacagtgtcagcaaggttgacaaaatttcccgcatcatctttcctgtgctctttgccatattcaatctggtctattgggccacatatgtcaaccgggagtcagctatcaagggcatgatccgcaaacagtagatagtggtggcagtgcagcaaccagagcactgtataccccgtgaagcatccaggcacccaaaccccggggctccccttcgcgtatttcaggattctcctttttacccctctaccaagctgtgaccctcaattcatatttatgaatctctacgcaaaaaataactacagaaaaattacttgtccctccaatattgcccagtataaccccatcaaagccaaacactgccatttgtccagttgctcatcttagtctgccaatctcccctagctgagggcactgcatgtattttattgcactctgcccgctgcaaaaagaacaagagattctactctccatagtggaagccttggctgtttgagaggcccagaacaaggagaattgttgactcccatctagatcagatgactctaacttactaggcagccaggttaggctaggccatgtgatcctgcgtgccacctcccctgccttcagcaaggcctactaggcataagtactgatagcaaaggtgggagccagttctacacccccaacccatttattggtttggaaattagtggggacaattggtactaaccaccgtctaccatgtatggccaaaataaatagaactagctctgccagcctggcaccaagatggctggtgccctgccatgtccagcccctcgggaaaatagtcccctccttggtacatctctcctccagaaaatcttcttcccccactgcctttggcacccttgtagccaactgagcactacttaatttggactcattaccacctgtaaacttttcaggaaaaaatgatcaagcattttttatttatatcgaaaagttgcaaatagaaacaaagtgatctagatttaaaaaaaacatttttttaaaatatgggagagatacaaaagtcacctccctgccaaggcaactagcctatactggattgggtaagaggtttggagtggatggtagttgaggattgaagtctggctcaaaagagaaggctactggcagatgaaagtcaaattcttccttccatacactccacattccacaccctggcccaggcacttttctcccaccatatcgggaacctccggtcctctgttgatgccgattctatgaggggtgaattggaaattcatacaaataaatatctctagtcaatattgagtcaactagatcattaactttattgccaattttataatatattatttagaggccatttgttcttaatcttaatgtgagtaaaagacacaggcataaatacgcaatttttataaggtagataaactgaatcccagaagtttgaatgatttgcctaggctccttacaagtgtctttaataaagagctatcgtgcgcccctttccaaaggccaaaataaaggactgagaagccaggtccaccgtgacctcagaatcagcacaatctcagcgggccttctgggtcactagtggaacttggttgggcaccaaaaaggtttttagaaagtcacaatgtgtcacccaagaagatcacttttaatagtctcagcccaagagaatgagactgtttatgatggcagccccagccactttggctctgaatacctgcactagtccagagtatcctagaagcccagggtaaagccacagagggcaccacaagcagattctccctgcccaccggctgaacaaagctcctaaggggtgtatcattagctgctggttgccttttcatccatcctttccccgtcccctgcttccttgccattgctgggataatgcatgcccgtcccattattcctaagactgtgtctgtaggtaaattcatgactagaagagtgtagtcttgtggatatgtggggatatggggggtgggagggcggggctgttaatggttgtcttaaggaacttagaatggaagcctgatctttgcctctctgtagaaattgtgtttccaaatgctttggtgcaatgtttagctgctgtttattaaaccctttctgaattgta

SEQ ID NO: 11785 - DNA, 338 bp, Homo sapiens
  source 1..338: mol_type = unassigned DNA
gagtacactattgatgtattttttcggcagacatggcatgatgaaagactgaaatttgatggccccatgaagatccttccactgaacaatctcctggctagtaagatctggacaccggacaccttcttccacaatggcaagaaatcagtggctcataacatgaccacgcccaacaagctgctcagattggtggacaacggaaccctcctctatacaatgagaatagaggaagtacagaagcacagaagcatgatgaagccatcggtttcctacacagtagcaccttggatccaggaaggtgggcctggagggagacataggctcaaaatggaaaaata

SEQ ID NO: 11786 - DNA, 1697 bp, Homo sapiens
  source 1..1697: mol_type = unassigned DNA
agtgccgcttcatcacgcagcatggttgtctgggaatgtgccgtgggatctccatttgcattaattccttcagctcctggaccaaagccatttttaaaaattcatgttctgtgtatcacataacacagtatttgtgattgcacctgtactatgtccatttatttctgcatcatggctacttcctcctgtttcgtctctccaagtttgtgcctaagaagatgataatcacacaaacaagtcactgttacatgaccagccttgggattcttttcctgattaatattctccctggaaccactggtcaaggggaatcaagacgacaagaacccggggactttgtgaagcaggacattggcgggctgtctcctaagcatgccccagatattcctgatgacagcactgacaacatcactatcttcaccagaatcttggatcgtcttctggacggctatgacaaccggctgcgacctgggcttggagatgcagtgactgaagtgaagactgacatctacgtgaccagttttggccctgtgtcagacactgacatggagtacactattgatgtattttttcggcagacatggcatgatgaaagactgaaatttgatggccccatgaagatccttccactgaacaatctcctggctagtaagatctggacaccggacaccttcttccacaatggcaagaaatcagtggctcataacatgaccacgcccaacaagctgctcagattggtggacaacggaaccctcctctatacaatgaggttaacaattcatgctgagtgtcccatgcatttggaagattttcccatggatgtgcatgcctgcccactgaagtttggaagctatgcctatacaacagctgaagtggtttattcttggactctcggaaagaacaaatccgtggaagtggcacaggatggttctcgcttgaaccagtatgaccttttgggccatgttgttgggacagagataatccggtctagtacaggagaatatgtcgtcatgacaacccacttccatctcaagcgaaaaattggctactttgtgatccagacctacttgccatgtatcatgactgtcattctgtcacaagtgtcgttctggctcaacagagagtctgttcctgcccgtacagtctttggtgtcaccactgtgcttaccatgaccaccttgagtatcagtgccagaaattccttacctaaagtggcatatgcgacggccatggactggttcatagccgtctgttatgcctttgtattttctgcactgattgaatttgccactgtcaactatttcaccaagcggagttgggcttgggaaggcaagaaggtgccagaggccctggagatgaagaagaaaacaccagcagccccagcaaagaaaaccagcactaccttcaacatcgtggggaccacctatcccatcaacctggccaaggacactgaattttccaccatctccaagggcgctgctcccagtgcctcctcaaccccaacaatcattgcttcacccaaggccacctacgtgcaggacagcccgactgagaccaagacctacaacagtgtcagcaaggttgacaaaatttcccgcatcatctttcctgtgctctttgccatattcaatctggtctattgggccacatatgtcaaccgggagtcagctatcaagggcatgatccgcaaacagtag

SEQ ID NO: 11787 - DNA, 11973 bp, Homo sapiens
  source 1..11973: mol_type = unassigned DNA
agtcaacctctggaagtaagtcaactccattctgaaaaagaagagtgtcgcaagaagtgaaagtgattttgaccagaggtcgcttgtctccacctctcccctcctctccagaaaaggatggagcagcaaagcggagggtgtgcgcgtgtctggtggaggcgggtaaagaaatggggtgtctttaaagcaatagcttagcaaatactgggactagagtgcggctcgagtccacttcccaatagtttggcgagagtccgccgggtgagctgcaacccctgttaccaggaagaatctttctgctttcattgctctccctaccgccccccataacacctgaatgggagggtctcaaaggtggtttgagcccggacttgatcccctctcctcaccaccgctaccacccgacgcccagcagtccccgtcacccgccctttctccacctccaaccttgactctgggtacaaacaggtcctcgcacaacctgatgacagaggagcttcattggttagatccaaatcccagcggaagggagggggccaggaggtaggaggacgaacactgctgtgggcggggagcccacttggggtcgggggctgcgaagccggaggaggggcgagagaccccgttcctcatccccggagttacagtcggaacaaacttgccgagtcttgcagcgcaagcgcgcggatacgaaccccagaaccttcagcgcgcgggcacgaaagggtgtggagcggtatacatagctctacatacacattgagcgctgagcgagaaaggagggggcgaggaaggcaggttccgcctcccctggccccgtgcacacacacgcccaccgcggctcgggctggctgagcgcgggcgagtgtgagcgcgagtgtgcgcacgccgcgggagcctctctgccctctcctcgcaccctgctcagggcatctgaagagcctggaaacgtgaacaggcttgaagtatggcatgttgcaaagatggtttctgccaagaaggtacccgcgatcgctctgtccgccggggtcagtttcgccctcctgcgcttcctgtgcctggcggtttgtttaaacgaatccccaggacagaaccaaaaggaggagaaattgtgcacagaaaatttcacccgcatcctggacagtttgctcgatggttatgacaacaggctgcgtcctggatttgggggtcctgttacagaagtgaaaactgacatatatgtcaccagctttggacctgtttctgatgttgaaatggaatacacaatggatgtgttcttcaggcagacatggattgacaaaagattaaaatatgacggccccattgaaattttgagattgaacaatatgatggtaacgaaagtgtggacccctgatactttcttcaggaatggaaagaaatctgtctcacataatatgacagctccaaataagctttttagaattatgagaaatggtactattttatacacaatgagactcaccataagtgcggagtgtcccatgagattggtggattttcccatggatggtcatgcatgccctttgaaattcgggagttatgcctatccaaagagtgagatgatctatacctggacaaaaggtcctgagaaatcagttgaagttccgaaggagtcttccagcttagttcaatatgatttgattgggcaaaccgtatcaagtgaaaccatcaaatcaattacgggtgaatatattgttatgacggtttacttccacctcagacggaagatgggttattttatgattcagacctatattccgtgcattatgacagtgattctttctcaagtttcattttggataaataaagaatcagttcccgctaggactgtatttggaataacaactgtcctcaccatgaccacactaagcatcagtgcacgacattctttgcccaaagtgtcctatgctaccgccatggactggttcatagctgtctgctttgcttttgtattttcggcccttatcgagtttgctgctgtcaactatttcaccaatattcaaatggaaaaagccaaaaggaagacatcaaagccccctcaggaagttcccgctgctccagtgcagagagagaagcatcctgaagcccctctgcagaatacaaatgccaatttgaacatgagaaaaagaacaaatgctttggttcactctgaatctgatgttggcaacagaactgaggtgggaaaccattcaagcaaatcttccacagttgttcaagaatcttctaaaggcacacctcggtcttacttagcttccagtccaaacccattcagccgtgcaaatgcagctgaaaccatatctgcagcaagagcacttccatctgcttctcctacttctatccgaactggatatatgcctcgaaaggcttcagttggatctgcttctactcgtcacgtgtttggatcaagactgcagaggataaagaccacagttaataccataggggctactgggaagttgtcagctactcctcctccatcggctccaccaccttctggatctggcacaagtaaaatagacaaatatgcccgtattctctttccagtcacatttggggcatttaacatggtttattgggttgtttatttatctaaggacactatggagaaatcagaaagtctaatgtaatttcgttgctatagtagtttgctaaaagatgatgaaaatgcagaatgtctttttaaatgtttttaaatataaacaaatattctttactaaaataaaaactctgtgtaatttttccatttaaagatataagccagttattgggagagttaattaattcctgagtgaaaaagtgaactatgttttttttcagaaaaattattttaaaagaactcagcattcagttagatagaatacacaccatcctggaaagttgggataagagaaatagagctattagagacaagtggcgcatattttttcattgatatttgaaaacagactatgacattttaaaaatctgccctatgagtatcaacctgccaccctaaatttcccagtggcactacccttaaccagaattgtttattagatgtcatatgcagtgacctttggtgatcttcttaggaacttcaagaaaaggaattttcctgttaaattaaacattggcaaaaggaaatggaatagtataaacactgatcaatagagtaaaatatctgctgcataaaaaactaagacaaagaccagaggaaatatcttccctttcttatgttggctaaacagtacttaacagttgacttgaaattttgttctctgagccaaagtttaactcattgtatgaattctttttcatggtagttcattcagttatgtgtttatttactacatagttattcagagcctactgtgttccaggaactatgctagaaactgtctctctaggaaagctcttgcacctttatctacaatattacttaaaaagtagaacagtcaatgcatgccaaagaaccataaactagcagaggacattgcattctttagtgaaggacatttatttagagtctgacaacatattcaaaatatttttcagcctctactgatagtggataacaaatatatttgttcacataaccactttgatgtcagtacaacttcagcaattggttttcaaaatagatgagaatatggtacagattgttctataagtgaaaagcattatgtacttgaaagtaaaaatcagggcaatataagacttaatagattaactgtcgcaaatttgatcagagtcacagagtagaatttgatcagaatcacagaatcatcagacataggaactgagcacaggctttttcaggtgctttccccaagatagatctagatattagctagtgaaatgctaaattttgaagagttttgtgtccgtagttctgtaattctgggcagtcatcatgttggtttttttgggagtttttttaaggtttaataactaaggggaatattttaaaattaagagagcagcaaatgaaaggagtaaagaaaaaaatagctgtcgggtaggatgccactgactctgctatgtgatttatcagggttttcatctactgacttctttctcattaggtaggcttaacaacttacttgagaattttgcaactgtctatgcagctgaatctaagtatggttttttgtcatattgcctctagattttcttctgtgcttctctctatctgctctggaatggatgagtgaatgtgttctgggtgttttagggaacatattgatagaaatgaccaccttgcagacaaaatctctctctctctttttgtttttatagaaaagaagtgatagtagttaattggcatcgatttttcagatattgcactaccttataatggttgtttttgatacctgaaaattgtgcaaatgccaaatattaattgtaagtcatatctgagaaatcattcttggctgtctttctaggtattccatagaatcaacacattttaaggctgaaagatactgtcgaaatcacccagtcccaaccccccaatttaaaattgattctagtaaaattaggtccagtaacacctgtatatatgtatatatttaataaagagtacttgtacaaaaaagcttatcataaattatttcatgaatgtgaatagatttctggccttgaggacgatgtttggaaatatggttggaagcacaattcattcgctactagttattcagagcgtactttgttccaggaactatgctggaaactgatagttcactattctgatgaaaaggctggttttgttgttgttgttgttgttgttgttgttgtttttggtgaggaactcttactctttgctaatctattggcctatcttaagaaataattatttggttattcattggcttcctttaaaaaaaagtgttcttctacaaatcttacagagtgtaaagagataaaaagaaatgattttttttcttacctttacatatgaaggtttaaaaatacatcatgtggccaaagaatgagaaaggacagaattaaccaaggattcttaattgttaatttgaagaacacattaaccagaaagcttaaacattattattaaaataaattatttcatttgcacacaatgataataatgatgataataataataataataataataataataataataataataatatgttgtttgctttccttaactgaatttcatcaaattcattcagtgatttttattttggtcattatttctatcttcccaataacccagaggtacatcaagtaaaaacacttttgcaaagagccagtcacttttccctcttagaaaatctcagaagaatgattaggggcacccaaagttctggttatctatgaataataatgaataattttggctgagaatggtacctttatataactcttttaaagatgaaattcagaataattttattcaggacctagtatctgcagtccatgttggccactaactgctacataattactttcaatttcctccaggcatgactaggtataaacatatatttacatgattaatccacattttaaaatgacttgcacttgtgcatatacatagtactttgaataatgtatattttaaattggacctcacaaatcttgtattaaagtaggtagagagtagagtcacactttttttgatgaaatgagtcacagagaagttacatgacaaagataaaatcacagggttggaaagaactttgaaaggtcatttttcaataatctcaccttaaaagtgaccccttttcaaacaaagcataaacaatttatttgtggcttattttacccatgagctggccaatacttcctggcctagaaaaatatctccactctccccattcctgttcttaatggtcttctcttctcaatttgtaaatattctccagtaaaagacaccaggtgtggagatgggtcacttaatttcaagttctgagtgtcttgtggttttaaacaagtctcttaacctctctaagactgattcctcatttataacagggaggaggtggattatgtaatatctaagagcttttcagttttaatactctctgattctcatagtaaatacaagcatactcttgtaagaaaaacactgaatactttgaaccacaaataagtgtttatggacaaaaatttagttctactgcttgattactttaagttcattgcttgcttcaaactaaggtttccctaccttcaaaaatatatataacatctctccatttagataaagtatattcttccccagggaagactgtattctttaaagacagtagaatattggctatttctcttttctgggatttcctgggcttttattcactaaatgggctcctgcccagtttgggtactgtgctgatttttagatatacagagataaaaatagcccctttccttgcaggtagtcacagtccggaagagatgatagatgcatagacaaaaaattatgggatgtaactaatgcttcagtagaatacagcagggccaaaactagagtgatactcatctcaggcacaaatatatatggggacatcaaaacttcaataatcaagatacctaatatttaagtgaatatttttaaaactcaaaattaatgcaaaagatttatgatgaacagaatatacaaattttaaataaattaatagaatcagtagtaataatattttcttctgcctcaggctccaaaattgctcagcatagcactgatctagatagaggtggataaaagatccacataacttaattacattgttgaaggagaggaacaagagtgatagcagagaaggtttcacagatataatcttaagctaaattttatagaatgatttggagttcttatagcctccattcccacttccacaaacaaacaaaaaaatgaaagcgcaattttatcagcacctgaggcaggagaagagatgaggatgtggaaagtcaaggggaactcttactacaaattcttagttctgtgtttggaggtaagggtgaatgcagggaagtgagagttgttgatgttggaaagacctaaagagcctggattaggaagagttttgtgtaaattactgaaggaatggaatttgatcaggattagtggcaatttattaaaaatcttgaagaataatacgatgaaaactaacatccttatttttctgttttagagaaagcacctgattattgtgtgaactatggtttggagggccacaaatctagaggtagtggaacagttgagatctcttattttttctttcctgtcttaaactttgccttctattccttttttctttttttgaccgcaatgacttcattgtcatttgtaaaagtgatacatgactgttaaagatagacattgtagaaacttaaaaacaatctcaaaattctaccacccagaaatcagaaatattttgtatttggatatgtttgtctagaagagtagattgcttgattaaaagacagagttttataaatgtagaagccaatatgacatacatgctgccattaaataataaaaaattaaattgacttttatctcaagataagattaaaattggagggtaaaactgaagaaattgttgaaatttggatggtgcttctttaaagcaagagatttagagagtcagagctttttatcccaggtttcaatctttatttcaggaaaattttctgcaattttgtctaagttaattttttttttttaagaaatgccaattatgtcaaatcccttttgtctctatacaatagtccccaactgttttggcaacaggcacgggtgagggtgggggaatggttttcagatgaaattgttccatctcagatcatcaggcattagtcgattctcataaggagcggacaaccttgcatgccctcctatgagaatctaatgccgccgctaatctgacaggaggcagagctcaggcgataatgctcaatgggtgccactcacctcctgttgtgctgcccaattcctaacaggtcatggataagtactggtcagtggcccaggggttggggaccactgctctgtaactatttacagtattctttgtaactactttggtatctttaaaattttctttaacttttgtcaaccataaccctagtgagttttcagttgtgattattctattttgtaacttccaatgtacttttcaacttcataatggttaattttgttttccattgctttcttggtcactgtcatttcatttttcttctctttctctatttttaccattgctttattgaaatatcttctttgagcttctcatgtttctctattaatgagatcatgtctataatattttttgagactacagagacctatttatataaactcttcctctatttcttgaaaaagtttttatctggcgtgagcttcatctgctttttcattgaggttttatctcccttgcctatttttggggctggtttctttctattaatcactgagcagagccagctatttactgaactacagtgtgggaagtggtgggagggtgagtcagatcagcccacagaagctatttaaatttcaggtttcaagcccacctccccaaaaccgttttatgtgttttttcttctgcccaggcaccatatttttatatctatttttgacatttgggcggcctatgtagttcacagtgtaaaactctctgttttactttctttatgttattgctagtgattattgcttgtagtcccacccccttccccacattagccttagtattctatattattcagcaagcttgttcacaactctcaaatatagtctatcagaatttttatctttacctctacattccactattcggaagtatatagtaaaatcgtatgaagacagattttgtctttttcttgcctgtttacactctatcttacagaggtttcaaacaaaccatctttgtttgaaacatcgcaggataatgatacttattgaaatctacatcctgcccaagatatatgccagtcaatttcctttctcctattagtgcaaatggctacctacttaaaagctgctgactatagtttgtcatcaattacttgttaattacagatatggttttcatttttttttctcaatttttcattatgttatttttggagactgtcttaggtggggagtgaattataaatatttttatttcaccacctttaactgagtcaccatatgttatttgcacttccaatagaccagggattgaccagagtatcttttactgatatgaccaccagagctacatggcttttaccttctgtatatcagatgtcactggaatcaagcattaaacctagattaaatctggattaaaccagctgtatggcaccttagaaaattgagaaggactaggaagctgatagaaagaactcctgtataaaaaataaattctttttacattttccttggtagtatttctgcaagcttctttagtttctataggggaatcccagagttttcctctgagattgcttccctttcctttgtattttcatttttccctcttgggctttacttttcagtcgtgtatttctatcccaatgttaatttattacactgtttatattttcctgtccttcaattcatcagtagattagtgaagtacttattcctttaattataagtataaacgtttttaatttctttttggataacgatacatttaatggaaaatttttaaatgctatggtttcttaatagcttttctctaccactaattacttccgttaaaaaaaaaaagaaatacccatgcgtaatataaaagaaattttgaataaaatgttatcctttccttttactagagacaaacatctccacttcaaaatggaaaaatggaactatgcaaaggaaatttacgatattcaagagtatgatattatcactgaaccgattaatttaattgaaaatactaacctgcaaaaaagaattacacaaatgtatttgaaatgtcatcagatacctcaagctatgacagagttgattatgttacacaagtagtaaaggataaattaaatatattctatattaacactaagatttaaaactaattatagtcttctttaatttttctactgtatacatttcatctagttttcagtaaaacaaacttttcattacttttacttatcccatgcaaatctagttgctataagatataacctaatttggaaatacctccctgtaatacattggaattttggtgtgagtgtgtgtgatcagagaggataaacaaatggtgtcagcaaaatagaatgtaaaatatggagataatgtggatttacacaatttgataaaaattctcccttgaattttgcagatcatatatgaatatcatcatgtgaagtgcaattaggattttttcatatattaatacatatacatcatctctttaataaaatattttgctgaactcgtttaatatttctcatgtctcatatttcatattttctcatatgtctcatattttatattttctcatatgtgtctcatttttattattactatagtatccattaaaggagactggcaaatacctgaacaaagttatgttgttggcaatataagatattaccaattgcataatattatttccaaaggcaaattaatatgcaaactatagatttccatgggtatctatacaaattattacttgaagtccatagaaaacagcttccttagagggaagtaaaagaagctctgataacagacaatgtatagcatttcagttaaagtttgattgacatatttttttctcagtcttttatacttgtgaattatagtctacattttgtctttacagatgttgctaacacagtgcagcatgttggcttgtcattttactgattatgtatattgtctcctagttcaagtatacagtaaatcagagctttcatttttcaaggggcagaaaaataattgttggttgataaggtaaggttatatgattttgagggagcttcattgtaaattgaatgagaatccggttttcatgcaaaggtgtatctatgcgataatactttgaatgtctgtagtttgaaatagaaggttaattttttccactggcttatccttaatgaaggaaatcccctgataattactttgattctgaaaatgttgaaaactccagaagaaataaagcttttctttgatttctcagctgaagtgttgtacaaactgaggaatatgaagtccattcccttctttcttctcttgaataattttaaaattgtttgtttagttgtacaattgaaaatattccttattatagaagtaaaaaaacaataatgcatatttcctcatatcataaaaactaaatttgttatcatctgagcttcaatattcttgctcaattagaatagtaaatataaagtgtgatatttataacagttcaaggtttgataggagatagaggtgttttgattttatgggaaaattacttcctcaagaacacatttcttgaggttttagtaatcacatttgactccctgaaattggcaattttattcaatgtaggaatattatcatggtatattatagtgaggagcacatagtcattattattttgtttttgcaaatttattttgaaaaaaaggagcattatcaaatattggtttactattttaaagtaattcatcaggaaatgattttttaaacactgtccctttaagtaaatgtcccttgcttttcaaagctcaacttattacttatggtaatagagttactttgcttcttaaaacaaagtttatactagagcatagcattgtagaattattcaggtctcaatttctcactggaaaatgagtctttaaaatagtaaggatttaaatttctataaaatttaatcacagatacttatattttaagataaatgtgttggagctaaactctggaattattaaaatataaaacattatatccctctaatgtattttttctatttaaatttaaaacaataaacataaatatctttggaa

SEQ ID NO: 11788 - DNA, 3251 bp, Homo sapiens
  source 1..3251: mol_type = unassigned DNA
aggaactgcaccactaggacggacgacacaccgacgtaatgaccatagtaagaccccatgtacgtggctaatgaggcagtgacccgacgtggctcggaagccctgctggggagatcccgccccgtcaccccagaggcgctctccgacctgcagcccccagggctcctggccctttcccgtttgccactgcggcttgttgtcaagaaatggaacttcagaaaacccccagatatacactgcgttaggtaaggatttcattctaatcgagtccaatgtgaccctggctttccctcccgtagttatgcattcctgtctatgagtgagatgaaaagaatgtccacaggccagcttctttcagaagcgcctaagagatgcgcatgtaaggggtgccatggagcacccgggaaggacccaggcctgggcagggaggcgttggggccggctctagggagcaaagctgtcggagtccaggcctctatcacccgactgctgacactgccctcccatccctgctctacaagcgggcggtggtgactacacgaggcgccgaagatgctgttgagggccctggagaaacttcagcagaacagggcctctccccttgcaggccgagccgggggccctgcgccctccccctccgcccagctcggccaagggcgcatttgctgagcgtctggcggcctctaccggagcacctctgcagagggccgatcctccagcccagagacgacatgtggcgctcgggcgagtgccttgcagagagaggagtagcttgctggctttgaacgcgtggcgtggcagatatttcagaaagcttcaagaacaagctggagaagggaagagttattcctccatattcacctgcttcaactactattcttattgggaatggacaatggaatgttctctggttttatcatgatcaaaaacctccttctcttttgtatttccatgaacttatccagtcactttggcttttcacagatgccaaccagttcagtgaaagatgagaccaatgacaacatcacgatatttaccaggatcttggatgggctcttggatggctacgacaacagacttcggcccgggctgggagagcgcatcactcaggtgaggaccgacatctacgtcaccagcttcggcccggtgtccgacacggaaatggagtacaccatagacgtgtttttccgacaaagctggaaagatgaaaggcttcggtttaaggggcccatgcagcgcctccctctcaacaacctccttgccagcaagatctggaccccagacacgttcttccacaacgggaagaagtccatcgctcacaacatgaccacgcccaacaagctgctgcggctggaggacgacggcaccctgctctacaccatgcgcttgaccatctctgcagagtgccccatgcagcttgaggacttcccgatggatgcgcacgcttgccctctgaaatttggcagctatgcgtaccctaattctgaagtcgtttacgtctggaccaacggctccaccaagtcggtggtggtggcggaagatggctccagactgaaccagtaccacctgatggggcagacggtgggcactgagaacatcagcaccagcacaggcgaatacacaatcatgacagctcacttccacctgaaaaggaagattggctactttgtcatccagacctaccttccctgcataatgaccgtgatcttatcacaggtgtccttttggctgaaccgggaatcagtcccagccaggacagtttttggggtcaccacggtgctgaccatgacgaccctcagcatcagcgccaggaactctctgcccaaagtggcctacgccaccgccatggactggttcatagccgtgtgctatgccttcgtcttctcggcgctgatagagtttgccacggtcaattactttaccaagagaggctgggcctgggatggcaaaaaagccttggaagcagccaagatcaagaaaaagcgtgaagtcatactaaataagtcaacaaacgcttttacaactgggaagatgtctcaccccccaaacattccgaaggaacagaccccagcagggacgtcgaatacaacctcagtctcagtaaaaccctctgaagagaagacttctgaaagcaaaaagacttacaacagtatcagcaaaattgacaaaatgtcccgaatcgtattcccagtcttgttcggcactttcaacttagtttactgggcaacgtatttgaatagggagccggtgataaaaggagccgcctctccaaaataaccggccacactcccaaactccaagacagccatacttccagcgaaatggtaccaaggagaggtcttgctcacagggactctccatatgtgagcactatctttcaggaaatttttgcatgtttaataatatgtacaaataatattgccttgatgtttctatatgtaacttcagatgtttccaagatgtcccattgataattcgagcaaacaactttctggaaaaacaggatacgatgactgacactcagatgcccagtatcatacgttgatagtttacaaacaagatacgtatatttttaactgcttcaagtgttacctaacaatgttttttatacttcaaatgtcatttcatacaaattttcccagtgaataaatattttaggaaactctccatgattattagttgaccaactatattgcgagaaacagagatcataaagagcacgttttccattatgaggaaacttggacatttatgtacaaaatgaattgcctttgataattcttactgttctgaaattaggaaagtactgcatgatcttacacgaagaaatagaataggcaaacttttatgcaggcagattaataacagaaatacatcatatgttagatacacaaaatatttccctgaggaaaaaaaatcaactgcttaaattttttgggaagaaaaagaaacatttcttaccccacaccacccactacctgaacaatagccaagaaaggaaaggagatgttaaaacaaacagtgttttgatgacattctcagcacttggcccatgtgatcgctgtctctgaaacactgaccacctctccctacagccagcgtgtagtgcttcagtggtgagaaattgtaattgagttattttccattttatttccttgtatgtatttcatgactggacttactgctctgtcagcttttgtatatgaatcttaaatgttcattaaaaaataaaaaatgaactgatcttgtgg

SEQ ID NO: 11789 - DNA, 2183 bp, Homo sapiens
  source 1..2183: mol_type = unassigned DNA
gaagatgctgttgagggccctggagaaacttcagcagaacagggcctctccccttgcaggccgagccgggggccctgcgccctccccctccgcccagctcggccaagggcgcatttgctgagcgtctggcggcctctaccggagcacctctgcagagggccgatcctccagcccagagacgacatgtggcgctcgggcgagcttcaagaacaagctggagaagggaagagttattcctccatattcacctgcttcaactactattcttattgggaatggacaatggaatgttctctggttttatcatgatcaaaaacctccttctcttttgtatttccatgaacttatccagtcactttggcttttcacagatgccaaccagttcagtgaaagatgagaccaatgacaacatcacgatatttaccaggatcttggatgggctcttggatggctacgacaacagacttcggcccgggctgggagagcgcatcactcaggtgaggaccgacatctacgtcaccagcttcggcccggtgtccgacacggaaatggagtacaccatagacgtgtttttccgacaaagctggaaagatgaaaggcttcggtttaaggggcccatgcagcgcctccctctcaacaacctccttgccagcaagatctggaccccagacacgttcttccacaacgggaagaagtccatcgctcacaacatgaccacgcccaacaagctgctgcggctggaggacgacggcaccctgctctacaccatgcgcttgaccatctctgcagagtgccccatgcagcttgaggacttcccgatggatgcgcacgcttgccctctgaaatttggcagctatgcgtaccctaattctgaagtcgtttacgtctggaccaacggctccaccaagtcggtggtggtggcggaagatggctccagactgaaccagtaccacctgatggggcagacggtgggcactgagaacatcagcaccagcacaggcgaatacacaatcatgacagctcacttccacctgaaaaggaagattggctactttgtcatccagacctaccttccctgcataatgaccgtgatcttatcacaggtgtccttttggctgaaccgggaatcagtcccagccaggacagtttttggggtcaccacggtgctgaccatgacgaccctcagcatcagcgccaggaactctctgcccaaagtggcctacgccaccgccatggactggttcatagccgtgtgctatgccttcgtcttctcggcgctgatagagtttgccacggtcaattactttaccaagagaggctgggcctgggatggcaaaaaagccttggaagcagccaagatcaagaaaaagcgtgaagtcatactaaataagtcaacaaacgcttttacaactgggaagatgtctcaccccccaaacattccgaaggaacagaccccagcagggacgtcgaatacaacctcagtctcagtaaaaccctctgaagagaagacttctgaaagcaaaaagacttacaacagtatcagcaaaattgacaaaatgtcccgaatcgtattcccagtcttgttcggcactttcaacttagtttactgggcaacgtatttgaatagggagccggtgataaaaggagccgcctctccaaaataaccggccacactcccaaactccaagacagccatacttccagcgaaatggtaccaaggagaggtcttgctcacagggactctccatatgtgagcactatctttcaggaaatttttgcatgtttaataatatgtacaaataatattgccttgatgtttctatatgtaacttcagatgtttccaagatgtcccattgataattcgagcaaacaactttctggaaaaacaggatacgatgactgacactcagatgcccagtatcatacgttgatagtttacaaacaagatacgtatatttttaactgcttcaagtgttacctaacaatgttttttatacttcaaatgtcatttcatacaaattttcccagtgaataaatattttaggaaactctccatgattattagttgaccaactatattgcgagaaacagagatcataaagagcacgttttccattatgaggaaacttggacatttatgtacaaaatgaattgcctttgataattcttactgttctgaaat

SEQ ID NO: 11790 - DNA, 2761 bp, Homo sapiens
  source 1..2761: mol_type = unassigned DNA
gagtgcgccgggggcgctggggggctctgcggcgggcggcgcgcggcccggggcgcggcgcggagcggagctgcagggcggcggcgggagcgcggggcgcaagagccgctccgccgggagtgccggggaagttcgcgctggcagcatggggcggtgacgccgcaccggccttccgcgcctgccagccgggcgagagcaggcggaggagaaggaggatgcatcctcaccgacggctcgcctcccggggccggcgcgcaggtgccttgcagagagaggagtagcttgctggctttgaacgcgtggcgtggcagatatttcagaaagcttcaagaacaagctggagaagggaagagttattcctccatattcacctgcttcaactactattcttattgggaatggacaatggaatgttctctggttttatcatgatcaaaaacctccttctcttttgtatttccatgaacttatccagtcactttggcttttcacagatgccaaccagttcagtgaaagatgagaccaatgacaacatcacgatatttaccaggatcttggatgggctcttggatggctacgacaacagacttcggcccgggctgggagagcgcatcactcaggtgaggaccgacatctacgtcaccagcttcggcccggtgtccgacacggaaatggagtacaccatagacgtgtttttccgacaaagctggaaagatgaaaggcttcggtttaaggggcccatgcagcgcctccctctcaacaacctccttgccagcaagatctggaccccagacacgttcttccacaacgggaagaagtccatcgctcacaacatgaccacgcccaacaagctgctgcggctggaggacgacggcaccctgctctacaccatgcgcttgaccatctctgcagagtgccccatgcagcttgaggacttcccgatggatgcgcacgcttgccctctgaaatttggcagctatgcgtaccctaattctgaagtcgtttacgtctggaccaacggctccaccaagtcggtggtggtggcggaagatggctccagactgaaccagtaccacctgatggggcagacggtgggcactgagaacatcagcaccagcacaggcgaatacacaatcatgacagctcacttccacctgaaaaggaagattggctactttgtcatccagacctaccttccctgcataatgaccgtgatcttatcacaggtgtccttttggctgaaccgggaatcagtcccagccaggacagtttttggggtcaccacggtgctgaccatgacgaccctcagcatcagcgccaggaactctctgcccaaagtggcctacgccaccgccatggactggttcatagccgtgtgctatgccttcgtcttctcggcgctgatagagtttgccacggtcaattactttaccaagagaggctgggcctgggatggcaaaaaagccttggaagcagccaagatcaagaaaaagcgtgaagtcatactaaataagtcaacaaacgcttttacaactgggaagatgtctcaccccccaaacattccgaaggaacagaccccagcagggacgtcgaatacaacctcagtctcagtaaaaccctctgaagagaagacttctgaaagcaaaaagacttacaacagtatcagcaaaattgacaaaatgtcccgaatcgtattcccagtcttgttcggcactttcaacttagtttactgggcaacgtatttgaatagggagccggtgataaaaggagccgcctctccaaaataaccggccacactcccaaactccaagacagccatacttccagcgaaatggtaccaaggagaggtcttgctcacagggactctccatatgtgagcactatctttcaggaaatttttgcatgtttaataatatgtacaaataatattgccttgatgtttctatatgtaacttcagatgtttccaagatgtcccattgataattcgagcaaacaactttctggaaaaacaggatacgatgactgacactcagatgcccagtatcatacgttgatagtttacaaacaagatacgtatatttttaactgcttcaagtgttacctaacaatgttttttatacttcaaatgtcatttcatacaaattttcccagtgaataaatattttaggaaactctccatgattattagttgaccaactatattgcgagaaacagagatcataaagagcacgttttccattatgaggaaacttggacatttatgtacaaaatgaattgcctttgataattcttactgttctgaaattaggaaagtactgcatgatcttacacgaagaaatagaataggcaaacttttatgcaggcagattaataacagaaatacatcatatgttagatacacaaaatatttccctgaggaaaaaaaatcaactgcttaaattttttgggaagaaaaagaaacatttcttaccccacaccacccactacctgaacaatagccaagaaaggaaaggagatgttaaaacaaacagtgttttgatgacattctcagcacttggcccatgtgatcgctgtctctgaaacactgaccacctctccctacagccagcgtgtagtgcttcagtggtgagaaattgtaattgagttattttccattttatttccttgtatgtatttcatgactggacttactgctctgtcagcttttgtatatgaatcttaaatgttcattaaaaaataaaaaatgaactgatcttgtgg

SEQ ID NO: 11791 - DNA, 653 bp, Homo sapiens
  source 1..653: mol_type = unassigned DNA
ggcgcgcggcccggggcgcggcgcggagcggagctgcagggcggcggcgggagcgcggggcgcaagagccgctccgccgggagtgccggggaagttcgcgctggcagcatggggcggtgacgccgcaccggccttccgcgcctgccagccgggcgagagcaggcggaggagaaggaggatgcatcctcaccgacggctcgcctcccggggccggcgcgcagggtgagccctgggcgcgctgggccggggcagtgggtgccttgcagagagaggagtagcttgctggctttgaacgcgtggcgtggcagatatttcagaaagcttcaagaacaagctggagaagggaagagttattcctccatattcacctgcttcaactactattcttattgggaatggacaatggaatgttctctggttttatcatgatcaaaaacctccttctcttttgtatttccatgaacttatccagtcactttggcttttcacagatgccaaccagttcagtgaaagatgagaccaatgacaacatcacgatatttaccaggatcttggatgggctcttggatggctacgacaacagacttcggcccgggctgggagagcgcatcactcaggtgaggaccgacatctacgtcaccagcttcggcccg

SEQ ID NO: 11792 - DNA, 728 bp, Homo sapiens
  source 1..728: mol_type = unassigned DNA
ggagtgccggggaagttcgcgctggcagcatggggcggtgacgccgcaccggccttccgcgcctgccagccgggcgagagcaggcggaggagaaggaggatgcatcctcaccgacggctcgcctcccggggccggcgcgcaggtgccttgcagagagaggagtagcttgctggctttgaacgcgtggcgtggcagatatttcagaaagcttcaagaacaagctggagaagggaagagttattcctccatattcacctgcttcaactactattcttattgggaatggacaatggaatgttctctggttttatcatgatcaaaaacctccttctcttttgtatttccatgaacttatccagtcactttggcttttcacagatgccaaccagttcagtgaaagatgagaccaatgacaacatcacgatatttaccaggatcttggatgggctcttggatggctacgacaacagacttcggcccgggctgggagagcgcatcactcaggtgaggaccgacatctacgtcaccagcttcggcccggtgtccgacacggaaatggagtacaccatagacgtgtttttccgacaaagctggaaagatgaaaggcttcggtttaaggggcccatgcagcgcctccctctcaacaacctccttgccagcaagatctggaccccagacacgttcttccacaacgggaagaagtccatcgctcacaacatgaccacgcc

SEQ ID NO: 11793 - DNA, 653 bp, Homo sapiens
  source 1..653: mol_type = unassigned DNA
acgtactttctcagtgccttgcagagagaggagtagcttgctggctttgaacgcgtggcgtggcagatatttcagaaagcttcaagaacaagctggagaagggaagagttattcctccatattcacctgcttcaactactattcttattgggaatggacaatggaatgttctctggttttatcatgatcaaaaacctccttctcttttgtatttccatgaacttatccagtcactttggcttttcacagatgccaaccagttcagtgaaagatgagaccaatgacaacatcacgatatttaccaggatcttggatgggctcttggatggctacgacaacagacttcggcccgggctgggagagcgcatcactcaggtgaggaccgacatctacgtcaccagcttcggcccggtgtccgacacggaaatggagtacaccatagacgtgtttttccgacaaagctggaaagatgaaaggcttcggtttaaggggcccatgcagcgcctccctctcaacaacctccttgccagcaagatctggaccccagacacgttcttccacaacgggaagaagtccatcgctcacaacatgaccacgcccaacaagctgctgcggctggaggacgacggcaccctgctctacaccatgcgctt

SEQ ID NO: 11794 - DNA, 458 bp, Homo sapiens
  source 1..458: mol_type = unassigned DNA
gctcgaggccaggggacttggagtcgctgctgcaccgcgcgctcccagcccaggaggaaggcgctgcctggcggagcgcttggctcgtacccggggcaggagcaggggaagtctgcgaaagccgggagcgagccggggagggccggggagctggagaccctcggcgtgccgctgcggaccgcgcgggtggcgaccgcgggtgccagggcgacccaggctgcggctccgcagtgcagcccccgcgcccacctgccctggcgcgccggccctgtgccttgcagagagaggagtagcttgctggctttgaacgcgtggcgtggcagatatttcagaaagcttcaagaacaagctggagaagggaagagttattcctccatattcacctgcttcaactactattcttattgggaatggacaatggaatgttctctggttttatcatgatcaaaaacctcctt

SEQ ID NO: 11795 - DNA, 2128 bp, Homo sapiens
  source 1..2128: mol_type = unassigned DNA
aagatgccaatgctttccagatttcctcacagggccctgctaattccatgccaaaactggcagtggatttcttccttctaatctcccttaatgccttattcgattattgtcactgctctccgaccatgcactgtcccttcagactctcctttcccaactgagtcagtcagaggagcctgggtgtctgcaggacataatctaagaccacaaaccaccttgttccacgtgagaaggaaacaagaaagaagggagccaggggaatcctgcaaatttttaggcaacctctttatctattggattactgacttgaggcaaacaaggaacagagatatgaagggtttgaaagatttctccagttgattggcagagaagagctggctagcagggaggacgaccctaggagggtgaattctgcatttcagtgcactgcaggatggcgtcgtctctgccctggctgtgcattattctgtggctagaaaatgccctagggaaactcgaagttgaaggcaacttctactcagaaaacgtcagtcggatcctggacaacttgcttgaaggctatgacaatcggctgcggccgggatttggaggtgctgtcactgaagtcaaaacagacatttatgtgaccagttttgggcccgtgtcagatgtggagatggagtatacgatggatgtttttttccgccagacctggactgatgagaggttgaagtttggggggccaactgagattctgagtctgaataatttgatggtcagtaaaatctggacgcctgacacctttttcagaaatggtaaaaagtccattgctcacaacatgacaactcctaataaactcttcagaataatgcagaatggaaccattttatacaccatgaggcttaccatcaatgctgactgtcccatgaggctggttaactttcctatggatgggcatgcttgtccactcaagtttgggagctatgcttatcccaaaagtgaaatcatatatacgtggaaaaaaggaccactttactcagtagaagtcccagaagaatcttcaagccttctccagtatgatctgattggacaaacagtatctagtgagacaattaaatctaacacaggtgaatacgttataatgacagtttacttccacttgcaaaggaagatgggctacttcatgatacagatatacactccttgcattatgacagtcattctttcccaggtgtctttctggattaataaggagtccgtcccagcaagaactgtttttgggatcaccactgttttaactatgaccactttgagcatcagtgcccggcactctttgccaaaagtgtcatatgccactgccatggattggttcatagctgtttgctttgcattcgtcttctctgcgcttatcgagttcgcagctgtcaactactttaccaatcttcagacacagaaggccaaaaggaaggcacagtttgcagccccacccacagtgacaatatcaaaagctactgaacctttggaagctgagattgttttgcatcctgactccaaatatcatctgaagaaaaggatcacttctctgtctttgccaatagtttcatcttccgaggccaataaagtgctcacgagagcgcccatcttacaatcaacacctgtcacacccccaccactctcgccagcctttggaggcaccagtaaaatagaccagtattctcgaattctcttcccagttgcatttgcaggattcaaccttgtgtactgggtagtttatctttccaaagatacaatggaagtcagtagcagtgttgaatagcttgcggccaggacaacctgaattctataagttcttgttttctgtttcctatgttttcttaaaaaatagcattgagacttgtgtagatgcttctcagaacatgaaatcaaattggaaatctgtaacgcagcttccgtaagcatgtgtgggcaaaaaagcaataatcctactcctcaaaatagaaagttgaagattgctgaaaaatatgacttttctgtatgttagagaaaaactttatgaggatgaaatgggttcaagatgaatttgtcaacttttgtcttccattgttcagtatttttaattgtcactgtaaataacatttaccacaaggca

SEQ ID NO: 11796 - DNA, 2393 bp, Homo sapiens
  source 1..2393: mol_type = unassigned DNA
acataatctaagaccacaaaccaccttgttccacgtgagaaggaaacaagaaagaagggagccaggggaatcctgcaaatttttaggcaacctctttatctattggattactgacttgaggcaaacaaggaacagagatatgaagggtttgaaagatttctccagttgattggcagagaagagctggctagcagggaggacgaccctaggagggtgaattctgcatttcagtgcactgcaggatggcgtcgtctctgccctggctgtgcattattctgtggctagaaaatgccctagggaaactcgaagttgaaggcaacttctactcagaaaacgtcagtcggatcctggacaacttgcttgaaggctatgacaatcggctgcggccgggatttggaggtgctgtcactgaagtcaaaacagacatttatgtgaccagttttgggcccgtgtcagatgtggagatgacctggactgatgagaggttgaagtttggggggccaactgagattctgagtctgaataatttgatggtcagtaaaatctggacgcctgacacctttttcagaaatggtaaaaagtccattgctcacaacatgacaactcctaataaactcttcagaataatgcagaatggaaccattttatacaccatgaggcttaccatcaatgctgactgtcccatgaggctggttaactttcctatggatgggcatgcttgtccactcaagtttgggagctatgcttatcccaaaagtgaaatcatatatacgtggaaaaaaggaccactttactcagtagaagtcccagaagaatcttcaagccttctccagtatgatctgattggacaaacagtatctagtgagacaattaaatctaacacaggtgaatacgttataatgacagtttacttccacttgcaaaggaagatgggctacttcatgatacagatatacactccttgcattatgacagtcattctttcccaggtgtctttctggattaataaggagtccgtcccagcaagaactgtttttgggatcaccactgttttaactatgaccactttgagcatcagtgcccggcactctttgccaaaagtgtcatatgccactgccatggattggttcatagctgtttgctttgcattcgtcttctctgcgcttatcgagttcgcagctgtcaactactttaccaatcttcagacacagaaggccaaaaggaaggcacagtttgcagccccacccacagtgacaatatcaaaagctactgaacctttggaagctgagattgttttgcatcctgactccaaatatcatctgaagaaaaggatcacttctctgtctttgccaatagtttcatcttccgaggccaataaagtgctcacgagagcgcccatcttacaatcaacacctgtcacacccccaccactctcgccagcctttggaggcaccagtaaaatagaccagtattctcgaattctcttcccagttgcatttgcaggattcaaccttgtgtactgggtagtttatctttccaaagatacaatggaagtcagtagcagtgttgaatagcttgcggccaggacaacctgaattctataagttcttgttttctgtttcctatgttttcttaaaaaatagcattgagacttgtgtagatgcttctcagaacatgaaatcaaattggaaatctgtaacgcagcttccgtaagcatgtgtgggcaaaaaagcaataatcctactcctcaaaatagaaagttgaagattgctgaaaaatatgacttttctgtatgttagagaaaaactttatgaggatgaaatgggttcaagatgaatttgtcaacttttgtcttccattgttcagtatttttaattgtcactgtaaataacatttaccacaaggcagataaaataagaaatgctgacacttccaaaggttgccttaaaatatgtttattttggcttagttcccgagagggcaaaatataaatacagtctaaatatttatcagtaggttaataccagcatgttggaggcctttatgctagtaaaatggctttcagtggcattgtaaagcctacattgagcttagccatttgtttttaacctcgctgtgctcttttacctcaataaaatgtggtgtttgtatacatataaattatacatagctcataaattatgtatgcatatgtacatagctgtagttggactaaaattcagtgtgttttatcctactaaattctccttttaaaataatacacttaccataattctatgaggttgtagaaaaaagtactcattataaggaagccttgtatattatgactatggttatctcttgtgttttccacatttccaattataacactaaataaaacaacaataaacatg

SEQ ID NO: 11797 - DNA, 2143 bp, Homo sapiens
  source 1..2143: mol_type = unassigned DNA
aatgcatgaaggaaactccgtttacacatgctcgtaggatcccctgcgtggaaacagcagcttgtctctgactacccggaggacatggagcaccccaaataggaactttagagggattgaaatctgttgcctgttccactaggaatattgtttgcaaggcacaaggtgtcttttggtagtgagcgcgctctgcgcatgcgcaggtccattcgggaattactgcccagcagccgactaagttgcattccttgaatcttcgcagaaaagacaattcttttaatcagagttagtaatgtggacagtacaaaatcgagagagtctggggcttctctctttccctgtgatgattaccatggtctgttgtgcacacagcaccaatgaacccagcaacatgtcatacgtgaaagagacagtggacagattgctcaaaggatatgacattcgcttgcggccggacttcggagggccccccgtcgacgttgggatgcggatcgatgtcgccagcatagacatggtctccgaagtgaatatggattatacactcaccatgtatttccagcagtcttggaaagacaaaaggctttcttattctggaatcccactgaacctcaccctagacaatagggtagctgaccaactctgggtaccagacacctactttctgaatgacaagaaatcatttgtgcatggggtcacagtgaaaaatcgaatgattcgactgcatcctgatggaacagttctctatggactccgaatcacaaccacagctgcatgtatgatggatcttcgaagatatccattggatgagcagaactgcaccctggagatcgaaagttatggctataccactgatgacattgaattttactggaatggaggagaaggggcagtcactggtgttaataaaatcgaacttcctcaattttcaattgttgactacaagatggtgtctaagaaggtggagttcacaacaggagcgtatccacgactgtcactaagttttcgtctaaagagaaacattggttacttcattttgcaaacctacatgccttctacactgattacaattctgtcctgggtgtctttttggatcaactatgatgcatctgcagccagagtcgcactaggaatcacgacagtgcttacaatgacaaccatcagcacccacctcagggagaccctgccaaagatcccttatgtcaaagcgattgatatttatctgatgggttgctttgtgtttgtgttcctggctctgctggagtatgcctttgtaaattacatcttctttgggaaaggccctcagaaaaagggagctagcaaacaagaccagagtgccaatgagaagaataaactggagatgaataaagtccaggtcgacgcccacggtaacattctcctcagcaccctggaaatccggaatgagacgagtggctcggaagtgctcacgagcgtgagcgaccccaaggccaccatgtactcctatgacagcgccagcatccagtaccgcaagcccctgagcagccgcgaggcctacgggcgcgccctggaccggcacggggtacccagcaaggggcgcatccgcaggcgtgcctcccagctcaaagtcaagatccccgacttgactgatgtgaattccatagacaagtggtcccgaatgtttttccccatcaccttttctctttttaatgtcgtctattggctttactatgtacactgaggtctgttctaatggttccatttagactactttcctcttctattgttttttaaccttacaggtccccaacagcgatactgctgtttctcgaggtaagagattcagccatccaattggttttaggtcttgcatatcagttttattactgcaccatgtttacttcaaaaagacaaaacaaaaaaaaaattatttttccagtctaccgtggtccaggttatcagctctttaagagctctattaattgccatgtttacaaacaaacacaaagagagaagttagacaggtagatctttagcagtcttttctagtttccctggatttcactgatttattttttagggaaaatgaaaagaggaccttgctgtccgcctgcactgcttcctggtaaactataacaaacttatgctgccaaaaaaaaaaaaaaaa

SEQ ID NO: 11798 - DNA, 1498 bp, Homo sapiens
  source 1..1498: mol_type = unassigned DNA
cttttaatcagagttagtaatgtggacagtacaaaatcgagagagtctggggcttctctctttccctgtgatgattaccatggtctgttgtgcacacagcaccaatgaacccagcaacatgtcatacgtgaaagagacagtggacagattgctcaaaggatatgacattcgcttgcggccggacttcggaggattatacactcaccatgtatttccagcagtcttggaaagacaaaaggctttcttattctggaatcccactgaacctcaccctagacaatagggtagctgaccaactctgggtaccagacacctactttctgaatgacaagaaatcatttgtgcatggggtcacagtgaaaaatcgaatgattcgactgcatcctgatggaacagttctctatggactccgaatcacaaccacagctgcatgtatgatggatcttcgaagatatccattggatgagcagaactgcaccctggagatcgaaagttatggctataccactgatgacattgaattttactggaatggaggagaaggggcagtcactggtgttaataaaatcgaacttcctcaattttcaattgttgactacaagatggtgtctaagaaggtggagttcacaacaggagcgtatccacgactgtcactaagttttcgtctaaagagaaacattggttacttcattttgcaaacctacatgccttctacactgattacaattctgtcctgggtgtctttttggatcaactatgatgcatctgcagccagagtcgcactaggaatcacgacagtgcttacaatgacaaccatcagcacccacctcagggagaccctgccaaagatcccttatgtcaaagcgattgatatttatctgatgggttgctttgtgtttgtgttcctggctctgctggagtatgcctttgtaaattacatcttctttgggaaaggccctcagaaaaagggagctagcaaacaagaccagagtgccaatgagaagaataaactggagatgaataaagtccaggtcgacgcccacggtaacattctcctcagcaccctggaaatccggaatgagacgagtggctcggaagtgctcacgagcgtgagcgaccccaaggccaccatgtactcctatgacagcgccagcatccagtaccgcaagcccctgagcagccgcgaggcctacgggcgcgccctggaccggcacggggtacccagcaaggggcgcatccgcaggcgtgcctcccagctcaaagtcaagatccccgacttgactgatgtgaattccatagacaagtggtcccgaatgtttttccccatcaccttttctctttttaatgtcgtctattggctttactatgtacactgaggtctgttctaatggttccatttagactactttcctcttctattgttttttaaccttacaggtccccaacagcgatactgctgtttctcgaggtaagagattcagccatccaattggtttta

SEQ ID NO: 11799 - DNA, 7385 bp, Homo sapiens
  source 1..7385: mol_type = unassigned DNA
gcgcggggaagggaagaagaggacgaggtggcgcggagaccgcgggagaacacagtgcctccggaggaaatctgctcggtccccggcagccgccgcttcccctttgatgttttggtacgccgtgcgcatgcgcctcacattagaattactgcactgggcagactaagttggatctcctctcttcagtgaaaccctcaattccatcaaaaactaaagggatgtggagagtgcggaaaaggggctactttgggatttggtccttccccttaataatcgccgctgtctgtgcgcagagtgtcaatgaccctagtaatatgtcgctggttaaagagacggtggatagactcctgaaaggctatgacattcgtctgagaccagattttggaggtccccccgtggctgtggggatgaacattgacattgccagcatcgatatggtttctgaagtcaatatggattataccttgacaatgtactttcaacaagcctggagagataagaggctgtcctataatgtaatacctttaaacttgactctggacaacagagtggcagaccagctctgggtgcctgatacctatttcctgaacgataagaagtcatttgtgcacggagtgactgttaagaaccgcatgattcgcctgcatcctgatggcaccgtcctttatggactcagaatcacaaccacagctgcctgcatgatggacctaaggaggtacccactggatgaacaaaactgcaccttggaaattgagagctatggatacacaactgatgacattgagttttactggcgtggcgatgataatgcagtaacaggagtaacgaaaattgaacttccacagttctctattgtagattacaaacttatcaccaagaaggttgttttttccacaggttcctatcccaggttatccctcagctttaagcttaagagaaacattggctactttatcctgcaaacatacatgccttccatcctgattaccatcctctcctgggtctccttctggattaattacgatgcttcagctgcaagggtggcattaggaatcacaactgtcctcacaatgaccacaatcaacacccacctccgggaaactctccctaaaatcccctatgtgaaggccattgacatgtacctgatggggtgctttgtcttcgttttcatggcccttctggaatatgccctagtcaactacatcttctttgggagggggccccaacgccaaaagaaagcagctgagaaggctgccagtgccaacaatgagaagatgcgcctggatgtcaacaagattttttataaagatattaaacaaaatgggacccaatatcgatccttgtgggaccctactggaaacctctccccaactagacggactaccaattacgatttctctctgtatacgatggacccccatgagaacatcttactgagcactctcgagataaaaaatgaaatggccacatctgaggctgtgatgggacttggagaccccagaagcacaatgctagcctatgatgcctccagcatccagtatcggaaagctgggttgcccaggcatagttttggccgaaatgctctggaacgacatgtggcgcaaaagaaaagtcgcctgaggagacgcgcctcccaactgaaaatcaccatccctgacttgactgatgtgaatgccatagatcggtggtcccgcatattcttcccagtggttttttccttcttcaacatcgtctattggctttattatgtgaactaaaacatggcctcccactggaagcaaggactagattcctcctcaaaccagttgtacagcctgatgtaggacttggaaaacacatcaatccaggacaaaagtgacgctaaaataccttagttgctggcctatcctgtggtccatttcataccatttgggttgcttctgctaagtaatgaatacactaaggtccttgtggttttccagttaaaacgcaagtgatttttacacatggtggctagacagcctgagtgctccatgttgtctgtttagtatgcagcctactcagaggggaataatttggaagatattcttagaaggctcaacagcattgtcagtcatttggtcataaccagatactcctcatcttcctttttaaggtcggcatgctgttgagatggcattgtccttatgaaacattatctgtaatgccatgcaaacacattacttgaagatgatctatgattttcttactgagatgataatggtgtcatgggaagattattcccactggtttctaaaagattctcttgtgatttgagcaggctaggggaatcaagacagagactcaggaaaccgatttggccagtccctttgcttgagcacggagaatcaactatgatgtctttcattttggcatttagagatgaggagacttctggacaatatcatgcatggtggccaagaaaatttttgctaaacggctatttcctaggtggttaaagtaagagttaacaacacagagcagagtagaaaatcagaaacgacggttgtaacaaaaagcaagcaagcaagaaagcatgacccttatcagctccacacagcatctggtctatacatactgtgtctagtggcagagggtgagtaagagagattgtttttccaacatcactagcttttgacagcatacctaaagaggtttttatagtttaatcgaagataaccatgaaatacaaaaattagagaaatgagaattgtcttagatattcaggttagattcagagtcattcaaatatacaaatacagagcacaaactagcaaacagattgtttttctcagacgaagtcagctgtccctgcaatttttgtccctataattttatttcttaatttaatagagtatttcaagagaaggatttgttcatcactttaaaggattcatggtcctctccagctttttttttgcttccaaaattctgattatattcttaggagactggcaaagtaaggctttggagagattgagtgaactatattttcttatatgcaatgaaattcaccattgtatttttcaaagcaaataatacttcaaggagtatgaacacacagagagttaatttgtgcattcattggtttggggcttgattttcttaagagtgctttcattgtatatgttgcaatctgcctaatcaaggaaaatatgaaaactagtggaaaataataacaaagccacattaacatgataaatgttatgagcctcagttgatattgcagaaaaatatataactgttaatcaggcaggcatgatgtattttttttctatttttaagttatgccattgtgcttctttctacactaattggacataagcattcatatgttggacaagaggagaataagctaatatgtcttccttctatcaatataaggctcatattttgcttttcttatagaaaatagtgaattgctaaattttccttaaagttgaatttgattgaactttttcttggaggatgactttgctatttctattttgaaaacaaagaaagctcttctttttagagtaatatccctaattgtgcatagcagccagtatccacctgtgaataatgtatgttttcttgattccttgtttccttcatgatttagcagcttggaatatgatggagtactattgcccttgcattccagctgtccaagaacaacaacaaacctttatccttcagctttctgaatttgccccaaaatggaatggtattttgtttttcaccagtgtaggaaaccttggccattatattttgattacataatcttgagcacctctgagtatcatctttgggcagaatctgaccaagattcttctcacaggctcagagtagagattcctcatgtttctccaggacacactttctcctaggcaatcattttggggcatcacactaagtaaagtgcctgccccttgtcaacagggggtaaagtttgactaaaaaacatcaggaaggaacatattgataactcaggggcacaactccaaaatgccattctgaaaaggctcttctagagtcaactcagagcccaagtgtagaagtgggctcttatgtgcaatcactgtacaagccataaaaatctttgatattgccatttatgattacaacaaaattttagatgtccaagaaagtcaacagaacaatccagatcaaagtgtagagaagcatctttgcagcttgagcctcaaaagcataaaaccaggaattcatttctgctctcagtgatacaagaaacaaggcaaaggaaaaaagatgggaccttagaagcaatgccctagagtaaaaagcatacattggcactcagtaaccacagagatagaaacaactgactcagcctctccagaaataacagtagatgtagaatttgttcttaaatatatgtttcgttgaaatgaaatgcagtcatcaaatgcgaggaggggtgctagacctgataagtctaggaagaccagtcagcttgatagccagttgttaaactaaaggaccacaaaggtgtgtttagtagttctgatatgggattactatcagtttatacatatgtatagattttcttttaattataaacagccagatagccagcaattaaggtgttttttcatctttgtgaaattcatggacaaattctgactctaaaatgcacagtctacatgaaatctttgatctcaatctgtatatatatatattgtacatgaccgctagtaggtatgaaatgcatttcagagttgaaaactcatgcaacataatcatgtgtttgcataaggaatgttaaaattctttctactacaatttattaacaggggaaaagattcaagcagtgccatctagaccttttctcttctcatttcttcaaaagcagtgctaagtaaaataataataataaaaatggtttatgaaccaaaagactttacattctagcattaggaacacacacaaaaaaatctgtcagcttacaaaagcacaacacataaagaaagagcagtggaatgcgtaatggggaaatgaatcatgtttaaagcaagacttgcattaaattggcaactaagataatttccattttctataggtaaccgtgttccagtttaatgattaccttcatactcaacaagaaaaatggcaaagcaacatcatcaaaataggtcttacaacatatctacatgtatatatgtgtatatatagattcatataaacatacatacatatatatgcattcatatgttggaaaacaaaaggaataagctaatatgttttatttccttcattaaaccagtatatgagtatttttaatttggcaaacaaaaatcaacatactgaaataagtaatacagggtactgagcatttctctatcagcaaatcaatgcctacagtttttatgaaccattgcacagttcaactcgacaatagtactgtaccccagaacatcagaagttaagtagttgtcacattgcttgtctaattgctctctttttcaaggaaacaaataacattgtccattggtgagtcaaaaacaaacatgtcttaagaaaatgaaaaatgataaaaattcctccaaagaggaagaaaaaaaaaaaactaaaccccaccatgttggttagggcaaaatactaagtattcacaactgtagcaatcatgccatttggctaaatgtacagagtacatgtaatgtgagcaaccataactttcactgaacgtgtgtaaatattaaaacagatttcttaaatatttttaacttctaatttgtattttatggtaaggcaatgtgctaattccgtttatggcttaagttgatgtgttataatatgtaaataattaaacatgctgtaaatgaatagtcaatagatacaaataattgtttagtttttttcttaatttttatttattttttactaagtactattactgcagtgcccccagcagagtaatttaaacacccttttgcataaatggtttgggaatcccagacagaagggtttcaatttgctatcacacacacagtcacacacagtcacacacacacacacacacacactcaaacacacataatcttttgctcacccactctgtctctctgcccgtctatgggaaacactctactatttatgtagtcaatataacaaacaagagatagcctttgaaatggcaattgggaaaagcaaaaatgatcattgataacttaatagacttttttatatgtcagagttcaagaaaccaaagtttgcaacttaaatctcagttttcaaacagtaaaagtttgtatagatggcactacagaaaaataaaaatggttattcctaccagctccagaaatgtgttacacaatatacactagaagactttttttttaataatagtattttgtccttaggtagtattgttcctttcaaccaaagactccagaattattgaaaaacaaaaaaggaaaaaaaaaatgagataatgggggaaaaaaaggacgctgcttcacaccaaaggtttaaaaaaatattttccaaatgcactaggaacattgtaaaaaccagaaaggagtgaacagaatgctaatgaagatactgccctaaagaaatctgtacaaaaaaaaaaaaaaaaagcagcactcttaaaaagctactaggtttttggaaattgaagtaaaatatttctgtagatatattcaaaattctgacatcaaattttaatttgcttaaagaagttttatttgtgatgaagatcaatatgattcaaatgatgaaaaacaaaactgtatgtcctttgagttcccaaaccaaatgtcactgccgtgtcacatcctctaatctgatgcccatgtgtgtgtccttgcgccatttgaagcaagttgacagttccatcagtttgtttttgtttttgtttttggttcaataatttgagttcaaccatcgtcattttaaacataattaatcccaacaaagttgcctatagtttaatttaaacctcacagcatttttaatttattttgcatgggtgtttaaatagttctgttacgaatattgtccctgcacagttctaaattgtccttttataaaaaaaaaaagtgatattctagtttcttcacaatgtagtgattatcagccttactaattaccttgtagcctttcttaatatgcacataatgcacattttccgatggctagaaaaatgcaaaacacagtggatatcattgcatctattttcatgtctttctaaaaacaggactattaaaatctctgggatacatgagatagtaaaaaatgaggattataaatgaatagcacataagaattattttcttgaatttaaacttattgcagccagtttcagcatgtaaatatataataatgttggctagtgtgtaattcttgaactaagaaat

SEQ ID NO: 11800 - DNA, 1963 bp, Homo sapiens
  source 1..1963: mol_type = unassigned DNA
accccaagcttgctgcctcctccgggtcccggcggccacggcgaggcggcctgagcttcaggaggaagggaagaggcagcctctgggtgtgcgagtcccctgggcgcggggaagggaagaagaggacgaggtggcgcggagaccgcgggagaacacagtgcctccggaggaaatctgctcggtccccggcagccgccgcttcccctttgatgttttggtacgccgtgcgcatgcgcctcacattagaattactgcactgggcagactaagttggatctcctctcttcagtgaaaccctcaattccatcaaaaactaaagggatgtggagagtgcggaaaaggggctactttgggatttggtccttccccttaataatcgccgctgtctgtgcgcagagtgtcaatgaccctagtaatatgtcgctggttaaagagacggtggatagactcctgaaaggctatgacattcgtctgagaccagattttggaggtccccccgtggctgtggggatgaacattgacattgccagcatcgatatggtttctgaagtcaatatggattataccttgacaatgtactttcaacaagcctggagagataagaggctgtcctataatgtaatacctttaaacttgactctggacaacagagtggcagaccagctctgggtgcctgatacctatttcctgaacgataagaagtcatttgtgcacggagtgactgttaagaaccgcatgattcgcctgcatcctgatggcaccgtcctttatggactcagaatcacaaccacagctgcctgcatgatggacctaaggaggtacccactggatgaacaaaactgcaccttggaaattgagagctatggatacacaactgatgacattgagttttactggcgtggcgatgataatgcagtaacaggagtaacgaaaattgaacttccacagttctctattgtagattacaaacttatcaccaagaaggttgttttttccacaggttcctatcccaggttatccctcagctttaagcttaagagaaacattggctactttatcctgcaaacatacatgccttccatcctgattaccatcctctcctgggtctccttctggattaattacgatgcttcagctgcaagggtggcattaggaatcacaactgtcctcacaatgaccacaatcaacacccacctccgggaaactctccctaaaatcccctatgtgaaggccattgacatgtacctgatggggtgctttgtcttcgttttcatggcccttctggaatatgccctagtcaactacatcttctttgggagggggccccaacgccaaaagaaagcagctgagaaggctgccagtgccaacaatgagaagatgcgcctggatgtcaacaagatggacccccatgagaacatcttactgagcactctcgagataaaaaatgaaatggccacatctgaggctgtgatgggacttggagaccccagaagcacaatgctagcctatgatgcctccagcatccagtatcggaaagctgggttgcccaggcatagttttggccgaaatgctctggaacgacatgtggcgcaaaagaaaagtcgcctgaggagacgcgcctcccaactgaaaatcaccatccctgacttgactgatgtgaatgccatagatcggtggtcccgcatattcttcccagtggttttttccttcttcaacatcgtctattggctttattatgtgaactaaaacatggcctcccactggaagcaaggactagattcctcctcaaaccagttgtacagcctgatgtaggacttggaaaacacatcaatccaggacaaaagtgacgctaaaataccttagttgctggcctatcctgtggtccatttcataccatttgggttgcttctgctaagtaatgaatacactaaggtccttgtggttttccagttaaaacgcaagt

SEQ ID NO: 11801 - DNA, 7191 bp, Homo sapiens
  source 1..7191: mol_type = unassigned DNA
atgtggagagtgcggaaaaggggctactttgggatttggtccttccccttaataatcgccgctgtctgtgcgcagagtgtcaatgaccctagtaatatgtcgctggttaaagagacggtggatagactcctgaaaggctatgacattcgtctgagaccagattttggaggtccccccgtggctgtggggatgaacattgacattgccagcatcgatatggtttctgaagtcaatatggattataccttgacaatgtactttcaacaagcctggagagataagaggctgtcctataatgtaatacctttaaacttgactctggacaacagagtggcagaccagctctgggtgcctgatacctatttcctgaacgataagaagtcatttgtgcacggagtgactgttaagaaccgcatgattcgcctgcatcctgatggcaccgtcctttatggactcagaatcacaaccacagctgcctgcatgatggacctaaggaggtacccactggatgaacaaaactgcaccttggaaattgagagctatggatacacaactgatgacattgagttttactggcgtggcgatgataatgcagtaacaggagtaacgaaaattgaacttccacagttctctattgtagattacaaacttatcaccaagaaggttgttttttccacaggttcctatcccaggttatccctcagctttaagcttaagagaaacattggctactttatcctgcaaacatacatgccttccatcctgattaccatcctctcctgggtctccttctggattaattacgatgcttcagctgcaagggtggcattaggaatcacaactgtcctcacaatgaccacaatcaacacccacctccgggaaactctccctaaaatcccctatgtgaaggccattgacatgtacctgatggggtgctttgtcttcgttttcatggcccttctggaatatgccctagtcaactacatcttctttgggagggggccccaacgccaaaagaaagcagctgagaaggctgccagtgccaacaatgagaagatgcgcctggatgtcaacaagattttttataaagatattaaacaaaatgggacccaatatcgatccttgtgggaccctactggaaacctctccccaactagacggactaccaattacgatttctctctgtatacgatggacccccatgagaacatcttactgagcactctcgagataaaaaatgaaatggccacatctgaggctgtgatgggacttggagaccccagaagcacaatgctagcctatgatgcctccagcatccagtatcggaaagctgggttgcccaggcatagttttggccgaaatgctctggaacgacatgtggcgcaaaagaaaagtcgcctgaggagacgcgcctcccaactgaaaatcaccatccctgacttgactgatgtgaatgccatagatcggtggtcccgcatattcttcccagtggttttttccttcttcaacatcgtctattggctttattatgtgaactaaaacatggcctcccactggaagcaaggactagattcctcctcaaaccagttgtacagcctgatgtaggacttggaaaacacatcaatccaggacaaaagtgacgctaaaataccttagttgctggcctatcctgtggtccatttcataccatttgggttgcttctgctaagtaatgaatacactaaggtccttgtggttttccagttaaaacgcaagtgatttttacacatggtggctagacagcctgagtgctccatgttgtctgtttagtatgcagcctactcagaggggaataatttggaagatattcttagaaggctcaacagcattgtcagtcatttggtcataaccagatactcctcatcttcctttttaaggtcggcatgctgttgagatggcattgtccttatgaaacattatctgtaatgccatgcaaacacattacttgaagatgatctatgattttcttactgagatgataatggtgtcatgggaagattattcccactggtttctaaaagattctcttgtgatttgagcaggctaggggaatcaagacagagactcaggaaaccgatttggccagtccctttgcttgagcacggagaatcaactatgatgtctttcattttggcatttagagatgaggagacttctggacaatatcatgcatggtggccaagaaaatttttgctaaacggctatttcctaggtggttaaagtaagagttaacaacacagagcagagtagaaaatcagaaacgacggttgtaacaaaaagcaagcaagcaagaaagcatgacccttatcagctccacacagcatctggtctatacatactgtgtctagtggcagagggtgagtaagagagattgtttttccaacatcactagcttttgacagcatacctaaagaggtttttatagtttaatcgaagataaccatgaaatacaaaaattagagaaatgagaattgtcttagatattcaggttagattcagagtcattcaaatatacaaatacagagcacaaactagcaaacagattgtttttctcagacgaagtcagctgtccctgcaatttttgtccctataattttatttcttaatttaatagagtatttcaagagaaggatttgttcatcactttaaaggattcatggtcctctccagctttttttttgcttccaaaattctgattatattcttaggagactggcaaagtaaggctttggagagattgagtgaactatattttcttatatgcaatgaaattcaccattgtatttttcaaagcaaataatacttcaaggagtatgaacacacagagagttaatttgtgcattcattggtttggggcttgattttcttaagagtgctttcattgtatatgttgcaatctgcctaatcaaggaaaatatgaaaactagtggaaaataataacaaagccacattaacatgataaatgttatgagcctcagttgatattgcagaaaaatatataactgttaatcaggcaggcatgatgtattttttttctatttttaagttatgccattgtgcttctttctacactaattggacataagcattcatatgttggacaagaggagaataagctaatatgtcttccttctatcaatataaggctcatattttgcttttcttatagaaaatagtgaattgctaaattttccttaaagttgaatttgattgaactttttcttggaggatgactttgctatttctattttgaaaacaaagaaagctcttctttttagagtaatatccctaattgtgcatagcagccagtatccacctgtgaataatgtatgttttcttgattccttgtttccttcatgatttagcagcttggaatatgatggagtactattgcccttgcattccagctgtccaagaacaacaacaaacctttatccttcagctttctgaatttgccccaaaatggaatggtattttgtttttcaccagtgtaggaaaccttggccattatattttgattacataatcttgagcacctctgagtatcatctttgggcagaatctgaccaagattcttctcacaggctcagagtagagattcctcatgtttctccaggacacactttctcctaggcaatcattttggggcatcacactaagtaaagtgcctgccccttgtcaacagggggtaaagtttgactaaaaaacatcaggaaggaacatattgataactcaggggcacaactccaaaatgccattctgaaaaggctcttctagagtcaactcagagcccaagtgtagaagtgggctcttatgtgcaatcactgtacaagccataaaaatctttgatattgccatttatgattacaacaaaattttagatgtccaagaaagtcaacagaacaatccagatcaaagtgtagagaagcatctttgcagcttgagcctcaaaagcataaaaccaggaattcatttctgctctcagtgatacaagaaacaaggcaaaggaaaaaagatgggaccttagaagcaatgccctagagtaaaaagcatacattggcactcagtaaccacagagatagaaacaactgactcagcctctccagaaataacagtagatgtagaatttgttcttaaatatatgtttcgttgaaatgaaatgcagtcatcaaatgcgaggaggggtgctagacctgataagtctaggaagaccagtcagcttgatagccagttgttaaactaaaggaccacaaaggtgtgtttagtagttctgatatgggattactatcagtttatacatatgtatagattttcttttaattataaacagccagatagccagcaattaaggtgttttttcatctttgtgaaattcatggacaaattctgactctaaaatgcacagtctacatgaaatctttgatctcaatctgtatatatatatattgtacatgaccgctagtaggtatgaaatgcatttcagagttgaaaactcatgcaacataatcatgtgtttgcataaggaatgttaaaattctttctactacaatttattaacaggggaaaagattcaagcagtgccatctagaccttttctcttctcatttcttcaaaagcagtgctaagtaaaataataataataaaaatggtttatgaaccaaaagactttacattctagcattaggaacacacacaaaaaaatctgtcagcttacaaaagcacaacacataaagaaagagcagtggaatgcgtaatggggaaatgaatcatgtttaaagcaagacttgcattaaattggcaactaagataatttccattttctataggtaaccgtgttccagtttaatgattaccttcatactcaacaagaaaaatggcaaagcaacatcatcaaaataggtcttacaacatatctacatgtatatatgtgtatatatagattcatataaacatacatacatatatatgcattcatatgttggaaaacaaaaggaataagctaatatgttttatttccttcattaaaccagtatatgagtatttttaatttggcaaacaaaaatcaacatactgaaataagtaatacagggtactgagcatttctctatcagcaaatcaatgcctacagtttttatgaaccattgcacagttcaactcgacaatagtactgtaccccagaacatcagaagttaagtagttgtcacattgcttgtctaattgctctctttttcaaggaaacaaataacattgtccattggtgagtcaaaaacaaacatgtcttaagaaaatgaaaaatgataaaaattcctccaaagaggaagaaaaaaaaaaaactaaaccccaccatgttggttagggcaaaatactaagtattcacaactgtagcaatcatgccatttggctaaatgtacagagtacatgtaatgtgagcaaccataactttcactgaacgtgtgtaaatattaaaacagatttcttaaatatttttaacttctaatttgtattttatggtaaggcaatgtgctaattccgtttatggcttaagttgatgtgttataatatgtaaataattaaacatgctgtaaatgaatagtcaatagatacaaataattgtttagtttttttcttaatttttatttattttttactaagtactattactgcagtgcccccagcagagtaatttaaacacccttttgcataaatggtttgggaatcccagacagaagggtttcaatttgctatcacacacacagtcacacacagtcacacacacacacacacacacactcaaacacacataatcttttgctcacccactctgtctctctgcccgtctatgggaaacactctactatttatgtagtcaatataacaaacaagagatagcctttgaaatggcaattgggaaaagcaaaaatgatcattgataacttaatagacttttttatatgtcagagttcaagaaaccaaagtttgcaacttaaatctcagttttcaaacagtaaaagtttgtatagatggcactacagaaaaataaaaatggttattcctaccagctccagaaatgtgttacacaatatacactagaagactttttttttaataatagtattttgtccttaggtagtattgttcctttcaaccaaagactccagaattattgaaaaacaaaaaaggaaaaaaaaaatgagataatgggggaaaaaaaggacgctgcttcacaccaaaggtttaaaaaaatattttccaaatgcactaggaacattgtaaaaaccagaaaggagtgaacagaatgctaatgaagatactgccctaaagaaatctgtacaaaaaaaaaaaaaaaaagcagcactcttaaaaagctactaggtttttggaaattgaagtaaaatatttctgtagatatattcaaaattctgacatcaaattttaatttgcttaaagaagttttatttgtgatgaagatcaatatgattcaaatgatgaaaaacaaaactgtatgtcctttgagttcccaaaccaaatgtcactgccgtgtcacatcctctaatctgatgcccatgtgtgtgtccttgcgccatttgaagcaagttgacagttccatcagtttgtttttgtttttgtttttggttcaataatttgagttcaaccatcgtcattttaaacataattaatcccaacaaagttgcctatagtttaatttaaacctcacagcatttttaatttattttgcatgggtgtttaaatagttctgttacgaatattgtccctgcacagttctaaattgtccttttataaaaaaaaaaagtgatattctagtttcttcacaatgtagtgattatcagccttactaattaccttgtagcctttcttaatatgcacataatgcacattttccgatggctagaaaaatgcaaaacacagtggatatcattgcatctattttcatgtctttctaaaaacaggactattaaaatctctgggatacatgagatagtaaaaaatgaggattataaatgaatagcacataagaattattttcttgaatttaaacttattgcagccagtttcagcatgtaaatatataataatgttggctagtgtgtaattcttgaactaagaaatataaataaaaataaaaagattgtg

SEQ ID NO: 11802 - DNA, 1349 bp, Homo sapiens
  source 1..1349: mol_type = unassigned DNA
aagttggatctcctctcttcagtgaaaccctcaattccatcaaaaactaaagggatgtggagagtgcggaaaaggggctactttgggatttggtccttccccttaataatcgccgctgtctgtgcgcagaggtccccccgtggctgtggggatgaacattgacattgccagcatcgatatggtttctgaagtcaatatgaatcacaaccacagctgcctgcatgatggacctaaggaggtacccactggatgaacaaaactgcaccttggaaattgagagctatggatacacaactgatgacattgagttttactggcgtggcgatgataatgcagtaacaggagtaacgaaaattgaacttccacagttctctattgtagattacaaacttatcaccaagaaggttgttttttccacaggttcctatcccaggttatccctcagctttaagcttaagagaaacattggctactttatcctgcaaacatacatgccttccatcctgattaccatcctctcctgggtctccttctggattaattacgatgcttcagctgcaagggtggcattaggaatcacaactgtcctcacaatgaccacaatcaacacccacctccgggaaactctccctaaaatcccctatgtgaaggccattgacatgtacctgatggggtgctttgtcttcgttttcatggcccttctggaatatgccctagtcaactacatcttctttgggagggggccccaacgccaaaagaaagcagctgagaaggctgccagtgccaacaatgagaagatgcgcctggatgtcaacaagatggacccccatgagaacatcttactgagcactctcgagataaaaaatgaaatggccacatctgaggctgtgatgggacttggagaccccagaagcacaatgctagcctatgatgcctccagcatccagtatcggaaagctgggttgcccaggcatagttttggccgaaatgctctggaacgacatgtggcgcaaaagaaaagtcgcctgaggagacgcgcctcccaactgaaaatcaccatccctgacttgactgatgtgaatgccatagatcggtggtcccgcatattcttcccagtggttttttccttcttcaacatcgtctattggctttattatgtgaactaaaacatggcctcccactggaagcaaggactagattcctcctcaaaccagttgtacagcctgatgtaggacttggaaaacacatcaatccaggacaaaagtgacgctaaaataccttagttgctggcctatcctgtggtccatttcataccatttgggttgcttctgctaagtaatgaatacact

SEQ ID NO: 11803 - DNA, 1779 bp, Homo sapiens
  source 1..1779: mol_type = unassigned DNA
gagtcccctgggcgcggggaagggaagaagaggacgaggtggcgcggagaccgcgggagaacacagtgcctccggaggaaatctgctcggtccccggcagccgccgcttcccctttgatgttttggtacgccgtgcgcatgcgcctcacattagaattactgcactgggcagactaagttggatctcctctcttcagtgaaaccctcaattccatcaaaaactaaagggatgtggagagtgcggaaaaggggctactttgggatttggtccttccccttaataatcgccgctgtctgtgcgcagaggtccccccgtggctgtggggatgaacattgacattgccagcatcgatatggtttctgaagtcaatatggattataccttgacaatgtactttcaacaagcctggagagataagaggctgtcctataatgtaatacctttaaacttgactctggacaacagagtggcagaccagctctgggtgcctgatacctatttcctgaacgataagaagtcatttgtgcacggagtgactgttaagaaccgcatgattcgcctgcatcctgatggcaccgtcctttatggactcagaatcacaaccacagctgcctgcatgatggacctaaggaggtacccactggatgaacaaaactgcaccttggaaattgagagctatggatacacaactgatgacattgagttttactggcgtggcgatgataatgcagtaacaggagtaacgaaaattgaacttccacagttctctattgtagattacaaacttatcaccaagaaggttgttttttccacaggttcctatcccaggttatccctcagctttaagcttaagagaaacattggctactttatcctgcaaacatacatgccttccatcctgattaccatcctctcctgggtctccttctggattaattacgatgcttcagctgcaagggtggcattaggaatcacaactgtcctcacaatgaccacaatcaacacccacctccgggaaactctccctaaaatcccctatgtgaaggccattgacatgtacctgatggggtgctttgtcttcgttttcatggcccttctggaatatgccctagtcaactacatcttctttgggagggggccccaacgccaaaagaaagcagctgagaaggctgccagtgccaacaatgagaagatgcgcctggatgtcaacaagatggacccccatgagaacatcttactgagcactctcgagataaaaaatgaaatggccacatctgaggctgtgatgggacttggagaccccagaagcacaatgctagcctatgatgcctccagcatccagtatcggaaagctgggttgcccaggcatagttttggccgaaatgctctggaacgacatgtggcgcaaaagaaaagtcgcctgaggagacgcgcctcccaactgaaaatcaccatccctgacttgactgatgtgaatgccatagatcggtggtcccgcatattcttcccagtggttttttccttcttcaacatcgtctattggctttattatgtgaactaaaacatggcctcccactggaagcaaggactagattcctcctcaaaccagttgtacagcctgatgtaggacttggaaaacacatcaatccaggacaaaagtgacgctaaaataccttagttgctggcctatcctgtggtccatttcataccatttgggttgcttctgctaagtaatgaatacactaaggtccttgtggttttccagttaaaacgcaagt

SEQ ID NO: 11804 - DNA, 2030 bp, Homo sapiens
  source 1..2030: mol_type = unassigned DNA
gcgcggggaagggaagaagaggacgaggtggcgcggagaccgcgggagaacacagtgcctccggaggtgaggggctcttcctcattttgcctgccttctagggaccgctccggcttcttgtatccagaggtacagcccctgaacagccgggagtccccgtcccctgtcccggacgaggggccgggggcgccagctccgcacgccgcgggagtgggcggcgagcgcgggcctgcgaggaaatctgctcggtccccggcagccgccgcttcccctttgatgttttggtacgccgtgcgcatgcgcctcacattagaattactgcactgggcagactaagttggatctcctctcttcagtgaaaccctcaattccatcaaaaactaaagggatgtggagagtgcggaaaaggggctactttgggatttggtccttccccttaataatcgccgctgtctgtgcgcagagtgtcaatgaccctagtaatatgtcgctggttaaagagacggtggatagactcctgaaaggctatgacattcgtctgagaccagattttggaggtccccccgtggctgtggggatgaacattgacattgccagcatcgatatggtttctgaagtcaatatggattataccttgacaatgtactttcaacaagcctggagagataagaggctgtcctataatgtaatacctttaaacttgactctggacaacagagtggcagaccagctctgggtgcctgatacctatttcctgaacgataagaagtcatttgtgcacggagtgactgttaagaaccgcatgattcgcctgcatcctgatggcaccgtcctttatggactcagaatcacaaccacagctgcctgcatgatggacctaaggaggtacccactggatgaacaaaactgcaccttggaaattgagagctatggatacacaactgatgacattgagttttactggcgtggcgatgataatgcagtaacaggagtaacgaaaattgaacttccacagttctctattgtagattacaaacttatcaccaagaaggttgttttttccacaggttcctatcccaggttatccctcagctttaagcttaagagaaacattggctactttatcctgcaaacatacatgccttccatcctgattaccatcctctcctgggtctccttctggattaattacgatgcttcagctgcaagggtggcattaggaatcacaactgtcctcacaatgaccacaatcaacacccacctccgggaaactctccctaaaatcccctatgtgaaggccattgacatgtacctgatggggtgctttgtcttcgttttcatggcccttctggaatatgccctagtcaactacatcttctttgggagggggccccaacgccaaaagaaagcagctgagaaggctgccagtgccaacaatgagaagatgcgcctggatgtcaacaagatggacccccatgagaacatcttactgagcactctcgagataaaaaatgaaatggccacatctgaggctgtgatgggacttggagaccccagaagcacaatgctagcctatgatgcctccagcatccagtatcggaaagctgggttgcccaggcatagttttggccgaaatgctctggaacgacatgtggcgcaaaagaaaagtcgcctgaggagacgcgcctcccaactgaaaatcaccatccctgacttgactgatgtgaatgccatagatcggtggtcccgcatattcttcccagtggttttttccttcttcaacatcgtctattggctttattatgtgaactaaaacatggcctcccactggaagcaaggactagattcctcctcaaaccagttgtacagcctgatgtaggacttggaaaacacatcaatccaggacaaaagtgacgctaaaataccttagttgctggcctatcctgtggtccatttcataccatttgggttgcttctgctaagtaatgaatacactaaggtccttgtggttttccagttaaaacgcaagt

SEQ ID NO: 11805 - DNA, 3107 bp, Homo sapiens
  source 1..3107: mol_type = unassigned DNA
tttggctgctcggagagtaggggggagagcggatcccagcaggttaggccggaggaacagcgccatgtgctccgggctcctggagctcctgctgcccatctggctctcctggaccctggggacccgaggctctgagccccgcagtgtgaacgatcccgggaacatgtcctttgtgaaggagacggtggacaagctgttgaaaggctacgacattcgcctaagacccgacttcgggggtcccccggtctgcgtggggatgaacatcgacatcgccagcatcgacatggtttccgaagtcaacatggattataccttaaccatgtattttcaacaatattggagagataaaaggctcgcctattctgggatccctctcaacctcacgcttgacaatcgagtggctgaccagctatgggtgcccgacacatatttcttaaatgacaaaaagtcatttgtgcatggagtgacagtgaaaaaccgcatgatccgtcttcaccctgatgggacagtgctgtatgggctcagaatcaccacgacagcagcatgcatgatggacctcaggagataccccctggacgagcagaactgcactctggaaattgaaagctatggctacaccacggatgacattgagttttactggcgaggcggggacaaggctgttaccggagtggaaaggattgagctcccgcagttctccatcgtggagcaccgtctggtctcgaggaatgttgtcttcgccacaggtgcctatcctcgactgtcactgagctttcggttgaagaggaacattggatacttcattcttcagacttatatgccctctatactgataacgattctgtcgtgggtgtccttctggatcaattatgatgcatctgctgctagagttgccctcgggatcacaactgtgctgacaatgacaaccatcaacacccaccttcgggagaccttgcccaaaatcccctatgtcaaagccattgacatgtaccttatgggctgcttcgtctttgtgttcctggcccttctggagtatgcctttgtcaactacattttctttggaagaggccctcaaaggcagaagaagcttgcagaaaagacagccaaggcaaagaatgaccgttcaaagagcgaaagcaaccgggtggatgctcatggaaatattctgttgacatcgctggaagttcacaatgaaatgaatgaggtctcaggcggcattggcgataccaggaattcagcaatatcctttgacaactcaggaatccagtacaggaaacagagcatgcctcgagaagggcatgggcgattcctgggggacagaagcctcccgcacaagaagacccatctacggaggaggtcttcacagctcaaaattaaaatacctgatctaaccgatgtgaatgccatagacagatggtccaggatcgtgtttccattcactttttctcttttcaacttagtttactggctgtactatgttaactgagtgactgtacttgatttttcaaagacttcatttaacactgagtgaaatattactctgcctgtcaagtttttatacctgtacacacacagacacacaagcagacacacacatatatacatacgcaattgtatatatatgtgaactttctcagcatatatataaaatacacgtgtatatgaggatgtatgtgtatatgtttatacacacaggagtcagtgcccatgtgtatggaagacaaatacacatacatatatacattttgcagctatggacaatttaccacaggatgcatattaaagaaagtcatagtttttttcttttttaattgaaagggacaagtatcatctaaatattatgccttgagaatgagggcgtgaaacacaatatcatccccaaatgtgtcttgtattatcataagttagatgttttagtttaaaaatcagaaagacattcttagttaatctttgaaaactcatacagtggtattgctagtttaaaatgagtcacttacttcatatcctctcgttcagtttagtaagcaaaggcttcttggcttctctggtgatggggtttgttttcatcgggcatacgttttctgcaatggtttagtggctggggtgagccactggcagtgtgcttacctgttgtctgaaacatagatagatcccacgttgatgtctgaacgaccgtcttttgaaaactcatcgggagtgaatggcatctcgttgtaagtactctaatatacagtgtgtagtttgtttctgttgttcacttggagtggatccagcttcactgtcatgtgcgaacacagtgacacgtttggccagtgacatttcaatcactgaaaatgtgctctacatctcgtatggatttctaggcctgatatccaacagaaagcatagacgtctcaggttattcgttactctaaggtaaaaccatctaggatgattttcccccttgcagttatgttatcattcttataacattgtatgttaatagaaaatatatttgcataatatgcatatatatgtatatttaccaagattttgtttcttacgcttgctatcatggcagcatgcgatgtcatattttcctttatgtgatgtaactactttctgttatctagaaattaagattgaagctaaaacacttctactgttcaatttcagaaactaagaatcatcctcatgcctttatttctgtatctgacatatttcataagcacatccaactactcctagactgactaggattctgcaggaacatgacccgtacacaccacgcgtcacccaacgacccatgaccgttctctgaggcaaaggagggcaacctgacagcaaacacagtcactgttggttccttctgatccacagcctcatcagtatttggactttttaaagctcgtagaaacaagacaaggtgcaccggtttcatagacgcaaccttaacttactatttagatgagatctttctaaagaaaaaaaaaagagatgatatattttttgtaaacaatatttctatcacaggcatccataaactgaaatgactacagttgtgcaaacaggtgtcacagtgaagttgagcatttggagaaaaaaataaaaagcaaaatttgcaggaa

SEQ ID NO: 11806 - DNA, 5781 bp, Homo sapiens
  source 1..5781: mol_type = unassigned DNA
tccgggccagcgcggcggcggcggcggcggcggcagcagcaggagcagccccggctgcgggtcgcgacggcggcggggcgccccctcccccgtgccggggcgcggcggagggatgtggggccttgcgggaggaaggcttttcggcatcttctcggccccggtgctggtggctgtggtgtgctgcgcccagagtgtgaacgatcccgggaacatgtcctttgtgaaggagacggtggacaagctgttgaaaggctacgacattcgcctaagacccgacttcgggggtcccccggtctgcgtggggatgaacatcgacatcgccagcatcgacatggtttccgaagtcaacatggattataccttaaccatgtattttcaacaatattggagagataaaaggctcgcctattctgggatccctctcaacctcacgcttgacaatcgagtggctgaccagctatgggtgcccgacacatatttcttaaatgacaaaaagtcatttgtgcatggagtgacagtgaaaaaccgcatgatccgtcttcaccctgatgggacagtgctgtatgggctcagaatcaccacgacagcagcatgcatgatggacctcaggagataccccctggacgagcagaactgcactctggaaattgaaagctatggctacaccacggatgacattgagttttactggcgaggcggggacaaggctgttaccggagtggaaaggattgagctcccgcagttctccatcgtggagcaccgtctggtctcgaggaatgttgtcttcgccacaggtgcctatcctcgactgtcactgagctttcggttgaagaggaacattggatacttcattcttcagacttatatgccctctatactgataacgattctgtcgtgggtgtccttctggatcaattatgatgcatctgctgctagagttgccctcgggatcacaactgtgctgacaatgacaaccatcaacacccaccttcgggagaccttgcccaaaatcccctatgtcaaagccattgacatgtaccttatgggctgcttcgtctttgtgttcctggcccttctggagtatgcctttgtcaactacattttctttggaagaggccctcaaaggcagaagaagcttgcagaaaagacagccaaggcaaagaatgaccgttcaaagagcgaaagcaaccgggtggatgctcatggaaatattctgttgacatcgctggaagttcacaatgaaatgaatgaggtctcaggcggcattggcgataccaggaattcagcaatatcctttgacaactcaggaatccagtacaggaaacagagcatgcctcgagaagggcatgggcgattcctgggggacagaagcctcccgcacaagaagacccatctacggaggaggtcttcacagctcaaaattaaaatacctgatctaaccgatgtgaatgccatagacagatggtccaggatcgtgtttccattcactttttctcttttcaacttagtttactggctgtactatgttaactgagtgactgtacttgatttttcaaagacttcatttaacactgagtgaaatattactctgcctgtcaagtttttatacctgtacacacacagacacacaagcagacacacacatatatacatacgcaattgtatatatatgtgaactttctcagcatatatataaaatacacgtgtatatgaggatgtatgtgtatatgtttatacacacaggagtcagtgcccatgtgtatggaagacaaatacacatacatatatacattttgcagctatggacaatttaccacaggatgcatattaaagaaagtcatagtttttttcttttttaattgaaagggacaagtatcatctaaatattatgccttgagaatgagggcgtgaaacacaatatcatccccaaatgtgtcttgtattatcataagttagatgttttagtttaaaaatcagaaagacattcttagttaatctttgaaaactcatacagtggtattgctagtttaaaatgagtcacttacttcatatcctctcgttcagtttagtaagcaaaggcttcttggcttctctggtgatggggtttgttttcatcgggcatacgttttctgcaatggtttagtggctggggtgagccactggcagtgtgcttacctgttgtctgaaacatagatagatcccacgttgatgtctgaacgaccgtcttttgaaaactcatcgggagtgaatggcatctcgttgtaagtactctaatatacagtgtgtagtttgtttctgttgttcacttggagtggatccagcttcactgtcatgtgcgaacacagtgacacgtttggccagtgacatttcaatcactgaaaatgtgctctacatctcgtatggatttctaggcctgatatccaacagaaagcatagacgtctcaggttattcgttactctaaggtaaaaccatctaggatgattttcccccttgcagttatgttatcattcttataacattgtatgttaatagaaaatatatttgcataatatgcatatatatgtatatttaccaagattttgtttcttacgcttgctatcatggcagcatgcgatgtcatattttcctttatgtgatgtaactactttctgttatctagaaattaagattgaagctaaaacacttctactgttcaatttcagaaactaagaatcatcctcatgcctttatttctgtatctgacatatttcataagcacatccaactactcctagactgactaggattctgcaggaacatgacccgtacacaccacgcgtcacccaacgacccatgaccgttctctgaggcaaaggagggcaacctgacagcaaacacagtcactgttggttccttctgatccacagcctcatcagtatttggactttttaaagctcgtagaaacaagacaaggtgcaccggtttcatagacgcaaccttaacttactatttagatgagatctttctaaagaaaaaaaaaagagatgatatattttttgtaaacaatatttctatcacaggcatccataaactgaaatgactacagttgtgcaaacaggtgtcacagtgaagttgagcatttggagaaaaaaataaaaagcaaaatttgcaggaagaactgctaaattaatactttatcccaaaatgccacgtatgcctcaccctctctgttctatccaaaaccaaggaccagagtgctccaatggtaggccccagttgtctcgatgtaggtagaggcaccaccctccccgaggatgcgtgtggtgtggactatccccatgagctgaccactacttgatttttctttggtggccgtaacaacctttaatttgtgggcatctgcaacagttcaaaacccaccatcagataaaacataatccacaaaatctcacgctagaggcaattacctacttttagacccttttccctctttcattcctatctttttcctcctaatcgctgctctctggttttattttcatctggagactagccagggatttctttggctttggcttttctctgaccattttttccatgggtaacaatgggggatcctaaaagttaaacagattgggaaaaaccttgttaagtggccttatcattattatcatgttaaagaaaaaaaatacatttgcaaagaccttatccctttcaatacttcaggtatctttttctgtatccagtaattaaaggtgtgaggtccacatgcagaagagggaccccaaaatgtaaatggatgtggacaaaaacagtcaatggtctatttaagtgtataatttatactattcagaactgtgacattaattctttctgggagaaaagtgatttaaaacttttttgatgcatagttgaggtacccaaatatcaaaggcagagaccccatggggctccaaagagctgcagtctccttcccaaggttttctggatataaatttgcatggtatagtcataatagcttttgagctttttatatgcatttggcaccaagactgggatccacaactttgtagacactgcgatgaagttaacatattagctatactataaatagtgtttgtaactacacacacacacacacacacacacacaaatacatacatatattctgtaaaaacaaaaaaaaactttttaagatccttgggtatgtgtttgctttactccatttcagaagaaaattacttttcttctaacaaaattattttatagcttctccatttttaaaacttgtgagagcattgagaagagaactctgactgtgttaacagaagagagttgaattggagtctctgttgtgttaaaatgacctctcgttactccacagtagttatttgagccagtgactgagtcgcgttgaggaattctgaacccggacctctgacgttgttgggaggtggctgttacccacacccagacctcttgagtaaggacagaaacgttatcattggggatataatgagatttctttcttaacaattgaaagtaataaagagttaattttctcagtagtcctgtctttccaaaatgcgccacaggggctcaagatctacagaagaatcttgttatgacagtttgttattacccatattcagatatccttgagataatggaagagccctgctacataactccctacagagaaagactgatagacttgagtagtccttaaaacaagtgttattcctgttcaccaaccccgggactgtggaggggtttcactgtctataccatgcgacatccatttcccctgaatctcaaacgaactagaaagtatgtcatgataatatttccattagatttggaagctacctgtacatctgcaatattgtgtttttaacgccagcacccagaactttgacatgttcagtcactccctgaaaggcacttctctcttgtccaaacacagcgttgacatttttactgaggagatcatctcaaaggtgatgccaaacgagtctggggctggttttaaggggacaggcacattgcagttgtaggtgttcattttcagcatctagtagataatccattggtgtttgtcccaccattggtgtattctaacaagaatgtgtccaactttgaatctcctggcttgaaagtataaaccatcacttaattcttattttaactctccacctgaaaaccagttcatatttctggccattttatgtaagcaaaactgaacaattggtgaaacattttgttactcttggaattgactctggctgtcagtgtgagccattagagtaacatcgaatcttggggcaaagaactgcccaggtgaattaaatttttccaggacactagctagtgtgccttggattgattacctcttctactgcattgaaaggcgccatgttttcctgaaatactaaattcccaacacctgggtaaacaatgaccttccagagagtggctcccgtatgcctctccctaggaccaaccccatgaacatgttttgtcacgtttgtctcatgtttctacttcacaagtcagtgagtgtgtttaaggtaagtacaggattattctagtaggaataggcgattgctgtcataatcaattctcatgttgatttcattttattgtaaagataaatttaaacccagttttgcttaagcacattgatgtaattttttggtattatttgacatgaaaaaacagcaaaattgagtgatagatacaatatgaaacttgttgatgaatgaattcaaatttattaaaaaaggagtaactgacctaaa

SEQ ID NO: 11807 - DNA, 1900 bp, Homo sapiens
  source 1..1900: mol_type = unassigned DNA
agtcacaacttccggttagcgtggcggaggctctcggagtctttgggacctcagcaccgggataccgggagactccctcgtgtccccatgtgggccacctaccagacagaagaggattataccttaaccatgtattttcaacaatattggagagataaaaggctcgcctattctgggatccctctcaacctcacgcttgacaatcgagtggctgaccagctatgggtgcccgacacatatttcttaaatgacaaaaagtcatttgtgcatggagtgacagtgaaaaaccgcatgatccgtcttcaccctgatgggacagtgctgtatgggctcagaatcaccacgacagcagcatgcatgatggacctcaggagataccccctggacgagcagaactgcactctggaaattgaaagctatggctacaccacggatgacattgagttttactggcgaggcggggacaaggctgttaccggagtggaaaggattgagctcccgcagttctccatcgtggagcaccgtctggtctcgaggaatgttgtcttcgccacaggtgcctatcctcgactgtcactgagctttcggttgaagaggaacattggatacttcattcttcagacttatatgccctctatactgataacgattctgtcgtgggtgtccttctggatcaattatgatgcatctgctgctagagttgccctcgggatcacaactgtgctgacaatgacaaccatcaacacccaccttcgggagaccttgcccaaaatcccctatgtcaaagccattgacatgtaccttatgggctgcttcgtctttgtgttcctggcccttctggagtatgcctttgtcaactacattttctttggaagaggccctcaaaggcagaagaagcttgcagaaaagacagccaaggcaaagaatgaccgttcaaagagcgaaagcaaccgggtggatgctcatggaaatattctgttgacatcgctggaagttcacaatgaaatgaatgaggtctcaggcggcattggcgataccaggaattcagcaatatcctttgacaactcaggaatccagtacaggaaacagagcatgcctcgagaagggcatgggcgattcctgggggacagaagcctcccgcacaagaagacccatctacggaggaggtcttcacagctcaaaattaaaatacctgatctaaccgatgtgaatgccatagacagatggtccaggatcgtgtttccattcactttttctcttttcaacttagtttactggctgtactatgttaactgagtgactgtacttgatttttcaaagacttcatttaacactgagtgaaatattactctgcctgtcaagtttttatacctgtacacacacagacacacaagcagacacacacatatatacatacgcaattgtatatatatgtgaactttctcagcatatatataaaatacacgtgtatatgaggatgtatgtgtatatgtttatacacacaggagtcagtgcccatgtgtatggaagacaaatacacatacatatatacattttgcagctatggacaatttaccacaggatgcatattaaagaaagtcatagtttttttcttttttaattgaaagggacaagtatcatctaaatattatgccttgagaatgagggcgtgaaacacaatatcatccccaaatgtgtcttgtattatcataagttagatgttttagtttaaaaatcagaaagacattcttagttaatctttgaaaactcatacagtggtattgctagtttaaaatgagtcacttacttcatatcctctcgttcagtttagtaagcaaaggcttcttggcttctctggtgatggggtttgttttcatcgggcatacgttttctgcaatgg

SEQ ID NO: 11808 - DNA, 1494 bp, Homo sapiens
  source 1..1494: mol_type = unassigned DNA
agagctgggctgttactggatatatgccatgtgagctggatggcctgtgaaagagaaaggcagttggtgataaaaataattggatgattcttaaagaaatagaagagacttgctgttggcagtgagaacccacaagaggcctctaaggagatgattataccttaaccatgtattttcaacaatattggagagataaaaggctcgcctattctgggatccctctcaacctcacgcttgacaatcgagtggctgaccagctatgggtgcccgacacatatttcttaaatgacaaaaagtcatttgtgcatggagtgacagtgaaaaaccgcatgatccgtcttcaccctgatgggacagtgctgtatgggctcagaatcaccacgacagcagcatgcatgatggacctcaggagataccccctggacgagcagaactgcactctggaaattgaaagctatggctacaccacggatgacattgagttttactggcgaggcggggacaaggctgttaccggagtggaaaggattgagctcccgcagttctccatcgtggagcaccgtctggtctcgaggaatgttgtcttcgccacaggtgcctatcctcgactgtcactgagctttcggttgaagaggaacattggatacttcattcttcagacttatatgccctctatactgataacgattctgtcgtgggtgtccttctggatcaattatgatgcatctgctgctagagttgccctcgggatcacaactgtgctgacaatgacaaccatcaacacccaccttcgggagaccttgcccaaaatcccctatgtcaaagccattgacatgtaccttatgggctgcttcgtctttgtgttcctggcccttctggagtatgcctttgtcaactacattttctttggaagaggccctcaaaggcagaagaagcttgcagaaaagacagccaaggcaaagaatgaccgttcaaagagcgaaagcaaccgggtggatgctcatggaaatattctgttgacatcgctggaagttcacaatgaaatgaatgaggtctcaggcggcattggcgataccaggaattcagcaatatcctttgacaactcaggaatccagtacaggaaacagagcatgcctcgagaagggcatgggcgattcctgggggacagaagcctcccgcacaagaagacccatctacggaggaggtcttcacagctcaaaattaaaatacctgatctaaccgatgtgaatgccatagacagatggtccaggatcgtgtttccattcactttttctcttttcaacttagtttactggctgtactatgttaactgagtgactgtacttgatttttcaaagacttcatttaacactgagtgaaatattactctgcctgtcaagtttttatacctgtacacacacagacacacaagcagacacacacatatatacatacgcaattgtatatatatgtgaactttctcagcatatatat

SEQ ID NO: 11809 - DNA, 515 bp, Homo sapiens
  source 1..515: mol_type = unassigned DNA
ggaaaactgcttacatggaaggcacttcaggggtaaggtccagggtgtgtgtctgtgcttggctctaggttgctccatttgggaggattataccttaaccatgtattttcaacaatattggagagataaaaggctcgcctattctgggatccctctcaacctcacgcttgacaatcgagtggctgaccagctatgggtgcccgacacatatttcttaaatgacaaaaagtcatttgtgcatggagtgacagtgaaaaaccgcatgatccgtcttcaccctgatgggacagtgctgtatgggctcagaatcaccacgacagcagcatgcatgatggacctcaggagataccccctggacgagcagaactgcactctggaaattgaaagctatggctacaccacggatgacattgagttttactggcgaggcggggacaaggctgttaccggagtggaaaggattgagctcccgcagttctccatcgtggagcaccgtctggtctcgaggaatgttg

SEQ ID NO: 11810 - DNA, 1913 bp, Homo sapiens
  source 1..1913: mol_type = unassigned DNA
gctcagctcccgcccgcctgtgccgcctgtgcggccgccgggagccaagtttgcgcggaccccgtcccgagcccgccgcggccatggacgcgcccgcccggctgctggccccgctcctgctcctctgcgcgcagcagctccgcggcaccagagcgatgaatgacatcggcgactacgtgggctccaacctggagatctcctggctccccaacctggacgggctgatagccggctacgcccgcaacttccggcctggcatcggaggcccccccgtgaatgtggcccttgccctggaggtggccagcatcgaccacatctcagaggccaacatggagtacaccatgacggtgttcctgcaccagagctggcgggacagcaggctctcctacaaccacaccaacgagaccctgggtctggacagccgcttcgtggacaagctgtggctgcccgacaccttcatcgtgaacgccaagtcggcctggttccacgacgtgacggtggagaacaagctcatccggctgcagcccgacggcgtgatcctgtacagcatccgaatcacctccactgtggcctgcgacatggacctggccaaataccccatggacgagcaggagtgcatgctggacctggagagctacggttactcatcggaggacatcgtctactactggtcggagagccaggagcacatccacgggctggacaagctgcagctggcgcagttcaccatcaccagctaccgcttcaccacggagctgatgaacttcaagtccgctggccagttcccacggctcagcctgcacttccacctgcggaggaaccgcggcgtgtacatcatccaatcctacatgccctccgtcctgctggtcgccatgtcctgggtctccttctggatcagccaggcggcggtgcccgccagggtgtctctaggcatcaccacggtgctgacgatgaccacgctcatggtcagtgcccgctcctccctgccacgggcatcagccatcaaggcactggacgtctacttctggatctgctatgtcttcgtgtttgccgccctggtggagtacgcctttgctcatttcaacgccgactacaggaagaagcagaaggccaaggtcaaggtctccaggccgagggcagagatggacgtgaggaacgccattgtcctcttctccctctctgctgccggcgtcacgcaggagctggccatctcccgccggcagcgccgcgtcccggggaacctgatgggctcctacaggtcggtgggggtggagacaggggagacgaagaaggagggggcagcccgctcaggaggccaggggggcatccgtgcccggctcaggcccatcgacgcagacaccattgacatttacgcccgcgctgtgttccctgcggcgtttgcggccgtcaatgtcatctactgggcggcatacgccatgtgagcacaggactcaggccaccctcgcttgtcctggcgcccggcggcagctgcccagaaacttcctgggagaaagagccctcgggctgccttcccctctgcgtgtttcgaagtgggatgacagtcggccacggaaaacaagaggaagcctcggcctccctgagctctgaccccagcctcacccgaaaggccagcctggggctctccggcaggcagcccgagacctgcacagatgaaggagcagaggttctgaccgagaggctgagccaggccggggtctgggcccttcagggagccgcggatttttatgttcagaaagtgatcctggtttctaggtctttgctctgcaggatcgggatcagagcgtgggaggaggtgggggtggacgtccatccggtgaacagtgaaggcgtttgtgaggtctttctggtcccagcatgaaataaagccttggcctgggggccgcttcattctc

SEQ ID NO: 11811 - DNA, 3152 bp, Homo sapiens
  source 1..3152: mol_type = unassigned DNA
gccagagcgtgagccgcgacctccgcgcaggtggtcgcgccggtctccgcggaaatgttgtccaaagttcttccagtcctcctaggcatcttattgatcctccagtcgagggtcgagggacctcagactgaatcaaagaatgaagcctcttcccgtgatgttgtctatggcccccagccccagcctctggaaaatcagctcctctctgaggaaacaaagtcaactgagactgagactgggagcagagttggcaaactgccagaagcctctcgcatcctgaacactatcctgagtaattatgaccacaaactgcgccctggcattggagagaagcccactgtggtcactgttgagatctccgtcaacagccttggtcctctctctatcctagacatggaatacaccattgacatcatcttctcccagacctggtacgacgaacgcctctgttacaacgacacctttgagtctcttgttctgaatggcaatgtggtgagccagctatggatcccggacaccttttttaggaattctaagaggacccacgagcatgagatcaccatgcccaaccagatggtccgcatctacaaggatggcaaggtgttgtacacaattaggatgaccattgatgccggatgctcactccacatgctcagatttccaatggattctcactcttgccctctatctttctctagcttttcctatcctgagaatgagatgatctacaagtgggaaaatttcaagcttgaaatcaatgagaagaactcctggaagctcttccagtttgattttacaggagtgagcaacaaaactgaaataatcacaaccccagttggtgacttcatggtcatgacgattttcttcaatgtgagcaggcggtttggctatgttgcctttcaaaactatgtcccttcttccgtgaccacgatgctctcctgggtttccttttggatcaagacagagtctgctccagcccggacctctctagggatcacctctgttctgaccatgaccacgttgggcaccttttctcgtaagaatttcccgcgtgtctcctatatcacagccttggatttctatatcgccatctgcttcgtcttctgcttctgcgctctgttggagtttgctgtgctcaacttcctgatctacaaccagacaaaagcccatgcttctcctaaactccgccatcctcgtatcaatagccgtgcccatgcccgtacccgtgcacgttcccgagcctgtgcccgccaacatcaggaagcttttgtgtgccagattgtcaccactgagggaagtgatggagaggagcgcccgtcttgctcagcccagcagccccctagcccaggtagccctgagggtccccgcagcctctgctccaagctggcctgctgtgagtggtgcaagcgttttaagaagtacttctgcatggtccccgattgtgagggcagtacctggcagcagggccgcctctgcatccatgtctaccgcctggataactactcgagagttgttttcccagtgactttcttcttcttcaatgtgctctactggcttgtttgccttaacttgtaggtaccagctggtaccctgtggggcaacctctccagttccccaggaggtccaagccccttgccaagggagttgggggaaagcagcagcagcagcaggagcgactagagtttttcctgccccattccccaaacagaagcttgcagagggtttgtctttgctgcccctctcccctacctggcccattcactgagtcttctcagcagaccatttcaaattattaataaatgggccacctccctcttcttcaaggagcatccgtgatgctcagtgttcaaaaccacagccacttagtgatcagctccctaaaaccatgcctaagtacaggcggattagctatcttccaacaatgctgaccaccagacaattactgcatttttccagaagcccactattgcctttgtagtgctttcggcccagttctggcctcagcctcaaagtgcaccgactagttgcttgcctatacctggcacctcattaagatgctgggcagcagtataacaggaggaagagatccctctcctttggtcagattattatgttctcagttctctctccctgctacccctttctctgcagatagatagacactggcattatccctttaggaagaggggggggcagcaagagagcctatttgggacagcattcctctctctctgctgctgtgacatctccctctccttgctggctccatctttcgtctgcactaccaattcaatgcccttcatccaatgggtatctatttttgtgtgtgattatagtaactactccctgctttatatgccaccctcttccttctctttgacccctgtgactctttctgtaactttcccagtgacttcccctagccctgacccaggcactaggccttggtgacttcctggggccaagaaactaaggaaactcggctttgcaacaggcattactcgccattgattggtgcccacccagggcacactgtcggagttctatcacttgcttgacccctggacccataaaccagtccactgttatacccggggcactctaaccatcacaatcaatcaatcaaattcccttaaatttgtatggcactggaactttggcaaagcacttttgacaagttgtgtctgattggagcttcatgatagccttgtgacatctttagggcaggattcttatccccattttgcagatgaaaaccctgagtcacagatttctgtgggactgtggatctcactggaagctatccaagagcccactgtcaccttctagaccacatgatagggctagacagctcagttcaccatgattctcttctgtcacctctgctggcacaccagtggcaaggcccagaatggcgacctctctttagctcaatttctgggcctgaggtgctcagactgcccccaagatcaaatctctcctggctgtagtaacccagtggaatgaatttggacatgccccaatgcttctatatgctaagtgaaatctgtgtctgtaatttgttggggggtggatagggtggggtctccatctactttttgtcaccatcatctgaaatggggaaatatgtaaataaatatatcagcaaagca

SEQ ID NO: 11812 - DNA, 1315 bp, Homo sapiens
  source 1..1315: mol_type = unassigned DNA
gtgagccgcgacctccgcgcaggtggtcgcgccggtctccgcggaaatgttgtccaaagttcttccagtcctcctaggcatcttattgatcctccagtcgagaacatgtatacagagaagtgctcaaatcataagtgtacagctgatgagttgtcagaatatgaccacagcggtgtaaagaaagccaaatcaaggacccgaatgtgagcaggacctcagaagccccctttgtcactgcctcccagcaaaggcagcactatccggacttctaacaccatcgggtcgagggacctcagactgaatcaaagaatgaagcctcttcccgtgatgttgtctatggcccccagccccagcctctggaaaatcagctcctctctgaggaaacaaagtcaactgagactgagactgggagcagagttggcaaactgccagaagcctctcgcatcctgaacactatcctgagtaattatgaccacaaactgcgccctggcattggagagaagcccactgtggtcactgttgagatctccgtcaacagccttggtcctctctctatcctagacatggaatacaccattgacatcatcttctcccagacctggtacgacgaacgcctctgttacaacgacacctttgagtctcttgttctgaatggcaatgtggtgagccagctatggatcccggacaccttttttaggaattctaagaggacccacgagcatgagatcaccatgcccaaccagatggtccgcatctacaaggatggcaaggtgttgtacacaattagtttcctatcctgagaatgagatgatctacaagtgggaaaatttcaagcttgaaatcaatgagaagaactcctggaagctcttccagtttgattttacaggagtgagcaacaaaactgaaataatcacaaccccagttggtgacctgaatgaggagccaagggacctccccagggtagctcccagagcaaccctggaaacactcttcacacatcctgaccaagttcagggcagtgaaggcactgccctcatcgtttccagaatgtggatggagccagtcacccaaccagccatttgtcgtgagaggcatcttgttctgctaccattcaagatcccacggcaagaggacttttgataaatacattctggccagtaggcaagtgcgagggtggtccgtgcagcagctctggaggagttctatcccaaagctatactcaacacacaggtttcccactgacaacaggtcgctcccttgccttcttccagaagaatctgagaagctttgctccttgagtttcagtgctgccaag

SEQ ID NO: 11813 - DNA, 6785 bp, Homo sapiens
  source 1..6785: mol_type = unassigned DNA
attggctccctggctcaattctgctgggagtcgcatcctacctgtttgggaggtgcactgcctttccacactctcccttctgtactcagccagctgctgctgaggtgggaggaaaagtcctggctgggagaattgagctagtgcagcacacgtaaaaaagcgattccgatgggtcctttgaaagcttttctcttctccccttttcttctgcggagtcaaagtagaggggtgaggttggtcttcttgttactgaccctgcatttgggaaactgtgttgataaggcagatgatgaagatgatgaggatttaacggtgaacaaaacctgggtcttggccccaaaaattcatgaaggagatatcacacaaattctgaattcattgcttcaaggctatgacaataaacttcgtccagatataggagtgaggcccacagtaattgaaactgatgtttatgtaaacagcattggaccagttgatccaattaatatggaatatacaatagatataatttttgcccaaacctggtttgacagtcgtttaaaattcaatagtaccatgaaagtgcttatgcttaacagtaatatggttggaaaaatttggattcctgacactttcttcagaaactcaagaaaatctgatgctcactggataacaactcctaatcgtctgcttcgaatttggaatgatggacgagttctgtatactctaagattgacaattaatgcagaatgttatcttcagcttcataactttcccatggatgaacattcctgtccactggaattttcaagctatggataccctaaaaatgaaattgagtataagtggaaaaagccctccgtagaagtggctgatcctaaatactggagattatatcagtttgcatttgtagggttacggaactcaactgaaatcactcacacgatctctggggattatgttatcatgacaattttttttgacctgagcagaagaatgggatatttcactattcagacctacattccatgcattctgacagttgttctttcttgggtgtctttttggatcaataaagatgcagtgcctgcaagaacatcgttgggtatcactacagttctgactatgacaaccctgagtacaattgccaggaagtctttacctaaggtttcttatgtgactgcgatggatctctttgtttctgtttgtttcatttttgtttttgcagccttgatggaatatggaaccttgcattattttaccagcaaccaaaaaggaaagactgctactaaagacagaaagctaaaaaataaagcctcgatgactcctggtctccatcctggatccactctgattccaatgaataatatttctgtgccgcaagaagatgattatgggtatcagtgtttggagggcaaagattgtgccagcttcttctgttgctttgaagactgcagaacaggatcttggagggaaggaaggatacacatacgcattgccaaaattgactcttattctagaatatttttcccaaccgcttttgccctgttcaacttggtttattgggttggctatctttacttataaaatctacttcataagcaaaaatcaaaagaagtctgactaaattcagtagaatcttttgtgcttcagtaacttgaagtttaaatttaaaatgcagagagaccaatggttaaaatgtgaatagtattgtaactattttaaggccttcagaagtaaataaagtagcagctttcaggctaatttacgtgaaactgattagttgcaaaatccagtaggttaaaatactcacatatttttacttaaattttctttaatttacttatatgttattataattttgaatttttaagttctatgattcatgttttaaagatggaataattttaatacatattttgtttaaatataatctataattgttttgtaatgtaagactaattactaatatttatgtagcaacttttgtgccagaaaaaagactgttaatttgttttttcttgcttttcatttgattaccctgcttgaaatacagttagttgataacataaagccatagttttcttggattttcttccaagatattgtattcccaagaagaaattgatttatttttaaactatcagttactgaagacttatgaaaaggtcaatttttacctgtcttttaatccagtccattttctgacacaatattaaacagaacgccagttgcatttactttggtgatttgcaaacttggaatgaagccaccagtcattttttaagaatgcaagatgaaaaaatcaggtaaaatctaaccattttattctctgcttcatagcatttataatgtatgatgaggttaacactgaaatattaaaatctgcaaatgcacattaatgcaaattaaatgcagagagaaatgattatttttttctttatgttttatgaaagtgttgcagtccctaaaataaaaatattgaggaacattgcttgtatttactcacgtggttaaaaaattattacctggcaaactgagttgccggtcatattgaggacaaaatcttaaatatgtgctattagcattgtttttagactagtaatatgcagaaaacagttttaggcctgcgttacatattgcctcttccagctccaaagttttggaccctgtcagttttgcaactacattatacattattataatattcttttttttttctagaaactgggggcagcctcaaaatcatgttaaagagggagttttgttagaggcatctttaatgaacatgaatgtgagtgctctctaaattcttagcatctcactggatgtaaaatctatcagttaatagttttaaaaatgtctcttttgttaagaataaatttaggcttcaatcattataatcctgtaagtagcttgacataccaattgtttataagattcatcacataaatttctggagaaccaccaggtttagcttggaaataacctttaaagattgtttctgttgccaagaccaatgaccatgatgaagagttttatgatcacagcctatcttacttaaggtttgagaggaaacctgtcacctctgcaattgttactctagtttttaatgttataattccgctgcgtggttagtgaatgtctggcatgattatacacgtgtattggaaatatctagttttttaaatttttaattaatttatttataatttactgtgtgttcccagctaactctattttttttttcacttgctcataaacttctggaaaaaaataagcatgaatcaaatggtaatgcccaatatccaccgacactgcttttcttgaatgaacagccaaactaaactttggccatctatatattcatttacagattattcatacattcattttaataacattgagtactgatggatgttttgaaagtgagcattcatttaaggataaataaaaaataaagtagtaataaagaataaaatactttactaaaatattgtatggctattttcatgtttgaagctatagcttactatcatgagacagttttgattttgggactctttcaagtgtatctgagcatgactgtattttaaaatacttaaaagtgcttgatataaatagcttttccttctgaaccacgttctatgtaaaagaaaaaaaatagctttgattttctcactggtgtttcattaacttggttttaaatgttgacaatatttacaagtggaaataaaatttgtaaatatatgaaagatgcctttccttgtatataccatcaagcaagcactttgttttcaaagcaagtggtattttgatcagttttatttaaatgtgtgatcagaaagaatggcgtacaaatcttattatttctaaaaataagaataaaaaggtaaaactacatttagacttctttctcaagaaatcaaatacagctttttttcaaagctgattcagttcatttcctgttcctctattccaagtataagtttcaccaccttgagaaataatttttttaaaaaatcttcctctttctctggggagttatataataatttattgaatttattggaacttgattttcctggatgctttcaatgtttttaatgctaacatagaccccaaaattagatataaagaattgggaaggatacctggagcacaaggaataagatcatttgtaaaaatgtttgtttatatagacctatcctctaaatatgtgacaaggatctagaaattctgagaggggaaaatgtgattttggatttacaatgacagggtaatattttatttatcttcgaattccatggacaaaattaggctcacttaaattaatttttgtaaacccaagtaagttctaaaaaaaagtaaaaaatacatagaatacttgagaatttagcagggacagggaaaaatttcccagtaagtctgaagtcttgatgtaagtgggaattagataactaattggaggcattttattttaagttaaagacagatttctttaataagtttttaaaattgatcaactttaaattaagcacagtaaatgtgtataaatatgaaggcaatcataaggattttttcacttgtgtttccatattctggcattagtatatcatcataaaatagacaatgtttttgtctcaagaacaagaataaaattgaaatctgcattcatgccaattcagcataaaaaagaataggctacagttctctcacaccaagggccccatagttataaatgtgaaattatattccaggtcaaaatttgtgaaaaatacacaaaacactttgattttacaagagaggagctttaaataagatgattttagtagattgaaataaataaccagtatttaagtaaatgtataacgaatgaataaatacatgcataatattttcaaagttctataccagtacctatttttactcttacaaaatttcctgtaaaaaaatactacatttgaaattatttcattggttttagaactggcattgaaggtacccagtagactcttaagcctttactgcttgtctcactagaaacatttatttctgacctaccaagttttcttcacatcatcaaatttattcagcttctcagtgctgtaccgtatgatggcaagacatacttggtatttccatttttgttggtcattctttattgctttttactgctaggaaggtcttgccaggcttctatacagttacaaaaaccattaccaaactttatcaaggactttccaaatggagttttcaaatactattgaccacattgctctagttaatgtaaggtcagctctgactttttgtgtttgcatttcggaagtgaggtaacctcattcaaatatatatgcagcactttctgtgtacaaagtactgttctaaatacaaaagggaatataaagatgactttcaaggaacatataatgtagtcagaaagatgagaggattagttatacaatttaaggaagggaggataactttgggaaggttttgtggaggatatgtgtttagagatgcgagctggggattcaacaggtaagagggagagagatcacaatttccaactgggtaaacagcttgaaaaaagaaacagaagcctgggcacaaatgaaaattccatattaattggaagttaagattcatatagagacaatgaaaggttaggttagaacaataaactgagaagtacgaatgtggacttcaggaggctaggggaaattacgaagtcataaaaagttcacagagatacttgagtacaaaagatacattattaaaatttctgcagaagtttcatcttatttgtgtgtgatggtttggaatataacaagccagttaggcgtataagcttatagtggctaatatgaggatgaaatccgtactcttgtgacacaagtcttcagcggagatgggggatgataggcccaaatagaaagaaaagtggcagacattaagctttgactaacagacaacataactgagagacatggtgtgttgggtggaagggatcctgtagtagatacttgcttgcatgtagatgggtacaaagacaccataaggaaattctgaatgtaatacaaaggcttatttttcctgttgatttatctttttcacacataaaagatgaagaaaaaaataatctgaaatgtaaatcctaaagtgatctgtctagattcttattttttgaaaaatgttcctcactaaaagagttttctattcaaataaccatttccagttttctaactgagacatacatacatatatatatgtataaaattatatatatatttggacaaagagaataagagaattgcaggtagaaatagtctactgtgtgtagacaaatccagaaagttgatttctgttcctcaaacaatttctgaaatatttatgtcagaataaataaaagaattgttattgttggacaatgaaacatacctggaccctttgagtgtgtgaatagtaaaggctgtgataactgaaatgcagctaagcaaaaagggctaattagaagacttttgagacatgatttacctaaatggaaatagtttggttttcaatccttcactgtaataacaattatttgcatctattaagtgtttgtagtcactttgtataataaagttttatggcttgtgattataatggcttctgttattctgctactgcctcattgttttgaggaacatttgtaattttgtggcaaaggtgtctcaatttttcagtgttctttactctcatgatccttagaacaaaaaaaataccagtaacttgttataaataaagagtcacattctcttaaa

SEQ ID NO: 11814 - DNA, 1885 bp, Homo sapiens
  source 1..1885: mol_type = unassigned DNA
aattctgctgggagtcgcatcctacctgtttgggaggtgcactgcctttccacactctcccttctgtactcagccagctgctgctgaggtgggaggaaaagtcctggctgggagaattgagctagtgcagcacacgtaaaaaagcgattccgatgggtcctttgaaagcttttctcttctccccttttcttctgcggagtcaaagtagaggggtgaggttggtcttcttgttactgaccctgcatttgggaaactgtgttgataaggcagatgatgaagatgatgaggatttaacggtgaacaaaacctgggtcttggccccaaaaattcatgaaggagatatcacacaaattctgaattcattgcttcaaggctatgacaataaacttcgtccagatataggagtgaggcccacagtaattgaaactgatgtttatgtaaacagcattggaccagttgatccaattaatatggaatatacaatagatataatttttgcccaaacctggtttgacagtcgtttaaaattcaatagtaccatgaaagtgcttatgcttaacagtaatatggttggaaaaatttggattcctgacactttcttcagaaactcaagaaaatctgatgctcactggataacaactcctaatcgtctgcttcgaatttggaatgatggacgagttctgtatactctaagattgacaattaatgcagaatgttatcttcagcttcataactttcccatggatgaacattcctgtccactggaattttcaagctatggataccctaaaaatgaaattgagtataagtggaaaaagccctccgtagaagtggctgatcctaaatactggagattatatcagtttgcatttgtagggttacggaactcaactgaaatcactcacacgatctctggggattatgttatcatgacaattttttttgacctgagcagaagaatgggatatttcactattcagacctacattccatgcattctgacagttgttctttcttgggtgtctttttggatcaataaagatgcagtgcctgcaagaacatcgttgggtatcactacagttctgactatgacaaccctgagtacaattgccaggaagtctttacctaaggtttcttatgtgactgcgatggatctctttgtttctgtttgtttcatttttgtttttgcagccttgatggaatatggaaccttgcattattttaccagcaaccaaaaaggaaagactgctactaaagacagaaagctaaaaaataaagcctcgatgactcctggtctccatcctggatccactctgattccaatgaataatatttctgtgccgcaagaagatgattatgggtatcagtgtttggagggaaggaaggatacacatacgcattgccaaaattgactcttattctagaatatttttcccaaccgcttttgccctgttcaacttggtttattgggttggctatctttacttataaaatctacttcataagcaaaaatcaaaagaagtctgactaaattcagtagaatcttttgtgcttcagtaacttgaagtttaaatttaaaatgcagagagaccaatggttaaaatgtgaatagtattgtaactattttaaggccttcagaagtaaataaagtagcagctttcaggctaatttacgtgaaactgattagttgcaaaatccagtaggttaaaatactcacatatttttacttaaattttctttaatttacttatatgttattataattttgaatttttaagttctatgattcatgttttaaagatggaataattttaatacatattttgtttaaatataatctataattgttttgtaatgtaagactaattactaatatttatgtagc

SEQ ID NO: 11815 - DNA, 4056 bp, Homo sapiens
  source 1..4056: mol_type = unassigned DNA
attttaaatacacacacccacagggctctgccccctgtaaaagaaaaaaaatcaaaacaaacaaataaataaccccaaagagatggacccaggggagaacgcgtaagtgtgaggggcatgagtatacacgagtgtgcgtgtctttccctctcccttatttgtctccgtatgagtctctccttgtaccctccccctgcctcgatgatattactcccccagacttggaagccgctgccagagtgacgctttgatggtatctgcaagcgtttttgctgatcttatctctgccccctgaatattaattccctaatctggtagcaatccatctccccagtgaaggacctactagaggcaggtggggggagccaccatcagatcataagcataagaataatacaaaggggagggattcttctgcaaccaagaggcaagaggcgagagaaggaaaaaaaaaaaagcgatgagttcgccaaatatatggagcacaggaagctcagtctactcgactcctgtattttcacagaaaatgacggtgtggattctgctcctgctgtcgctctaccctggcttcactagccagaaatctgatgatgactatgaagattatgcttctaacaaaacatgggtcttgactccaaaagttcctgagggtgatgtcactgtcatcttaaacaacctgctggaaggatatgacaataaacttcggcctgatataggagtgaagccaacgttaattcacacagacatgtatgtgaatagcattggtccagtgaacgctatcaatatggaatacactattgatatattttttgcgcaaacgtggtatgacagacgtttgaaatttaacagcaccattaaagtcctccgattgaacagcaacatggtggggaaaatctggattccagacactttcttcagaaattccaaaaaagctgatgcacactggatcaccacccccaacaggatgctgagaatttggaatgatggtcgagtgctctacaccctaaggttgacaattgatgctgagtgccaattacaattgcacaactttccaatggatgaacactcctgccccttggagttctccagttatggctatccacgtgaagaaattgtttatcaatggaagcgaagttctgttgaagtgggcgacacaagatcctggaggctttatcaattctcatttgttggtctaagaaataccaccgaagtagtgaagacaacttccggagattatgtggtcatgtctgtctactttgatctgagcagaagaatgggatactttaccatccagacctatatcccctgcacactcattgtcgtcctatcctgggtgtctttctggatcaataaggatgctgttccagccagaacatctttaggtatcaccactgtcctgacaatgaccaccctcagcaccattgcccggaaatcgctccccaaggtctcctatgtcacagcgatggatctctttgtatctgtttgtttcatctttgtcttctctgctctggtggagtatggcaccttgcattattttgtcagcaaccggaaaccaagcaaggacaaagataaaaagaagaaaaaccctcttcttcggatgttttccttcaaggcccctaccattgatatccgcccaagatcagcaaccattcaaatgaataatgctacacaccttcaagagagagatgaagagtacggctatgagtgtctggacggcaaggactgtgccagttttttctgctgttttgaagattgtcgaacaggagcttggagacatgggaggatacatatccgcattgccaaaatggactcctatgctcggatcttcttccccactgccttctgcctgtttaatctggtctattgggtctcctacctctacctgtgaggaggtatgggttttactgatatggttcttattcactgagtctcatggagagatgtctgttctaagtccacttaaataatcctctatgtggttgataatgatctgaatctgtttctatgtccaaacctggtaaattttataatgtcatattgtttgtgcccagccctcctttggttagtgtactttgaacttcgatgtttgctgtgtttcaaacctgcaaggcaaagtaaaattagagcaagaacattcaaaccaaataagatatttttcagctacagcaaataaaacagtgaaagccctgactatttacagtagtggtatccttactagattcataatgcaattagatagaaaaggtccaaaactgtaccctatgttcactccgggtcaagttgtgataaatttgatcccaatagaatacctccctcatttaagaaaaatcataactcactttaaatatgaaagcctagtccagaaatctattacacctttatctcaagataggaagaaaatttcctccacattcatgtacaatgatgtaaatatttcaataacttagaatgcttcaagtttagtgcatgcatctctttagatccaaaataaatggactgaagttatcatcctattgtcttttattttgtgtccttgggctataaaagattcctgaatgtaattataaggatttgggtttggaaatggagggaggaattttcattgccttctccctcatgcatgaagattcgaacagcttattttttccttgtatgacatattacaacactttaagtaaaatatagactggataatcaacatttgccacctctaaatatgcccaatttcataactagagtataaagtaattgtatgtgcttgccgctatttttttcttccttttaggatgatagatcataacagaacttattctccatctcaagatctgcttctagtgattgtgagtgccttgtgggcagaatccttgtcatttcctctttgggtctgtagcaccttgcatagtgcctggcatatagttggtgctcaataaatatggtttgaagtgaattgccctcacatgcttctggcaaatctctgtgctggcctgaaaccagtgactcatcttctcacataggtgttgtcaagtgatatttgattttgtaaaaataaccagtaggatccaaagaactttagctatttatgttcatcttcaaaaaattattttaggcaaagtccatactccttttaaaacaatatttatgtcctatgtttgtgtatagacatgactctactagggcataattagagtttgtgtattatttttccaggtttggggatgagtcagtccttgcccatccacaattttgtttgtgaacttataacaggaataagcaaaattcatacctgactagtgttcagaatgtagcattctgtgcgaaaaagtattgaagattagcttttaaaaactgaaaaaaaaaaatgaatgactcacatagaggttgagccaatgactgtggcctcattagattacattgtagttaaacaaagcaatttctccagacttaaaacatgatgagttgagctctatcttcatgtactcatcctgaatccttatttttctaaaatagcaccctttgttaattatttttatggaaattattactctgtcataattaaatcatagctagtataactttacagataacctaaaaagaatagaaaagaagagagagtggctttgtcagtataaaaccatgtaaagtcatcatcaagtcatctggatgaatcttgaaacacatttagctgccagttttacaaacctttaatatatcagtgctccagtatataacctcaaacaaatgtaaatagaacgaattattttcttgttttgaattgtcaatatattaaatgttgactctttgggagagttgttggcaagtttcaatggtgagaaacattattgtcaacttgaaatgtgttctgtaatggggacactacaaaaagctagctttccaatgtgtgcatagtattggcaatatgaatatatattatatataatctaatacttattataagctgctccctgtctatgtatttggaaaccttttcacaaagggaattgcctaacatgtggacttttacaataaaaatgctgcattctaatccatggtggcatc

SEQ ID NO: 11816 - DNA, 1739 bp, Homo sapiens
  source 1..1739: mol_type = unassigned DNA
tgacgctttgatggtatctgcaagcgtttttgctgatcttatctctgccccctgaatattaattccctaatctggtagcaatccatctccccagtgaaggacctactagaggcaggtggggggagccaccatcagatcataagcataagaataatacaaaggggagggattcttctgcaaccaagaggcaagaggcgagagaaggaaaaaaaaaaaagcgatgagttcgccaaatatatggagcacaggaagctcagtctactcgactcctgtattttcacagaaaatgacggtgtggattctgctcctgctgtcgctctaccctggcttcactagccagaaatctgatgatgactatgaagattatgcttctaacaaaacatgggtcttgactccaaaagttcctgagggtgatgtcactgtcatcttaaacaacctgctggaaggatatgacaataaacttcggcctgatataggagtgaagccaacgttaattcacacagacatgtatgtgaatagcattggtccagtgaacgctatcaatatggaatacactattgatatattttttgcgcaaacgtggtatgacagacgtttgaaatttaacagcaccattaaagtcctccgattgaacagcaacatggtggggaaaatctggattccagacactttcttcagaaattccaaaaaagctgatgcacactggatcaccacccccaacaggatgctgagaatttggaatgatggtcgagtgctctacaccctaaggttgacaattgatgctgagtgccaattacaattgcacaactttccaatggatgaacactcctgccccttggagttctccagttatggctatccacgtgaagaaattgtttatcaatggaagcgaagttctgttgaagtgggcgacacaagatcctggaggctttatcaattctcatttgttggtctaagaaataccaccgaagtagtgaagacaacttccggagattatgtggtcatgtctgtctactttgatctgagcagaagaatgggatactttaccatccagacctatatcccctgcacactcattgtcgtcctatcctgggtgtctttctggatcaataaggatgctgttccagccagaacatctttaggtatcaccactgtcctgacaatgaccaccctcagcaccattgcccggaaatcgctccccaaggtctcctatgtcacagcgatggatctctttgtatctgtttgtttcatctttgtcttctctgctctggtggagtatggcaccttgcattattttgtcagcaaccggaaaccaagcaaggacaaagataaaaagaagaaaaaccctgcccctaccattgatatccgcccaagatcagcaaccattcaaatgaataatgctacacaccttcaagagagagatgaagagtacggctatgagtgtctggacggcaaggactgtgccagttttttctgctgttttgaagattgtcgaacaggagcttggagacatgggaggatacatatccgcattgccaaaatggactcctatgctcggatcttcttccccactgccttctgcctgtttaatctggtctattgggtctcctacctctacctgtgaggaggtatgggttttactgatatggttcttattcactgagtctcatggagagatgtctgttctaagtccacttaaataatcctctatgtggttgataatgatctgaatctgtttc

SEQ ID NO: 11817 - DNA, 1923 bp, Homo sapiens
  source 1..1923: mol_type = unassigned DNA
ctactcgactcctgtattttcacagaaaatgacggtgtggattctgctcctgctgtcgctctaccctggaagaaaactttcttcttacccacataaattgagatttgaaaatgaatgaagaaaaacattgatagaaataacctcaatatcaagttggagatcctgacagagctaagtcatgttctacattcttcactagccagaaatctgatgatgactatgaagattatgcttctaacaaaacatgggtcttgactccaaaagttcctgagggtgatgtcactgtcatcttaaacaacctgctggaaggatatgacaataaacttcggcctgatataggagtgaagccaacgttaattcacacagacatgtatgtgaatagcattggtccagtgaacgctatcaatatggaatacactattgatatattttttgcgcaaacgtggtatgacagacgtttgaaatttaacagcaccattaaagtcctccgattgaacagcaacatggtggggaaaatctggattccagacactttcttcagaaattccaaaaaagctgatgcacactggatcaccacccccaacaggatgctgagaatttggaatgatggtcgagtgctctacaccctaaggttgacaattgatgctgagtgccaattacaattgcacaactttccaatggatgaacactcctgccccttggagttctccagttatggctatccacgtgaagaaattgtttatcaatggaagcgaagttctgttgaagtgggcgacacaagatcctggaggctttatcaattctcatttgttggtctaagaaataccaccgaagtagtgaagacaacttccggagattatgtggtcatgtctgtctactttgatctgagcagaagaatgggatactttaccatccagacctatatcccctgcacactcattgtcgtcctatcctgggtgtctttctggatcaataaggatgctgttccagccagaacatctttaggtatcaccactgtcctgacaatgaccaccctcagcaccattgcccggaaatcgctccccaaggtctcctatgtcacagcgatggatctctttgtatctgtttgtttcatctttgtcttctctgctctggtggagtatggcaccttgcattattttgtcagcaaccggaaaccaagcaaggacaaagataaaaagaagaaaaaccctgcccctaccattgatatccgcccaagatcagcaaccattcaaatgaataatgctacacaccttcaagagagagatgaagagtacggctatgagtgtctggacggcaaggactgtgccagttttttctgctgttttgaagattgtcgaacaggagcttggagacatgggaggatacatatccgcattgccaaaatggactcctatgctcggatcttcttccccactgccttctgcctgtttaatctggtctattgggtctcctacctctacctgtgaggaggtatgggttttactgatatggttcttattcactgagtctcatggagagatgtctgttctaagtccacttaaataatcctctatgtggttgataatgatctgaatctgtttctatgtccaaacctggtaaattttataatgtcatattgtttgtgcccagccctcctttggttagtgtactttgaacttcgatgtttgctgtgtttcaaacctgcaaggcaaagtaaaattagagcaagaacattcaaaccaaataagatatttttcagctacagcaaataaaacagtgaaagccctgactatttacagtagtggtatccttactagattcataatgcaattagatagaaaaggtccaaaactgtaccctatgttcactccgggtcaagttgtgataaatttgatcccaatagaatacctccctcatttaaga

SEQ ID NO: 11818 - DNA, 2004 bp, Homo sapiens
  source 1..2004: mol_type = unassigned DNA
gccgcccggttgcgcggaccggcgctagtgcgcgggtgggggcggcgcgccgcggtggcccggcgtcccgtgtgcgtccagtgtgcgccccgcgggggcgcggccagcgccagagtagatacctgtcccgcccgccgcggccagcagcctcggaggaagccagggcaaagagggccggcggagaccaggtccgcgccggaggaagccgcgcccggccgaggccccggaccctgcgccccgagctccacggcaccatggccccgaagctgctgctcctcctctgcctgttctcgggcttgcacgcgcggtccagaaaggtggaagaggatgaatatgaagattcatcatcaaaccaaaagtgggtcttggctccaaaatcccaagacaccgacgtgactcttattctcaacaagttgctaagagaatatgataaaaagctgaggccagatattggaataaaaccgaccgtaattgacgttgacatttatgttaacagcattggtcctgtgtcatcaataaacatggaataccaaattgacatattttttgctcagacctggacagatagtcgccttcgattcaacagcacaatgaaaattcttactctgaacagcaacatggtggggttaatctggatcccagacaccatcttccgcaattctaaaaccgcagaggctcactggatcaccacacccaatcagctcctccggatttggaatgacgggaaaatcctttacactttgaggctcaccatcaatgctgagtgccagctgcagctgcacaacttccccatggacgaacactcctgcccgctgattttctccagctatggctatcccaaagaagaaatgatttatagatggagaaaaaattcagtggaggcagctgaccagaaatcatggcggctttatcagtttgacttcatgggcctcagaaacaccacagaaatcgtgacaacgtctgcaggtgattatgttgtcatgactatatattttgaattgagtagaagaatgggatacttcaccattcagacatacattccctgtatactgactgtggttttatcctgggtgtcattttggatcaaaaaagatgctacgccagcaagaacagcattaggcatcaccacggtgctgaccatgaccaccctgagcaccatcgccaggaagtccttgccacgcgtgtcctacgtgaccgccatggacctttttgtgaccgtgtgcttcctgtttgtcttcgccgcgctgatggagtatgccaccctcaactactattccagctgtagaaaaccaaccaccacgaagaagacaacatcgttactacatccagattcctcaagatggattcctgagcgaataagcctacaagccccttccaactattccctcctggacatgaggccaccaccaactgcgatgatcactttaaacaattccgtttactggcaggaatttgaagatacctgtgtctatgagtgtctggatggcaaagactgtcagagcttcttctgctgctatgaagaatgtaaatcaggatcctggaggaaagggcgtattcacatagacatcttggagctggactcgtactcccgggtctttttccccacgtccttcctgctctttaacctggtctactgggttggatacctgtatctctaagtgttgctcagagtgaagagtgaagagcatttggtacacacttgaccttctgtcgtccccagaccagtagtgaccaatcgggagtagcaaggaaggacactgcccagtgtatcttgttataaatgacctttcagcaacacaggaagtacccagcaaaggtttctattatgtattttacacacacacatacatacacacacacagctaattgagttttaaagtaatattcttgctaatccctactgaattgtagcttggtgttgtttctgaatggtttttggatattggaagcagccgctgattacccttgcaaagaaatctgtaaaatgtgcacgtgaatgtctga

SEQ ID NO: 11819 - DNA, 3310 bp, Homo sapiens
  source 1..3310: mol_type = unassigned DNA
agagccactccatctgagggtggctgcgtgtccacatacgaggggacagggctgaggatgaggagaaccctggggacccagaagaccgtgccttgcctggaagtcctgcctgtaggcctgaaggacttgccctaacagagcctcaacaactacctggtgattcctacttcagccccttggtgtgagcagcttctcaacatgaactacagcctccacttggccttcgtgtgtctgagtctcttcactgagaggatgtgcatccaggggagtcagttcaacgtcgaggtcggcagaagtgacaagctttccctgcctggctttgagaacctcacagcaggatataacaaatttctcaggcccaattttggtggagaacccgtacagatagcgctgactctggacattgcaagtatctctagcatttcagagagtaacatggactacacagccaccatatacctccgacagcgctggatggaccagcggctggtgtttgaaggcaacaagagcttcactctggatgcccgcctcgtggagttcctctgggtgccagatacttacattgtggagtccaagaagtccttcctccatgaagtcactgtgggaaacaggctcatccgcctcttctccaatggcacggtcctgtatgccctcagaatcacgacaactgttgcatgtaacatggatctgtctaaataccccatggacacacagacatgcaagttgcagctggaaagctggggctatgatggaaatgatgtggagttcacctggctgagagggaacgactctgtgcgtggactggaacacctgcggcttgctcagtacaccatagagcggtatttcaccttagtcaccagatcgcagcaggagacaggaaattacactagattggtcttacagtttgagcttcggaggaatgttctgtatttcattttggaaacctacgttccttccactttcctggtggtgttgtcctgggtttcattttggatctctctcgattcagtccctgcaagaacctgcattggagtgacgaccgtgttatcaatgaccacactgatgatcgggtcccgcacttctcttcccaacaccaactgcttcatcaaggccatcgatgtgtacctggggatctgctttagctttgtgtttggggccttgctagaatatgcagttgctcactacagttccttacagcagatggcagccaaagatagggggacaacaaaggaagtagaagaagtcagtattactaatatcatcaacagctccatctccagctttaaacggaagatcagctttgccagcattgaaatttccagcgacaacgttgactacagtgacttgacaatgaaaaccagcgacaagttcaagtttgtcttccgagaaaagatgggcaggattgttgattatttcacaattcaaaaccccagtaatgttgatcactattccaaactactgtttcctttgatttttatgctagccaatgtattttactgggcatactacatgtatttttgagtcaatgttaaatttcttgcatgccataggtcttcaacaggacaagataatgatgtaaatggtattttaggccaagtgtgcacccacatccaatggtgctacaagtgactgaaataatatttgagtctttctgctcaaagaatgaagctccaaccattgttctaagctgtgtagaagtcctagcattataggatcttgtaatagaaacatcagtccattcctctttcatcttaatcaaggacattcccatggagcccaagattacaaatgtactcagggctgtttattcggtggctccctggtttgcatttacctcatataaagaatgggaaggagaccattgggtaaccctcaagtgtcagaagttgtttctaaagtaactatacatgttttttactaaatctctgcagtgcttataaaatacattgttgcctatttagggagtaacattttctagtttttgtttctggttaaaatgaaatatgggcttatgtcaattcattggaagtcaatgcactaactcaataccaagatgagtttttaaataatgaatattatttaataccacaacagaattatccccaatttccaataagtcctatcattgaaaattcaaatataagtgaagaaaaaattagtagatcaacaatctaaacaaatccctcggttctaagatacaatggattccccatactggaaggactctgaggctttattcccccactatgcatatcttatcattttattattatacacacatccatcctaaactatactaaagcccttttcccatgcatggatggaaatggaagatttttttttaacttgttctagaagtcttaatatgggctgttgccatgaaggcttgcagaattgagtccattttctagctgcctttattcacatagtgatggggtactaaaagtactgggttgactcagagagtcgctgtcattctgtcattgctgctactctaacactgagcaacactctcccagtggcagatcccctgtatcattccaagaggagcattcatccctttgctctaatgatcaggaatgatgcttattagaaaacaaactgcttgacccaggaacaagtggcttagcttaagtaaacttggctttgctcagatccctgatccttccagctggtctgctatgagtggcttatcccgcatgagcaggagcgtgctggccctgagtactgaactttctgagtaacaatgagatacgttacagaacctatgttcaggttgcgggtgagctgccctctccaaatccagccagagatgcacattcctcggccagtctcagccaacagtaccaaaagtgatttttgagtgtgccagggtaaaggcttccagttcagcctcagttattttagacaatctcgccatctttaatttcttagcttcctgttctaataaatgcacggctttacctttcctgtcagaaataaaccaaggctctaaaagatgatttcccttctgtaactccctagagccacaggttctcattccttttcccattatacttctcacaattcagtttctatgagtttgatcacctgatttttttaacaaaatatttctaacgggaatgggtgggagtgctggtgaaaagaggtgaaatgtggttgtatgagccaatcatatttgtgattttttaaaaaaagtttaaaaggaaatatctgttctgaaaccccacttaagcattgtttttatataaaaacaatgataaagatgtgaaactgtgaaataaatataccatattagctacccaccaaa

SEQ ID NO: 11820 - DNA, 582 bp, Homo sapiens
  source 1..582: mol_type = unassigned DNA
tttgctccccttcctttctctctctcccttcccggctcctagactgggtctaggcaggagcttcgccatgatgtcaggagggaaggagatgcctctgggcctcgtaccacagcctcagctctctctctgcccctccatctgagtccctcctggctcccagctccctcagggtgcaaggccaagcctccaaggaatccctccccttacctgcatggctggagccaagaagagccactccatctgagggtggctgcgtgtccacatacgaggggacagggctgaggatgaggagaaccctggggacccagaagaccgtgccttgcctggaagtcctgcctgtaggcctgaaggacttgccctaacagagcctcaacaactacctggtgattcctacttcagccccttggtgtgagcagcttctcaacatgaactacagcctccacttggccttcgtgtgtctgagtctcttcactgagaggatgtgcatccaggggagtcagttcaacgtcgaggtcggcagaagtgacaagctttccctgcctggctttgagaacctcacagcaggatataacaaatttctca

SEQ ID NO: 11821 - DNA, 3576 bp, Homo sapiens
  source 1..3576: mol_type = unassigned DNA
ctgcccctccatttgctccccttcctttctctctctcccttcccggctcctagactgggtctaggcaggagcttcgccatgatgtcaggagggaaggagatgcctctgggcctcgtaccacagcctcagctctctctctgcccctccatctgagtccctcctggctcccagctccctcagggtgcaaggccaagcctccaaggaatccctccccttacctgcatggctggagccaagacaggtttagcagctccattcttccccagagagccactccatctgagggtggctgcgtgtccacatacgaggggacagggctgaggatgaggagaaccctggggacccagaagaccgtgccttgcctggaagtcctgcctgtaggcctgaaggacttgccctaacagagcctcaacaactacctggtgattcctacttcagccccttggtgtgagcagcttctcaacatgaactacagcctccacttggccttcgtgtgtctgagtctcttcactgagaggatgtgcatccaggggagtcagttcaacgtcgaggtcggcagaagtgacaagctttccctgcctggctttgagaacctcacagcaggatataacaaatttctcaggcccaattttggtggagaacccgtacagatagcgctgactctggacattgcaagtatctctagcatttcagagagtaacatggactacacagccaccatatacctccgacagcgctggatggaccagcggctggtgtttgaaggcaacaagagcttcactctggatgcccgcctcgtggagttcctctgggtgccagatacttacattgtggagtccaagaagtccttcctccatgaagtcactgtgggaaacaggctcatccgcctcttctccaatggcacggtcctgtatgccctcagaatcacgacaactgttgcatgtaacatggatctgtctaaataccccatggacacacagacatgcaagttgcagctggaaagctggggctatgatggaaatgatgtggagttcacctggctgagagggaacgactctgtgcgtggactggaacacctgcggcttgctcagtacaccatagagcggtatttcaccttagtcaccagatcgcagcaggagacaggaaattacactagattggtcttacagtttgagcttcggaggaatgttctgtatttcattttggaaacctacgttccttccactttcctggtggtgttgtcctgggtttcattttggatctctctcgattcagtccctgcaagaacctgcattggagtgacgaccgtgttatcaatgaccacactgatgatcgggtcccgcacttctcttcccaacaccaactgcttcatcaaggccatcgatgtgtacctggggatctgctttagctttgtgtttggggccttgctagaatatgcagttgctcactacagttccttacagcagatggcagccaaagatagggggacaacaaaggaagtagaagaagtcagtattactaatatcatcaacagctccatctccagctttaaacggaagatcagctttgccagcattgaaatttccagcgacaacgttgactacagtgacttgacaatgaaaaccagcgacaagttcaagtttgtcttccgagaaaagatgggcaggattgttgattatttcacaattcaaaaccccagtaatgttgatcactattccaaactactgtttcctttgatttttatgctagccaatgtattttactgggcatactacatgtatttttgagtcaatgttaaatttcttgcatgccataggtcttcaacaggacaagataatgatgtaaatggtattttaggccaagtgtgcacccacatccaatggtgctacaagtgactgaaataatatttgagtctttctgctcaaagaatgaagctccaaccattgttctaagctgtgtagaagtcctagcattataggatcttgtaatagaaacatcagtccattcctctttcatcttaatcaaggacattcccatggagcccaagattacaaatgtactcagggctgtttattcggtggctccctggtttgcatttacctcatataaagaatgggaaggagaccattgggtaaccctcaagtgtcagaagttgtttctaaagtaactatacatgttttttactaaatctctgcagtgcttataaaatacattgttgcctatttagggagtaacattttctagtttttgtttctggttaaaatgaaatatgggcttatgtcaattcattggaagtcaatgcactaactcaataccaagatgagtttttaaataatgaatattatttaataccacaacagaattatccccaatttccaataagtcctatcattgaaaattcaaatataagtgaagaaaaaattagtagatcaacaatctaaacaaatccctcggttctaagatacaatggattccccatactggaaggactctgaggctttattcccccactatgcatatcttatcattttattattatacacacatccatcctaaactatactaaagcccttttcccatgcatggatggaaatggaagatttttttttaacttgttctagaagtcttaatatgggctgttgccatgaaggcttgcagaattgagtccattttctagctgcctttattcacatagtgatggggtactaaaagtactgggttgactcagagagtcgctgtcattctgtcattgctgctactctaacactgagcaacactctcccagtggcagatcccctgtatcattccaagaggagcattcatccctttgctctaatgatcaggaatgatgcttattagaaaacaaactgcttgacccaggaacaagtggcttagcttaagtaaacttggctttgctcagatccctgatccttccagctggtctgctatgagtggcttatcccgcatgagcaggagcgtgctggccctgagtactgaactttctgagtaacaatgagatacgttacagaacctatgttcaggttgcgggtgagctgccctctccaaatccagccagagatgcacattcctcggccagtctcagccaacagtaccaaaagtgatttttgagtgtgccagggtaaaggcttccagttcagcctcagttattttagacaatctcgccatctttaatttcttagcttcctgttctaataaatgcacggctttacctttcctgtcagaaataaaccaaggctctaaaagatgatttcccttctgtaactccctagagccacaggttctcattccttttcccattatacttctcacaattcagtttctatgagtttgatcacctgatttttttaacaaaatatttctaacgggaatgggtgggagtgctggtgaaaagaggtgaaatgtggttgtatgagccaatcatatttgtgattttttaaaaaaagtttaaaaggaaatatctgttctgaaaccccacttaagcattgtttttatataaaaacaatgataaagatgtgaaactgtgaaataaatataccatattagctacccaccaaa

SEQ ID NO: 11822 - DNA, 689 bp, Homo sapiens
  source 1..689: mol_type = unassigned DNA
agacgcgaaggaggctttgggttggggagaagggcagcaatgagatgcggctgcagtccaggaatagtcagggaaacagataatttggttaaaatatctcagcctaataagggaactgggcaggtggggataactaaaaaagagtgcataaaagagtgttgtccaagttggcaccagagtcggggagttttcaggggtttagaagcctggccgtcaatacccacaacagttatggaggcaagggaaacaggcccttgaaaagaaggtaatgtggagtgggtagcctccgtattgactaaggggacggacttaccttccactgtgagagttacccgaagctcggagtccgtgatggtctacggagcttccgaggcgatcgggcagcatcagtcttcagctgctaagccgagaaggagtcagtcagagagccttgggccagagttccaggggctctgggagtggctgccaggtgattcctacttcagccccttggtgtgagcagcttctcaacatgaactacagcctccacttggccttcgtgtgtctgagtctcttcactgagaggatgtgcatccaggggagtcagttcaacgtcgaggtcggcagaagtgacaagctttccctgcctggctttgagaacctcacagcaggatataacaaatttctcaggcccaattttggtggagaac

SEQ ID NO: 11823 - DNA, 456 bp, Homo sapiens
  source 1..456: mol_type = unassigned DNA
aatcggacacgatcagcagggagaacacatgtgtttttatgagaattacgctgagataggtaacagatgaggatgaaatttgggcttgactgaagtaatgggggctgtctgtgaagccttgcggcagtacagcccaggtgattcctacttcagccccttggtgtgagcagcttctcaacatgaactacagcctccacttggccttcgtgtgtctgagtctcttcactgagaggatgtgcatccaggggagtcagttcaacgtcgaggtcggcagaagtgacaagctttccctgcctggctttgagaacctcacagcaggatataacaaatttctcaggcccaattttggtggagaacccgtacagatagcgctgactctggacattgcaagtatctctagcatttcagagagtaacatggactacacagccaccatatacctccgacagcgctgga

SEQ ID NO: 11824 - DNA, 721 bp, Homo sapiens
  source 1..721: mol_type = unassigned DNA
aggtgggaaggctaaactgaggaattatgtctgacagaagggaatgacaaggctaaactgaagaattatgtctgacagaagggaagaaatgactgcagtggccttctcagaccctgtaggaaaggactctacttatccggtgaaagtgtctacctagactaagaggtgattcctacttcagccccttggtgtgagcagcttctcaacatgaactacagcctccacttggccttcgtgtgtctgagtctcttcactgagaggatgtgcatccaggggagtcagttcaacgtcgaggtcggcagaagtgacaagctttccctgcctggctttgagaacctcacagcaggatataacaaatttctcaggcccaattttggtggagaacccgtacagatagcgctgactctggacattgcaagtatctctagcatttcagagagtaacatggactacacagccaccatatacctccgacagcgctggatggaccagcggctggtgtttgaaggcaacaagagcttcactctggatgcccgcctcgtggagttcctctgggtgccagatacttacattgtggagtccaagaagtccttcctccatgaagtcactgtgggaaacaggctcatccgcctcttctccaatggcacggtcctgtatgccctcagaatcacgacaactgttgcatgtaacatggatctgtctaaataccccatggacacac

SEQ ID NO: 11825 - DNA, 700 bp, Homo sapiens
  source 1..700: mol_type = unassigned DNA
agtcaaggagtgagggacagggaatgaacatgccatggcacagggcaggacctgctgaaagacagacaggcccagcagcgtagagaagcggtgattcctacttcagccccttggtgtgagcagcttctcaacatgaactacagcctccacttggccttcgtgtgtctgagtctcttcactgagaggatgtgcatccaggggagtcagttcaacgtcgaggtcggcagaagtgacaagctttccctgcctggctttgagaacctcacagcaggatataacaaatttctcaggcccaattttggtggagaacccgtacagatagcgctgactctggacattgcaagtatctctagcatttcagagagtaacatggactacacagccaccatatacctccgacagcgctggatggaccagcggctggtgtttgaaggcaacaagagcttcactctggatgcccgcctcgtggagttcctctgggtgccagatacttacattgtggagtccaagaagtccttcctccatgaagtcactgtgggaaacaggctcatccgcctcttctccaatggcacggtcctgtatgccctcagaatcacgacaactgttgcatgtaacatggatctgtctaaataccccatggacacacagacatgcaagttgcagctggaaagctggggctatgatggaaatgatgtggagt

SEQ ID NO: 11826 - DNA, 2942 bp, Homo sapiens
  source 1..2942: mol_type = unassigned DNA
ttcttccccagagagccactccatctgagggtggctgcgtgtccacatacgaggggacagggctgaggatgaggagaaccctggggacccagaagaccgtgccttgcctggaagtcctgcctgtaggcctgaaggacttgccctaacagagcctcaacaactacctggtgattcctacttcagccccttggtgtgagcagcttctcaacatgaactacagcctccacttggccttcgtgtgtctgagtctcttcactgagaggagaacccgtacagatagcgctgactctggacattgcaagtatctctagcatttcagagagtaacatggactacacagccaccatatacctccgacagcgctggatggaccagcggctggtgtttgaaggcaacaagagcttcactctggatgaagtcactgtgggaaacaggctcatccgcctcttctccaatggcacggtcctgtatgccctcagaatcacgacaactgttgcatgtaacatggatctgtctaaataccccatggacacacagacatgcaagttgcagctggaaagctggggctatgatggaaatgatgtggagttcacctggctgagagggaacgactctgtgcgtggactggaacacctgcggcttgctcagtacaccatagagcggtatttcaccttagtcaccagatcgcagcaggagacaggaaattacactagattggtcttacagtttgagcttcggaggaatgttctgtatttcattttggaaacctacgttccttccactttcctggtggtgttgtcctgggtttcattttggatctctctcgattcagtccctgcaagaacctgcattggggacaacaaaggaagtagaagaagtcagtattactaatatcatcaacagctccatctccagctttaaacggaagatcagctttgccagcattgaaatttccagcgacaacgttgactacagtgacttgacaatgaaaaccagcgacaagttcaagtttgtcttccgagaaaagatgggcaggattgttgattatttcacaattcaaaaccccagtaatgttgatcactattccaaactactgtttcctttgatttttatgctagccaatgtattttactgggcatactacatgtatttttgagtcaatgttaaatttcttgcatgccataggtcttcaacaggacaagataatgatgtaaatggtattttaggccaagtgtgcacccacatccaatggtgctacaagtgactgaaataatatttgagtctttctgctcaaagaatgaagctccaaccattgttctaagctgtgtagaagtcctagcattataggatcttgtaatagaaacatcagtccattcctctttcatcttaatcaaggacattcccatggagcccaagattacaaatgtactcagggctgtttattcggtggctccctggtttgcatttacctcatataaagaatgggaaggagaccattgggtaaccctcaagtgtcagaagttgtttctaaagtaactatacatgttttttactaaatctctgcagtgcttataaaatacattgttgcctatttagggagtaacattttctagtttttgtttctggttaaaatgaaatatgggcttatgtcaattcattggaagtcaatgcactaactcaataccaagatgagtttttaaataatgaatattatttaataccacaacagaattatccccaatttccaataagtcctatcattgaaaattcaaatataagtgaagaaaaaattagtagatcaacaatctaaacaaatccctcggttctaagatacaatggattccccatactggaaggactctgaggctttattcccccactatgcatatcttatcattttattattatacacacatccatcctaaactatactaaagcccttttcccatgcatggatggaaatggaagatttttttttaacttgttctagaagtcttaatatgggctgttgccatgaaggcttgcagaattgagtccattttctagctgcctttattcacatagtgatggggtactaaaagtactgggttgactcagagagtcgctgtcattctgtcattgctgctactctaacactgagcaacactctcccagtggcagatcccctgtatcattccaagaggagcattcatccctttgctctaatgatcaggaatgatgcttattagaaaacaaactgcttgacccaggaacaagtggcttagcttaagtaaacttggctttgctcagatccctgatccttccagctggtctgctatgagtggcttatcccgcatgagcaggagcgtgctggccctgagtactgaactttctgagtaacaatgagatacgttacagaacctatgttcaggttgcgggtgagctgccctctccaaatccagccagagatgcacattcctcggccagtctcagccaacagtaccaaaagtgatttttgagtgtgccagggtaaaggcttccagttcagcctcagttattttagacaatctcgccatctttaatttcttagcttcctgttctaataaatgcacggctttacctttcctgtcagaaataaaccaaggctctaaaagatgatttcccttctgtaactccctagagccacaggttctcattccttttcccattatacttctcacaattcagtttctatgagtttgatcacctgatttttttaacaaaatatttctaacgggaatgggtgggagtgctggtgaaaagaggtgaaatgtggttgtatgagccaatcatatttgtgattttttaaaaaaagtttaaaaggaaatatctgttctgaaaccccacttaagcattgtttttatataaaaacaatgataaagatgtgaaactgtgaaataaatataccatattagctacccacc

SEQ ID NO: 11827 - DNA, 5761 bp, Homo sapiens
  source 1..5761: mol_type = unassigned DNA
gccgcccctgagcagcctcgccttcgcctcccgcgtttcctgccgtccgccctcccccggccgagctccaggggctgccgcctagcagctcccggcgggagagcggttcagagcgcgcacgggggcgggcggaggcggcccggtgcggggcggccgcgctggagagaggcgcgcgcggagacgccggcccccctctccgcgtttgctcgcttgctccccgcctcccgcactccgctcgctcccaccccttcccggcgtgattgatccgtcacgggcgccgccgctgccgccgccgccgccgcggccgttctgagccgagccggaaccctagcccgagacggagccggggcccgggccggcgccattgcgcgggcgccgcgggaagaccttggcgcggggcggcgggccgggccaggccatgcgggccgagtgagccggcgcccgcagcccgcggcgcggcatggcttccccgcggagctccgggcagcccgggccgccgccgccgccgccaccgccgcccgcgcgcctgctactgctactgctgctgccgctgctgctgcctctggcgcccggggcctggggctgggcgcggggcgccccccggccgccgcccagcagcccgccgctctccatcatgggcctcatgccgctcaccaaggaggtggccaagggcagcatcgggcgcggtgtgctccccgccgtggaactggccatcgagcagatccgcaacgagtcactcctgcgcccctacttcctcgacctgcggctctatgacacggagtgcgacaacgcaaaagggttgaaagccttctacgatgcaataaaatacgggcctaaccacttgatggtgtttggaggcgtctgtccatccgtcacatccatcattgcagagtccctccaaggctggaatctggtgcagctttcttttgctgcaaccacgcctgttctagccgataagaaaaaatacccttatttctttcggaccgtcccatcagacaatgcggtgaatccagccattctgaagttgctcaagcactaccagtggaagcgcgtgggcacgctgacgcaagacgttcagaggttctctgaggtgcggaatgacctgactggagttctgtatggcgaggacattgagatttcagacaccgagagcttctccaacgatccctgtaccagtgtcaaaaagctgaaggggaatgatgtgcggatcatccttggccagtttgaccagaatatggcagcaaaagtgttctgttgtgcatacgaggagaacatgtatggtagtaaatatcagtggatcattccgggctggtacgagccttcttggtgggagcaggtgcacacggaagccaactcatcccgctgcctccggaagaatctgcttgctgccatggagggctacattggcgtggatttcgagcccctgagctccaagcagatcaagaccatctcaggaaagactccacagcagtatgagagagagtacaacaacaagcggtcaggcgtggggcccagcaagttccacgggtacgcctacgatggcatctgggtcatcgccaagacactgcagagggccatggagacactgcatgccagcagccggcaccagcggatccaggacttcaactacacggaccacacgctgggcaggatcatcctcaatgccatgaacgagaccaacttcttcggggtcacgggtcaagttgtattccggaatggggagagaatggggaccattaaatttactcaatttcaagacagcagggaggtgaaggtgggagagtacaacgctgtggccgacacactggagatcatcaatgacaccatcaggttccaaggatccgaaccaccaaaagacaagaccatcatcctggagcagctgcggaagatctccctacctctctacagcatcctctctgccctcaccatcctcgggatgatcatggccagtgcttttctcttcttcaacatcaagaaccggaatcagaagctcataaagatgtcgagtccatacatgaacaaccttatcatccttggagggatgctctcctatgcttccatatttctctttggccttgatggatcctttgtctctgaaaagacctttgaaacactttgcaccgtcaggacctggattctcaccgtgggctacacgaccgcttttggggccatgtttgcaaagacctggagagtccacgccatcttcaaaaatgtgaaaatgaagaagaagatcatcaaggaccagaaactgcttgtgatcgtggggggcatgctgctgatcgacctgtgtatcctgatctgctggcaggctgtggaccccctgcgaaggacagtggagaagtacagcatggagccggacccagcaggacgggatatctccatccgccctctcctggagcactgtgagaacacccatatgaccatctggcttggcatcgtctatgcctacaagggacttctcatgttgttcggttgtttcttagcttgggagacccgcaacgtcagcatccccgcactcaacgacagcaagtacatcgggatgagtgtctacaacgtggggatcatgtgcatcatcggggccgctgtctccttcctgacccgggaccagcccaatgtgcagttctgcatcgtggctctggtcatcatcttctgcagcaccatcaccctctgcctggtattcgtgccgaagctcatcaccctgagaacaaacccagatgcagcaacgcagaacaggcgattccagttcactcagaatcagaagaaagaagattctaaaacgtccacctcggtcaccagtgtgaaccaagccagcacatcccgcctggagggcctacagtcagaaaaccatcgcctgcgaatgaagatcacagagctggataaagacttggaagaggtcaccatgcagctgcaggacacaccagaaaagaccacctacattaaacagaaccactaccaagagctcaatgacatcctcaacctgggaaacttcactgagagcacagatggaggaaaggccattttaaaaaatcacctcgatcaaaatccccagctacagtggaacacaacagagccctctcgaacatgcaaagatcctatagaagatataaactctccagaacacatccagcgtcggctgtccctccagctccccatcctccaccacgcctacctcccatccatcggaggcgtggacgccagctgtgtcagcccctgcgtcagccccaccgccagcccccgccacagacatgtgccaccctccttccgagtcatggtctcgggcctgtaagggtgggaggcctgggcccggggcctcccccgtgacagaaccacactgggcagaggggtctgctgcagaaacactgtcggctctggctgcggagaagctgggcaccatggctggcctctcaggaccactcggatggcactcaggtggacaggacggggcagggggagacttggcacctgacctcgagccttatttgtgaagtccttatttcttcacaaagaagaggaacggaaatgggacgtcttccttaacatctgcaaacaaggaggcgctgggatatcaaacttgcaaaaaaaaaaaaaaaaaaaaaaaaacaaaaaaactagacaaggagagaggcactagaactccagctggaagtcacggagtggctcgagcagccttgggaagaggcaaggagcttctgaagaaactgcctctgcacacacatcactggctgtgacccctcaggctagcccttctccactctgggggaggaggtgggaagggccaccaggcccccagctgccaggccagctgaccccagccttcctggaacagggagtctgcaggagcgcagacaggcacagccctggagcaggcaggccgagggctgcggcactggagcaggctgacttacatgctccacatgggacctgtgtcacccaatgagatgtttgttactctggtaaatgccacacgttaacacaataacacccattcctgggaccgtggggatttagggcacgtcactgcagacacgctctgcagcattcaccgacagtctgtcatgcacccaccacgttggccatgtccttgtgttcctatcggatgctcccagtaaccagggggaccacccgagctaatcatggaatgtctgttcccagcaaacacgataaagaaagattgtgcactttaacctctctcatcagggcccaagggctggctgggattttttttttttttttcccactaactttgtttctgaccaaagtgaattggaggcactctgctaaaagacatccccgtagacataggggagagagttgctggctgagggcttcccttggcttccagaaggcagccttccatccagacaagccagtgagctctccccttgggatcactggggtgatcagtcagcagattgattctcattcataagatcattcctccctttaaattgagcccctaagagcactggcctgggagtcagacagacctgggttcaagtcctcagtcccctgcccactccctacgtgactttgatcaggtcactagtgtctctctgagcctcagtttcccctctgtaacttggggttgaactaaaacacctgtcctgcctacctcacaaggtcactctgaggattgaaacttgatcttgtccaggaaagctttgtaccaaacagtgaagccgccctgatccgtgaggtatgagtatgactctgaccttcagccctccctacagccgggggtgtggcccagagaagcttccagcacagccctctacccagaacatccgggctggagggaggctcccagtgacttttctgacattcctagacaggttcattctttgctcaagaaaggcctgaatgacaatgtccaggatgtctgcacaactgagcagctcgctcactccctaaagaaacctattggcagcttcaacaggcaggcaataatctcttcccagaaccactgcagtcaggaataaactgttttctccaccaggctttgacaaaagggcccacaggaatcttaccaatgccaacatttcaaagcaccctatttcacgtagcatagctttctgctccccttccccaaagagaggttatggaggtactgtagcttttagggaaaaaaaaatgttaacacatcacaggtcaagttgaagtcattctctgtttaggcactaaaaatcggtgttgtcactcactgtgtattaccagtatttacttgctttcttgatttcaccaaaaccaaatttaatttaaaggaccacattaatttttcaaagggaaagagacaattaattgtacataatgtatacacacacacaaaaaaaaatacctgtagaaatattattccagcatagcaggaaaacaaacaaaagtattggactgtcggaggtgagcctgtgcgtctgtaaccctttgtgactcctgagcgtgcgctgtcttctaggttaactcacgaagtacattctctgtcttactgatactgtaggttcacccatttttttttaatttcctcgcaaataacaagacccacagaagtgactctagctacttaatggttctgttcttttatatgcagcaaacacaccgtccatttctgaagaggcttcggcctgaaggcattttccaatgatgttagtgcacaaaacgctttaaattagactggaactgccagaatcaaatgtaaatgaggaatttctcgtacccctactgcatggtatcgatttttaataaattgttgcaaatttgtttttatgaa

SEQ ID NO: 11828 - DNA, 1823 bp, Homo sapiens
  source 1..1823: mol_type = unassigned DNA
caagatggccgaataggaacagctcccgtctacagctcccagcgtgagcgacgcagaagacggatatttttgatctgcacttggttgaatctacagatgtaaaacccacggatgcagagggctgactgtggctagaaaatgtgctgcagggagcacgtggaaacagctgatgagcacctgcagcccctgtttgggagcagctggggtgtgctgcctgccgttcacccatcagtcaaatcgaggcttcatgaaggcaaaggcagtggcatctcagaatttgacaaacctcctttcatcagtgactggttccatttcaggctggcccaaagtcaaagccccaaagacaaagacgagaagtacatgaagatgcccacaagcaagtcagcccaattctgagacgaagtcctgacatcaccaaatcgcctctgacaaagtcagaacagcttctgaggatagatgaccatgatttcagcatgaggcctggctttggaggccctgccattcctgttggtgtggatgtgcaggtggagagtttggatagcatctcagaggttgacatggactttacgatgaccctctacctgaggcactactggaaggacgagaggctgtcttttccaagcaccaacaacctcagcatgacgtttgacggccggctggtcaagaagatctgggtccctgacatgtttttcgtgcactccaaacgctccttcatccacgacaccaccacagacaacgtcatgttgcgggtccagcctgatgggaaagtgctctatagtctcagggttacagtaactgcaatgtgcaacatggacttcagccgatttcccttggacacacaaacgtgctctcttgaaattgaaagctatgcctatacagaagatgacctcatgctgtactggaaaaagggcaatgactccttaaagacagatgaacggatctcactctcccagttcctcattcaggaattccacaccaccaccaaactggctttctacagcagcacaggctggtacaaccgtctctacattaatttcacgttgcgtcgccacatcttcttcttcttgctccaaacttatttccccgctaccctgatggtcatgctgtcctgggtgtccttctggatcgaccgcagagccgtgcctgccagagtccccttaggtatcacaacggtgctgaccatgtccaccatcatcacgggcgtgaatgcctccatgccgcgcgtctcctacatcaaggccgtggacatctacctctgggtcagctttgtgttcgtgttcctctcggtgctggagtatgcggccgtcaactacctgaccactgtgcaggagaggaaggaacagaagctgcgggagaagcttccctgcaccagcggattacctccgccccgcactgcgatgctggacggcaactacagtgatggggaggtgaatgacctggacaactacatgccagagaatggagagaagcccgacaggatgatggtgcagctgaccctggcctcagagaggagctccccacagaggaaaagtcagagaagcagctatgtgagcatgagaatcgacacccacgccattgataaatactccaggatcatctttccagcagcatacattttattcaatttaatatactggtctattttctcctagatgcttgtaattctacaaatttcacatttccatggcatgcactacagaaataactgtataatgaaaaagtatttaaggatatggttaaaaaaaaatcccaggacccacccatgttttcactatcccttctgcagctttccaaagctacattgacgagacacttactggttt

SEQ ID NO: 11829 - DNA, 3110 bp, Homo sapiens
  source 1..3110: mol_type = unassigned DNA
taataatggccgtaagcttaaaatagatccagggaggagctcattaacgtgaacatagaaagcagttccgcacctctggccttactcctcttggaaattgctttggtccatttttacttccttttattcgacgcaccagaaaataagacttttaccaacatttttactgcatttgacgatgaactaatttagaccggctaaaataattgttccactgggacacaggaattcaacctcagttcagaaaatccctgacatctgacgtaggaggatttataggtttagtggaaattgctttctcctgctctccagattgcatcctgtgggttgattttttttttgcatgagtaaacatccttctaataatgaacagaccaataatgtcttaagagagaaaaagaacaatcttttcctttttgctgtttctggagagagctgtttgaatttggaaacccatgttggctgtcccaaatatgagatttggcatctttcttttgtggtggggatgggttttggccactgaaagcagaatgcactggcccggaagagaagtccacgagatgtctaagaaaggcagcccaattctgagacgaagtcctgacatcaccaaatcgcctctgacaaagtcagaacagcttctgaggatagatgaccatgatttcagcatgaggcctggctttggaggccctgccattcctgttggtgtggatgtgcaggtggagagtttggatagcatctcagaggttgacatggactttacgatgaccctctacctgaggcactactggaaggacgagaggctgtcttttccaagcaccaacaacctcagcatgacgtttgacggccggctggtcaagaagatctgggtccctgacatgtttttcgtgcactccaaacgctccttcatccacgacaccaccacagacaacgtcatgttgcgggtccagcctgatgggaaagtgctctatagtctcagggttacagtaactgcaatgtgcaacatggacttcagccgatttcccttggacacacaaacgtgctctcttgaaattgaaagctatgcctatacagaagatgacctcatgctgtactggaaaaagggcaatgactccttaaagacagatgaacggatctcactctcccagttcctcattcaggaattccacaccaccaccaaactggctttctacagcagcacaggctggtacaaccgtctctacattaatttcacgttgcgtcgccacatcttcttcttcttgctccaaacttatttccccgctaccctgatggtcatgctgtcctgggtgtccttctggatcgaccgcagagccgtgcctgccagagtccccttaggtatcacaacggtgctgaccatgtccaccatcatcacgggcgtgaatgcctccatgccgcgcgtctcctacatcaaggccgtggacatctacctctgggtcagctttgtgttcgtgttcctctcggtgctggagtatgcggccgtcaactacctgaccactgtgcaggagaggaaggaacagaagctgcgggagaagcttccctgcaccagcggattacctccgccccgcactgcgatgctggacggcaactacagtgatggggaggtgaatgacctggacaactacatgccagagaatggagagaagcccgacaggatgatggtgcagctgaccctggcctcagagaggagctccccacagaggaaaagtcagagaagcagctatgtgagcatgagaatcgacacccacgccattgataaatactccaggatcatctttccagcagcatacattttattcaatttaatatactggtctattttctcctagatgcttgtaattctacaaatttcacatttccatggcatgcactacagaaataactgtataatgaaaaagtatttaaggatatggttaaaaaaaaatcccaggacccacccatgttttcactatcccttctgcagctttccaaagctacattgacgagacacttactggtttaatttgcacttattaaccatctattgaatacacagcattatattaggtgctgcaggaaatacgacactgtagcgactgatgttagttgttacccagatcccctggaaaagcacactaccagtgttgtgggcacatttagttccacccgttagacccttgatgctattcacatgaataatttattttcctcaagtgtcattacattgttcaggctacgtgaacttggaagcacctacaggccatttgcatgaaattcacatgcacctaaatcctcactttgacagaaactcatgcttcagtttataacctattacctattttgtatgcgactccacctccgcatgtttattttaataaaaggcaatgataacattcacattatttttctttatatgctgtggttcacaggctttaccccttcacaagaaaagctctttagattggcgcaattgcttctgattttggtgaaattttccctggtagggaaactttgaagataagagtacacacatgcattttgtctgttgtgtcatagaggtaactaggctagaaaatttgtgtttaaatgttccctattttatataatcaccacttcatgtttcttcttcttggagcatgtccttgttcaaagagaagtgctttctcagtgatgtgatatcttcactgaggaacttgggtagagaatgatttcttctgcataaacacttcaaggaaatacataatttgggactacttgtaactcattagaatgagaaatactcacatggtttcttaagagaaaaagaacatcggaaagcaaaataaatgggaagatatcactggacatctgcatttatactcgaaataccagcattttctatggaccagaaaactgccatcacctagaccacacagcccagataccaggcagacggatggcccaatggcaactgatgtcagggcatggggtaaaggagagggttctaatctggtgtatcacttaaaaacagttatttatattatatatctgctatatagatcaacctccaccaaacttacccaaacagcatttgttttatttgaaactcactttaataaagtgaattatatacacaa

SEQ ID NO: 11830 - DNA, 1766 bp, Homo sapiens
  source 1..1766: mol_type = unassigned DNA
cagatatttttgatctgcacttggttgaatctacagatgtaaaacccacggatgcagagggctgactgtggctagaaaatgtgctgcagggagcacgtggaaacagctgatgagcacctgcagcccctgtttgggagcagctggggtgtgctgcctgccgttcacccatcagtcaaatcgaggcttcatgaaggcaaaggcagtggcatctcagaatttgacaaacctcctttcatcagtgactggttccatttcaggctggcccaaagtcaaataggccccaaagacaaagacgagaagtacatgaagatgcccacaagcaagtcagcccaattctgagacgaagtcctgacatcaccaaatcgcctctgacaaagtcagaacagcttctgaggatagatgaccatgatttcagcatgaggcctggctttggaggccctgccattcctgttggtgtggatgtgcaggtggagagtttggatagcatctcagaggttgacatggactttacgatgaccctctacctgaggcactactggaaggacgagaggctgtcttttccaagcaccaacaacctcagcatgacgtttgacggccggctggtcaagaagatctgggtccctgacatgtttttcgtgcactccaaacgctccttcatccacgacaccaccacagacaacgtcatgttgcgggtccagcctgatgggaaagtgctctatagtctcagggttacagtaactgcaatgtgcaacatggacttcagccgatttcccttggacacacaaacgtgctctcttgaaattgaaagctatgcctatacagaagatgacctcatgctgtactggaaaaagggcaatgactccttaaagacagatgaacggatctcactctcccagttcctcattcaggaattccacaccaccaccaaactggctttctacagcagcacaggctggtacaaccgtctctacattaatttcacgttgcgtcgccacatcttcttcttcttgctccaaacttatttccccgctaccctgatggtcatgctgtcctgggtgtccttctggatcgaccgcagagccgtgcctgccagagtccccttaggtatcacaacggtgctgaccatgtccaccatcatcacgggcgtgaatgcctccatgccgcgcgtctcctacatcaaggccgtggacatctacctctgggtcagctttgtgttcgtgttcctctcggtgctggagtatgcggccgtcaactacctgaccactgtgcaggagaggaaggaacagaagctgcgggagaagcttccctgcaccagcggattacctccgccccgcactgcgatgctggacggcaactacagtgatggggaggtgaatgacctggacaactacatgccagagaatggagagaagcccgacaggatgatggtgcagctgaccctggcctcagagaggagctccccacagaggaaaagtcagagaagcagctatgtgagcatgagaatcgacacccacgccattgataaatactccaggatcatctttccagcagcatacattttattcaatttaatatactggtctattttctcctagatgcttgtaattctacaaatttcacatttccatggcatgcactacagaaataactgtataatgaaaaagtatttaaggatatggttaaaaaaaaatcccaggacccacccatgttttcactatcccttctgcagctttccaaagctacattgacgagacacttactggttt

SEQ ID NO: 11831 - DNA, 2820 bp, Homo sapiens
  source 1..2820: mol_type = unassigned DNA
tgagtaaacatccttctaataatgaacagaccaataatgtcttaagagagaaaaagaacaatcttttcctttttgctgtttctggagagagctgtttgaatttggaaacccatgttggctgtcccaaatatgagatttggcatctttcttttgtggtggggatgggttttggccactgaaagcagaatgcactggcccggaagagaagtccacgagatgtctaagaaaggcaggccccaaagacaaagacgagaagtacatgaagatgcccacaagcaagtcagcccaattctgagacgaagtcctgacatcaccaaatcgcctctgacaaagtcagaacagcttctgaggatagatgaccatgatttcagcatgaggcctggctttggaggccctgccattcctgttggtgtggatgtgcaggtggagagtttggatagcatctcagaggttgacatggactttacgatgaccctctacctgaggcactactggaaggacgagaggctgtcttttccaagcaccaacaacctcagcatgacgtttgacggccggctggtcaagaagatctgggtccctgacatgtttttcgtgcactccaaacgctccttcatccacgacaccaccacagacaacgtcatgttgcgggtccagcctgatgggaaagtgctctatagtctcagggttacagtaactgcaatgtgcaacatggacttcagccgatttcccttggacacacaaacgtgctctcttgaaattgaaagctatgcctatacagaagatgacctcatgctgtactggaaaaagggcaatgactccttaaagacagatgaacggatctcactctcccagttcctcattcaggaattccacaccaccaccaaactggctttctacagcagcacaggctggtacaaccgtctctacattaatttcacgttgcgtcgccacatcttcttcttcttgctccaaacttatttccccgctaccctgatggtcatgctgtcctgggtgtccttctggatcgaccgcagagccgtgcctgccagagtccccttaggtatcacaacggtgctgaccatgtccaccatcatcacgggcgtgaatgcctccatgccgcgcgtctcctacatcaaggccgtggacatctacctctgggtcagctttgtgttcgtgttcctctcggtgctggagtatgcggccgtcaactacctgaccactgtgcaggagaggaaggaacagaagctgcgggagaagcttccctgcaccagcggattacctccgccccgcactgcgatgctggacggcaactacagtgatggggaggtgaatgacctggacaactacatgccagagaatggagagaagcccgacaggatgatggtgcagctgaccctggcctcagagaggagctccccacagaggaaaagtcagagaagcagctatgtgagcatgagaatcgacacccacgccattgataaatactccaggatcatctttccagcagcatacattttattcaatttaatatactggtctattttctcctagatgcttgtaattctacaaatttcacatttccatggcatgcactacagaaataactgtataatgaaaaagtatttaaggatatggttaaaaaaaaatcccaggacccacccatgttttcactatcccttctgcagctttccaaagctacattgacgagacacttactggtttaatttgcacttattaaccatctattgaatacacagcattatattaggtgctgcaggaaatacgacactgtagcgactgatgttagttgttacccagatcccctggaaaagcacactaccagtgttgtgggcacatttagttccacccgttagacccttgatgctattcacatgaataatttattttcctcaagtgtcattacattgttcaggctacgtgaacttggaagcacctacaggccatttgcatgaaattcacatgcacctaaatcctcactttgacagaaactcatgcttcagtttataacctattacctattttgtatgcgactccacctccgcatgtttattttaataaaaggcaatgataacattcacattatttttctttatatgctgtggttcacaggctttaccccttcacaagaaaagctctttagattggcgcaattgcttctgattttggtgaaattttccctggtagggaaactttgaagataagagtacacacatgcattttgtctgttgtgtcatagaggtaactaggctagaaaatttgtgtttaaatgttccctattttatataatcaccacttcatgtttcttcttcttggagcatgtccttgttcaaagagaagtgctttctcagtgatgtgatatcttcactgaggaacttgggtagagaatgatttcttctgcataaacacttcaaggaaatacataatttgggactacttgtaactcattagaatgagaaatactcacatggtttcttaagagaaaaagaacatcggaaagcaaaataaatgggaagatatcactggacatctgcatttatactcgaaataccagcattttctatggaccagaaaactgccatcacctagaccacacagcccagataccaggcagacggatggcccaatggcaactgatgtcagggcatggggtaaaggagagggttctaatctggtgtatcacttaaaaacagttatttatattatatatctgctatatagatcaacctccaccaaacttacccaaacagcatttgttttatttgaaactcactttaataaagtgaattatatacacaataa

SEQ ID NO: 11832 - DNA, 1682 bp, Homo sapiens
  source 1..1682: mol_type = unassigned DNA
ggccagccttgccctcacagcccctcagagcagcccgtcaggaggcagcagatggatcaatggtcaagccaggggggatttgctctgccacaggctactggaaagcagctttttgcctcacagatgtccacaaaatgccttattttacaagactcattttgttcttgttttgcttgatggttctcgtggagagcagaaaacccaagaggaagcgatggacagggcaggtggaaatgcccaagccaagtcacttatataagaagaaccttgatgtgaccaagatccggaagggaaagcctcagcagcttctcagagtggacgagcacgacttcagcatgagacccgccttcggaggccctgccatcccggtgggcgtggacgtacaggtggagagcctggacagcatctccgaggtggacatggacttcactatgaccctgtacctgcggcattactggaaggatgagaggctagctttctccagcgccagcaacaagagcatgaccttcgatggccggctggtgaagaagatctgggtccctgatgtcttctttgttcactccaaaagatcgttcactcatgacaccaccactgacaacatcatgctgagggtgttcccagatggacacgtgctgtacagcatgaggattacggtcactgccatgtgcaacatggacttcagccactttcccctggactcccagacctgttctttggagctggagagctatgcctatacagatgaagatctaatgctgtactggaagaatggggatgaatccctaaaaacagatgagaagatctccttgtctcagtttctgattcagaaatttcacacaacttccaggctggccttctacagcagcactggctggtacaaccgtctgtacattaacttcacgttgcgtcgccacatcttcttcttcttgctccaaacatatttccctgccactctgatggtcatgctgtcctgggtgtccttctggatcgaccgcagagctgtgcctgccagagtttcactgggtatcacgacggtgctgaccatgaccaccatcatcacgggcgtgaatgcctccatgccgcgcgtctcctacgtcaaggccgtggacatctacctctgggtcagctttgtgttcgtgttcctctcggtgctggagtatgcggctgtcaactacctgaccaccgtgcaggagcgcaaggaacggaagctgcgggagaagttcccgtgcatgtgtggaatgcttcattcaaaaaccatgatgctggatggaagctacagtgagtctgaggccaacagcctggctgggtaccccagaagccatatcctgacagaagaagaaaggcaagacaaaatagtggtccacctgggcctgagtggtgaagccaacgctgccagaaagaaggggcttctgaagggccagacgggttttcgtatcttccagaatacccatgccattgacaaatactctaggttgatattccctgcctcctacatatttttcaacttaatttattggtcagtgttttcctaggggctccaaggctgttcctagaagagggcatagacatcgagggggcctggccagtcattgacagacggacttgttgaccacacgcccctcaccaaacaatgcagcagctactggaccaccctgagcagcactcatctctcagagaagccc

SEQ ID NO: 11833 - DNA, 485 bp, Homo sapiens
  source 1..485: mol_type = unassigned DNA
gcgcccagaacgccccggccatgggcatccgaggcatgctgcgagccgcagtgatcctgctgctcatcaggacctggctcgcggagggcaactaccccagtcccatcccgaaattccacttcgagttctcctctgctgtgcccgaagtcgtcctgaacctcttcaactgcaaaaattgtgcaaatgaagctgtggttcaaaagattttggacagggtgctgtcaagatacgatgtccgcctgagaccgaattttggaggtgtcctagagactaacagtacctggggccttaatgatgatgagctcatggcccatggccaagagaaggacagtagctcagagtctgaggatagttgccccccaagccctgggtgctccttcactgaagggttctccttcgatctctttaatcctgactacgtcccaaaggtcgacaagtggtcccggttcctcttccctctggcctttgggttgttcaacattgtt

SEQ ID NO: 11834 - DNA, 6174 bp, Homo sapiens
  source 1..6174: mol_type = unassigned DNA
gcgcccagaacgccccggccatgggcatccgaggcatgctgcgagccgcagtgatcctgctgctcatcaggacctggctcgcggagggcaactaccccagtcccatcccgaaattccacttcgagttctcctctgctgtgcccgaagtcgtcctgaacctcttcaactgcaaaaattgtgcaaatgaagctgtggttcaaaagattttggacagggtgctgtcaagatacgatgtccgcctgagaccgaattttggaggtgcccctgtgcctgtgagaatatctatttatgtcacgagcattgaacagatctcagaaatgaatatggactacacgatcacgatgttttttcatcagacttggaaagattcacgcttagcatactatgagaccaccctgaacttgaccctggactatcggatgcatgagaagttgtgggtccctgactgctactttctgaacagcaaggatgctttcgtgcatgatgtgactgtggagaatcgcgtgtttcagcttcacccagatggaacggtgcggtacggcatccgactcaccactacagcagcttgttccctggatctgcataaattccctatggacaagcaggcctgcaacctggtggtagagagctatggttacacggttgaagacatcatattattctgggatgacaatgggaacgccatccacatgactgaggagctgcatatccctcagttcactttcctgggaaggacgattactagcaaggaggtgtatttctacacaggttcctacatacgcctgatactgaagttccaggttcagagggaagttaacagctaccttgtgcaagtctactggcctactgtcctcaccactattacctcttggatatcgttttggatgaactatgattcctctgcagccagggtgacaattggcttaacttcaatgctcatcctgaccaccatcgactcacatctgcgggataagctccccaacatttcctgtatcaaggccattgatatctatatcctcgtgtgcttgttctttgtgttcctgtccttgctggagtatgtctacatcaactatcttttctacagtcgaggacctcggcgccagcctaggcgacacaggagaccccgaagagtcattgcccgctaccgctaccagcaagtggtggtaggaaacgtgcaggatggcctgattaacgtggaagacggagtcagctctctccccatcaccccagcgcaggcccccctggcaagcccggaaagcctcggttctttgacgtccacctccgagcaggcccagctggccacctcggaaagcctcagcccactcacttctctctcaggccaggcccccctggccactggagaaagcctgagcgatctcccctccacctcagagcaggcccggcacagctatggtgttcgctttaatggtttccaggctgatgacagtatttttcctaccgaaatccgcaaccgtgtcgaagcccatggccatggtgttacccatgaccatgaagattccaatgagagcttgagctcggatgagcgccatggccatggccccagtgggaagcccatgcttcaccatggcgagaagggtgtgcaagaagcaggctgggaccttgatgacaacaatgacaagagcgactgccttgccattaaggagcaattcaagtgtgatactaacagtacctggggccttaatgatgatgagctcatggcccatggccaagagaaggacagtagctcagagtctgaggatagttgccccccaagccctgggtgctccttcactgaagggttctccttcgatctctttaatcctgactacgtcccaaaggtcgacaagtggtcccggttcctcttccctctggcctttgggttgttcaacattgtttactgggtataccatatgtattagtcccccagtgctccagaacagcgggagcactgtgctgtgctcctttcagtttcttttgggtttgtttttccctctttcctttgttccttttattttgtggttatttgggcaatccaataagttcatacttctctttataaacatgaggtggggagtaattggaaagaacatgttctagctggaagggaagggattgaggaggagttggaggtatacagcacatggatttcctttcctgctagaagactctcaccttttcaaagacttgtaacaaggaataagcatagaaaagcccctggaaatgtttagaggacagagaagagccaggttgggggatggggcaaggatctgggccttttgcccacaaacatttctggggggcttttctgtcccccttgaggtgtcaacatttctttttcattacatgttttcttctttttttgtttcctcctagggattatgggtcttgttcaccctctgcttagggctttatagaagaaagtcaagctgggttgggctggggttcatagctaaagggctagccatggcttagaagttcagggaacttcctataggaaacttagggagcatttgtaagtgcctttcccccactgtatggcatttgactgtggtgttttgatgcaagcgtggaaggggaatgtgggtggatggggctgcagagtgagacatcagggtgagagagcacatactcagcttgtggggttggcagagggtggggggtgatgtcaggttggaaattacacagttgagctggcctcttcggagggattggaacttgcctatatttctgcttcagaacgcttggcaatagagactcaatacatctgtctaagtcaggagttagctttccgtcagttgctgagttgatcaccagttacagcacttggtgaataagcactaaggttaggataattcacacttgctattttaccatctgatctagactagcagatgaatatctatcgtaagtctatatactaatcctttctatttgtctagtgcatagtaagtgtcaacaagctccctgacccattacatcactggagcctcacaggagccctgtaagccagggaaggcaaagcacattgtccccagtgttccaaggaaaacgaatggagcttatgccgcatgcttgaggacatgcagccagtgagtggtagatccaccccacttgctctttcttgtctttttcctcctgactgtcccaactgaggcatttccttttcttccctccctaaagagggtgctccagagggcccccaccacatcctctagcacctggggcatctctgcaggaataggctggtgaccagccaatgagcgtgacgtgagcagatggagaacacactctctgcccactgagcagggcccctaacggaagtaggattggccagcattccaacttgccaagcagctccacctcactgatggaggttgtgagggagtgaactttgccgagcactcaacatatgccacctcttcctccctatgcagtctctccctcagtcccttacccctctacccactcaccctttaactgtgcttctgtgtttgtgtttctgtatatacctgggtgtatgcatatgcagcagggtgggtgtatgtacatatacaaccatttgagaagctgcatagtgccgtgtctagtggtgtaaatctacattggtgtgtacagaattgtatctacagcatgtggatgcatgcgtgtgtgtgcacatccctgtgaaagtgtggcttatgtatgtgtatgcttgtgtacacatgggtctatgctgagtgcatgtatataagggcatgtctgcatatctatgtttatctgatttgaatgggtgtgaaaggaaatacccctgaaagcatatgtattccctgttggtgacccttctagaaccactataattcccttggcctgctcccatatggtggaggggccctatttggccgggctgcttaactgactgtttctttccaacttcctgttccagggagcagcatctcccagttcccttccactgtttgccctgtccctccatccatctgtgctgtctcctagatagaagactggggaagtgaatgtagtcctaagaagtggtgagctagtgccttgaggtaggaagtggttaatccatggaagaagctgcaagtacagagcatttcactttgtcctagaggaacatgtttcggggtaacaggctggggagtgaggctgaaagaggcattgagaatagacacttgtacagtcacatacacatacacacacacaaatcttgtacaacagttgaaaacaagaaagttaccactggaagagctaaaattgcctctttatttttggataccccatatagagattcaggtggaggggagagcagtgactccatgtctgaagctcccaatgtggctattgaaaggctggcttcctggagcctaagcattggttggttgacgtggatttgggtctccagcaccctggaggtgctttcaaccctgtggtggcaagcagttcatttgggataaagtcataaagggagattggagcagtgtgaagaaaaggagggttttaagatttgtctggaagcaatgcacatgaaggcttcacagcacagaggaagggcagcgaggccagttgtaaatatctctatagatccatatagctagatataatactataccttaaaaaggatatcttgccctgacgtgctgcaatgagagcagttgaactctactgcgactcatactctgtaggttaagtgtcaaaatgaggtggagatttggcagtgacaccctttcgggaacgtgaaccttctgagtttgctatggatttggtcattttagcctgcacgttgccagatctccccttgttgagtcttgtatgtggtctgtcctctgtgtcatttgagtcctcagctgtccccaaccccttcccagcccctccccagcctgcagtcaccccctgtccagcaagctgcctccatcccatccctctcctcacctcacaccaggtaactctggaagtgcagaatgcttggtagtttggagcttgggcagcatctgggatgcaacaacccctattttactcttctacccaccttccatttctttccttcccatcgacttccccgacccaggatcccttctttgccactatcatgggaaggacacccctgtctgtctttctgaagtatcattttattgtggggatgtgtgacacgtttcctaccaagttcttgccagttccatctgccactgtggggtgcctttgcacaggtcatggacgatctgctgggtcttactagagcctgtcaaatgtattcttacaattcatgtcatcttgttaatagcaggacttcaaagtctttgcatatttagagctgagttttgctgagactgtggccattcctaatgaggtttcctcattccatatatataatagctaacccttaaagccattaactaatgaatgcatttattaagctatccactcgcatggtaccctgctgtggtgatgagcagtaactttctagctattccatagcccaacatcaaaggaaatcgtgactcgtcctactagaagtgtagtgtctttgtgtttgttgtgtagtgtcctgtgatcaatataaaatctatattatcagtgttgggttttcaggggagggagggagaggatgttaaagtctctctttgataaacttaaattatgaaatagcccagttgttcagggtcacttctattgactcaatttgtgtgagactttgcactcactatctcgccggccggactgcatgcccagggtcagtagtcagcagagctaaaggtgcccgaatttagcacagctggctgtggtgcctgacatagggcagtaccgggggattcttcagaggtcagccaagtcggtaacattctgtgaagcagattaaatacagtaaaatcaaacaaacggaggtctttggaagtgatgctgggcccaggcagtgaaaatcaagaaaagaggagaaagaccaagacctggatgtcctggacgacctgacccaaaaaggggcacaaagcagcagagcttcaccaggtgactgggtggcttctttgtcctcattaaatgtacatctttgcatgaaaaggaccttgactggtccggactttaacaaagtaaaatatgaagaaacgtaaaattatgcttctgaaaaatatactgaaataaaattttgtaaatagctaaaagaaaaataaataaatataataacaa

SEQ ID NO: 11835 - DNA, 3222 bp, Homo sapiens
  source 1..3222: mol_type = unassigned DNA
cggagcctagggaagcaaattctcctggcggcctccgttcagacgcggcagctgtgacccacctgcctcctccgcagagcaatggcggtgtctgccgggtccgcgcggacctcgcccagctcagataaagtacagaaagacaaggctgaactgatctcagggcccaggcaggacagccgaatagggaaactcttgggttttgagtggacagatttgtccagttggcggaggctggtgaccctgctgaatcgaccaacggaccctgcaagcttagctgtctttcgttttctttttgggttcttgatggtgctagacattccccaggagcgggggctcagctctctggaccggaaataccttgatgggctggatgtgtgccgcttccccttgctggatgccctacgcccactgccacttgactggatgtatcttgtctacaccatcatgtttctgggggcactgggcatgatgctgggcctgtgctaccggataagctgtgtgttattcctgctgccatactggtatgtgtttctcctggacaagacatcatggaacaaccactcctatctgtatgggttgttggcctttcagctaacattcatggatgcaaaccactactggtctgtggacggtctgctgaatgcccataggaggaatgcccacgtgcccctttggaactatgcagtgctccgtggccagatcttcattgtgtacttcattgcgggtgtgaaaaagctggatgcagactgggttgaaggctattccatggaatatttgtcccggcactggctcttcagtcccttcaaactgctgttgtctgaggagctgactagcctgctggtcgtgcactggggtgggctgctgcttgacctctcagctggtttcctgctcttttttgatgtctcaagatccattggactgttctttgtgtcctacttccactgcatgaattcccagcttttcagcattggtatgttctcctacgtcatgctggccagcagccctctcttctgctcccctgagtggcctcggaagctggtgtcctactgcccccgaaggttgcaacaactgttgcccctcaaggcagcccctcagcccagtgtttcctgtgtgtataagaggagccggggcaaaagtggccagaagccagggctgcgccatcagctgggagctgccttcaccctgctctacctcctggagcagctattcctgccctattctcattttctcacccagggctataacaactggacaaatgggctgtatggctattcctgggacatgatggtgcactcccgctcccaccagcacgtgaagatcacctaccgtgatggccgcactggcgaactgggctaccttaaccctggggtatttacacagagtcggcgatggaaggatcatgcagacatgctgaagcaatatgccacttgcctgagccgcctgcttcccaagtataatgtcactgagccccagatctactttgatatttgggtctccatcaatgaccgcttccagcagaggatttttgaccctcgtgtggacatcgtgcaggccgcttggtcaccctttcagcgcacatcctgggtgcaaccactcttgatggacctgtctccctggagggccaagttacaggaaatcaagagcagcctagacaaccacactgaggtggtcttcattgcagatttccctggactgcacttggagaattttgtgagtgaagacctgggcaacactagcatccagctgctgcagggggaagtgactgtggagcttgtggcagaacagaagaaccagactcttcgagagggagaaaaaatgcagttgcctgctggtgagtaccataaggtgtatacgacatcacctagcccttcttgctacatgtacgtctatgtcaacactacagagcttgcactggagcaagacctggcatatctgcaagaattaaaggaaaaggtggagaatggaagtgaaacagggcctctacccccagagctgcagcctctgttggaaggggaagtaaaagggggccctgagccaacacctctggttcagacctttcttagacgccaacaaaggctccaggagattgaacgccggcgaaatactcctttccatgagcgattcttccgcttcttgttgcgaaagctctatgtctttcgccgcagcttcctgatgacttgtatctcacttcgaaatctgatattaggccgtccttccctggagcagctggcccaggaggtgacttatgcaaacttgagaccctttgaggcagttggagaactgaatccctcaaacacggattcttcacattctaatcctcctgagtcaaatcctgatcctgtccactcagagttctgaagggggccagatgttgggtgcagatgtagaagcagccagtcacagacccattctatgcaatggacatttatttgaaaaaaattctcaaaagttttttttttttttttgggggggcggggttctaaagctgtttttaactccgagattacaacttagaggaaccaaggaaataaagcaaataagatttaacaacccaagattaagaggccaggaagaggttagacgcaatgtgaaactgtcctcctaggataaggtttaaagtggctttttgggggctgggtgccgtggctcacgcctgtaatcccagcattttgggaggctgaggtgggcagatcacttgaggccaggagttcgagaccagcctggccaacatggcaaaaccccttctctactaaaaatacaaaaattagccagacgtggtggtgggtgcctgtaatccaactacccaggaggctgaggcatgagaatcgcttgggcccaggaggtggaggttgcagtgagccgagatcgagccactgcactcctgggcaacagagcaagacttcgtctcaaaataaataaataaagtggctcttggggaaaagcaatttaatgtaccacgatgaatagctaactgttcccaagtgtttgctatgtgcaacacaccgcgtgagcagtgttacctgcattattacattaggctgagaggtaaaataatttgcccgaagacatacagctagtgacgaatggactgatggtttgaacttaacgtctatttgacttaaggtcctgcaccctgccacttgtaattttcagaatcactgataatctgaaataatgcagcttaaaacatgttttcttaattaaaagtataattggatggtg

SEQ ID NO: 11836 - DNA, 2314 bp, Homo sapiens
  source 1..2314: mol_type = unassigned DNA
acagccgctgacgcgtcgggaggcggagcctagggaagcaaattctcctggcggcctccgttcagacgcggcagctgtgacccacctgcctcctccgcagagcaatggcggtgtctgccgggtccgcgcggacctcgcccagctcagggttcttgatggtgctagacattccccaggagcgggggctcagctctctggaccggaaataccttgatgggctggatgtgtgccgcttccccttgctggatgccctacgcccactgccacttgactggatgtatcttgtctacaccatcatgtttctgggggcactgggcatgatgctgggcctgtgctaccggataagctgtgtgttattcctgctgccatactggtatgtgtttctcctggacaagacatcatggaacaaccactcctatctgtatgggttgttggcctttcagctaacattcatggatgcaaaccactactggtctgtggacggtctgctgaatgcccataggaggaatgcccacgtgcccctttggaactatgcagtgctccgtggccagatcttcattgtgtacttcattgcgggtgtgaaaaagctggatgcagactgggttgaaggctattccatggaatatttgtcccggcactggctcttcagtcccttcaaactgctgttgtctgaggagctgactagcctgctggtcgtgcactggggtgggctgctgcttgacctctcagctggtttcctgctcttttttgatgtctcaagatccattggactgttctttgtgtcctacttccactgcatgaattcccagcttttcagcattggtatgttctcctacgtcatgctggccagcagccctctcttctgctcccctgagtggcctcggaagctggtgtcctactgcccccgaaggttgcaacaactgttgcccctcaaggcagcccctcagcccagtgtttcctgtgtgtataagaggagccggggcaaaagtggccagaagccagggctgcgccatcagctgggagctgccttcaccctgctctacctcctggagcagctattcctgccctattctcattttctcacccagggctataacaactggacaaatgggctgtatggctattcctgggacatgatggtgcactcccgctcccaccagcacgtgaagatcacctaccgtgatggccgcactggcgaactgggctaccttaaccctggggtatttacacagagtcggcgatggaaggatcatgcagacatgctgaagcaatatgccacttgcctgagccgcctgcttcccaagtataatgtcactgagccccagatctactttgatatttgggtctccatcaatgaccgcttccagcagaggatttttgaccctcgtgtggacatcgtgcaggccgcttggtcaccctttcagcgcacatcctgggtgcaaccactcttgatggacctgtctccctggagggccaagttacaggaaatcaagagcagcctagacaaccacactgaggtggtcttcattgcagatttccctggactgcacttggagaattttgtgagtgaagacctgggcaacactagcatccagctgctgcagggggaagtgactgtggagcttgtggcagaacagaagaaccagactcttcgagagggagaaaaaatgcagttgcctgctggtgagtaccataaggtgtatacgacatcacctagcccttcttgctacatgtacgtctatgtcaacactacagagcttgcactggagcaagacctggcatatctgcaagaattaaaggaaaaggtggagaatggaagtgaaacagggcctctacccccagagctgcagcctctgttggaaggggaagtaaaagggggccctgagccaacacctctggttcagacctttcttagacgccaacaaaggctccaggagattgaacgccggcgaaatactcctttccatgagcgattcttccgcttcttgttgcgaaagctctatgtctttcgccgcagcttcctgatgacttgtatctcacttcgaaatctgatattaggccgtccttccctggagcagctggcccaggaggtgacttatgcaaacttgagaccctttgaggcagttggagaactgaatccctcaaacacggattcttcacattctaatcctcctgagtcaaatcctgatcctgtccactcagagttctgaagggggccagatgttgggtgcagatgtagaagcagccagtcacagacccattctatgcaatggacatttatttgaaaaaaattctcaaaagttttttttttttt

SEQ ID NO: 11837 - DNA, 1607 bp, Homo sapiens
  source 1..1607: mol_type = unassigned DNA
tcccctctcgaggacctgggttggccagcccagctttgtacgggtgactgaagtccacatcgacgtaacagttgaaagggaaggacgcggagaccacccggtacccgccccaggcgtttccagagtctccgcttaggcggcccgtgggggtcggggtcgcggtcgcggtcgcggaccggggacagagcaatggggcgggcgcgcagcgccggctgcactcccagagcctcccaccgccgccccacggccgcctagcgcgcgccgggactgcatttcccataggcccacgctgcggagcaccgcccacccgagtctcacgcgagtgcgctgccgcgaggtgtccctgccgcagcccccgcccgcccgcagagcttttgaaaggcggcgggaggcggcgagcgccatggccagtccgggctgcctgctgtgcgtgctgggcctgctactctgcggggcggcgagcctcgagctgtctagaccccacggcgacaccgccaagaagcccatcatcggaatattaatgcaaaaatgccgtaataaagtcatgaaaaactatggaagatactatattgctgcgtcctatgtaaagtacttggagtctgcaggtgcgagagttgtaccagtaaggctggatcttacagagaaagactatgaaatacttttcaaatctattaatggaatccttttccctggaggaagtgttgacctcagacgctcagattatgctaaagtggccaaaatattttataacttgtccatacagagttttgatgatggagactattttcctgtgtggggcacatgccttggatttgaagagctttcactgctgattagtggagagtgcttattaactgccacagatactgttgacgtggcaatgccgctgaacttcactggaggtcaattgcacagcagaatgttccagaattttcctactgagttgttgctgtcattagcagtagaacctctgactgccaatttccataagtggagcctctccgtgaagaattttacaatgaatgaaaagttaaagaagtttttcaatgtcttaactacaaatacagatggcaagattgagtttatttcaacaatggaaggatataagtatccagtatatggtgtccagtggcatccagagaaagcaccttatgagtggaagaatttggatggcatttcccatgcacctaatgctgtgaaaaccgcattttatttagcagagttttttgttaatgaagctcggaaaaacaaccatcattttaaatctgaatctgaagaggagaaagcattgatttatcagttcagtccaatttatactggaaatatttcttcatttcagcaatgttacatatttgattgaaagtcttcaatttgttaacagagcaaatttgaataattccatgattaaactgttagaataacttgctactcatggcaagattaggaagtcacagattcttttctataatgtgcctggctctgattcttcattctgtatgtgactatttatataacattagataattaaatagtgagacataaatagagtgtttttcatggaaaagccttcttatatctgaagattgaaaaaaataaatttactgaaa

SEQ ID NO: 11838 - DNA, 993 bp, Homo sapiens
  source 1..993: mol_type = unassigned DNA
ggtcactgcgccggggtagtgggccccagtgttgcgctctctggccgttccttacactctgcttcaggctccagtgcaggggcgtagtgggatatggccaactcgggctgcaaggacgtcacgggtccagatgaggagagttttctgtactttgcctacggcagcaacctgctgacagagaggatccacctccgaaacccctcggcggcgttcttctgtgtggcccgcctgcaggattttaagcttgactttggcaattcccaaggcaaaacaagtcaaacttggcatggagggatagccaccatttttcagagtcctggcgatgaagtgtggggagtagtatggaaaatgaacaaaagcaatttaaattctctggatgaattatttgcatgggtgcaaaagaaaatggtttgccgctggagtatcaagagaagttaaaagcaatagaaccaaatgactatacaggaaaggtctcagaagaaattgaagacatcatcaaaaagggggaaacacaaactctttagaacataacagaatatatctaagggtattctatgtgctaatataaaatatttttaacacttgagaacagggatctgggggatctccacgtttgatccattttcagcagtgctctgaaggagtatcttacttgggtgattccttgtttttagactataaaaagaaactgggataggagttagacaatttaaaaggggtgtatgagggcctgaaatatgtgacaaatgaatgtgagtaccccttctgtgaacactgaaagctattctcttgaattgatcttaagtgtctccttgctctggtaaaagatagatttgtagctcacttgatgatggtgctggtgaattgctctgctctgtctgagatttttaaaaatcagcttaatgagagtaatctgcagacaattgataataacattttgaaaattggaaagatggtatactgtttttagaggaataaacgtatttgtggttt

SEQ ID NO: 11839 - DNA, 1173 bp, Homo sapiens
  source 1..1173: mol_type = unassigned DNA
acgcttcccgccagtcccctaaccctgaggctgccgcgcggcggtcactgcgccggggtagtgggccccagtgttgcgctctctggccgttccttacactctgcttcaggctccagtgcaggggcgtagtgggatatggccaactcgggctgcaaggacgtcacgggtccagatgaggagagttttctgtactttgcctacggcagcaacctgctgacagagaggatccacctccgaaacccctcggcggcgttcttctgtgtggcccgcctgcaggattttaagcttgactttggcaattcccaaggcaaaacaagtcaaacttggcatggagggatagccaccatttttcagagtcctggcgatgaagtgtggggagtagtatggaaaatgaacaaaagcaatttaaattctctggatgagcaagaaggggttaaaagtggaatgtatgttgtaatagaagttaaagttgcaactcaagaaggaaaagaaataacctgtcgaagttatctgatgacaaattacgaaagtgctcccccatccccacagtataaaaagattatttgcatgggtgcaaaagaaaatggtttgccgctggagtatcaagagaagttaaaagcaatagaaccaaatgactatacaggaaaggtctcagaagaaattgaagacatcatcaaaaagggggaaacacaaactctttagaacataacagaatatatctaagggtattctatgtgctaatataaaatatttttaacacttgagaacagggatctgggggatctccacgtttgatccattttcagcagtgctctgaaggagtatcttacttgggtgattccttgtttttagactataaaaagaaactgggataggagttagacaatttaaaaggggtgtatgagggcctgaaatatgtgacaaatgaatgtgagtaccccttctgtgaacactgaaagctattctcttgaattgatcttaagtgtctccttgctctggtaaaagatagatttgtagctcacttgatgatggtgctggtgaattgctctgctctgtctgagatttttaaaaatcagcttaatgagagtaatctgcagacaattgataataacattttgaaaattggaaagatggtatactgtttttagaggaataaacgtatttgtggtttaa

SEQ ID NO: 11840 - DNA, 1645 bp, Homo sapiens
  source 1..1645: mol_type = unassigned DNA
actttacctcacttgtgaaggagaaagagccatcctctctacctttgttctaggtggatattctcttgctgtcagaacaccatccatttttgtagcccaaagaacaatgtttccatagtataaagttgaaaaaaaaaacaaactatattgaagcctctttaaagacaagataaatacagagagttatgttaggagtataacaagtaatattatgtctcaggccttctaattgaaatgctaagctaagcttacttttttttttttgtaacggagtctcgctcttgttgcccaggctagagtgcaatggcgtgatctcggctcaccccaacctctgcctcccgggttccagtgattctcccgcctcagcctcccgagtagctgggattacaggcatgcaccaccatgtcggactaattttttgtgtgttttttttttagtagagacaaggtttctccatgttggtcaggctggcctcgaactcctgacctcagatgatccacccacctcggcctcccaaagtgctaggattacaggtgtgagccactgcacccggcctttttttttttctttttgagatggagtcttgctgtctcccagcctggattgccacagtgcaatctcggctcactgcaacctccacctcccgtgatccacctcagcctcccaaagtgctgggattacagatgtgagccaccgtacccagcctaaatgctaagcttacttttgatgtggtaaatttatatattctctatcccaaatacatagggagcaagtatgttcagatgtagttaaatgtttaatcccatacaccatcttgactattataaaaagaccttacccagtgagctaaattggctaggtcaaatgtggttaaaatttggctgttctggtttcaggcaagaaggggttaaaagtggaatgtatgttgtaatagaagttaaagttgcaactcaagaaggaaaagaaataacctgtcgaagttatctgatgacaaattacgaaagtgctcccccatccccacagtataaaaagattatttgcatgggtgcaaaagaaaatggtttgccgctggagtatcaagagaagttaaaagcaatagaaccaaatgactatacaggaaaggtctcagaagaaattgaagacatcatcaaaaagggggaaacacaaactctttagaacataacagaatatatctaagggtattctatgtgctaatataaaatatttttaacacttgagaacagggatctgggggatctccacgtttgatccattttcagcagtgctctgaaggagtatcttacttgggtgattccttgtttttagactataaaaagaaactgggataggagttagacaatttaaaaggggtgtatgagggcctgaaatatgtgacaaatgaatgtgagtaccccttctgtgaacactgaaagctattctcttgaattgatcttaagtgtctccttgctctggtaaaagatagatttgtagctcacttgatgatggtgctggtgaattgctctgctctgtctgagatttttaaaaatcagcttaatgagagtaatctgcagacaattgataataacattttgaaaattggaaagatggtatactgtttttagaggaataaacgtatttgtggttt

SEQ ID NO: 11841 - DNA, 836 bp, Homo sapiens
  source 1..836: mol_type = unassigned DNA
gtcactgcgccggggtagtgggccccagtgttgcgctctctggccgttccttacactctgcttcaggctccagtgcaggggcgtagtgggatatggccaactcgggctgcaaggacgtcacgggtccagatgaggagagttttctgtactttgcctacggcagcaacctgctgacagagaggatccacctccgaaacccctcggcggcgttcttctgtgtggcccgcctgcagattatttgcatgggtgcaaaagaaaatggtttgccgctggagtatcaagagaagttaaaagcaatagaaccaaatgactatacaggaaaggtctcagaagaaattgaagacatcatcaaaaagggggaaacacaaactctttagaacataacagaatatatctaagggtattctatgtgctaatataaaatatttttaacacttgagaacagggatctgggggatctccacgtttgatccattttcagcagtgctctgaaggagtatcttacttgggtgattccttgtttttagactataaaaagaaactgggataggagttagacaatttaaaaggggtgtatgagggcctgaaatatgtgacaaatgaatgtgagtaccccttctgtgaacactgaaagctattctcttgaattgatcttaagtgtctccttgctctggtaaaagatagatttgtagctcacttgatgatggtgctggtgaattgctctgctctgtctgagatttttaaaaatcagcttaatgagagtaatctgcagacaattgataataacattttgaaaattggaaagatggtatactgtttttagaggaataaacgta

SEQ ID NO: 11842 - DNA, 767 bp, Homo sapiens
  source 1..767: mol_type = unassigned DNA
cactgcgccggggtagtgggccccagtgttgcgctctctggccgttccttacactctgcttcaggctccagtgcaggggcgtagtgggatatggccaactcgggctgcaaggacgtcacgggtccagatgaggagagttttctgtactttgcctacggcagcaacctgctgacagagaggatccacctccgaaacccctcggcggcgttcttctgtgtggcccgcctgcaggattttaagcttgactttggcaattcccaaggcaaaacaagtcaaacttggcatggagggatagccaccatttttcagagtcctggcgatgaagtgtggggagtagtatggaaaatgaacaaaagcaatttaaattctctggatgagtggagaaagaaacgtcacactgcctttcagaatcagggaaatcacccttgcaagcacaagacaagaatgtgggatagagaccccaaaattcctgttcagaacctaagcttagctctctgttggcaggcccaatcaggtcatggcacctgtaatagattatttgcatgggtgcaaaagaaaatggtttgccgctggagtatcaagagaagttaaaagcaatagaaccaaatgactatacaggaaaggtctcagaagaaattgaagacatcatcaaaaagggggaaacacaaactctttagaacataacagaatatatctaagggtattctatgtgctaatataaaatatttttaacacttgagaacagggatctgggggatctccacgtt

SEQ ID NO: 11843 - DNA, 2326 bp, Homo sapiens
  source 1..2326: mol_type = unassigned DNA
gcctggattctcccagagattgcctggaacaccagctcgggtcctcgcacaccatcctgcgggtgcagcccagaactgtcttctgaggaagaggtgctctcctgggcccccactgtccccaggcctcagcaaggcaagtgaggtgctgccgtcatccaggctggacagttcagtgatttgcctgaggccccacagcagagttcaactggagacagagaaaccagctagaggcagagggaggtaacacggagtcccccagaaaggtctgggctgcgcgtgcttcaggtaacctcccttgaccttcaggagaacgagaaggctgcctgatcagagagtccctgaagaagattctgtggctacaggcttcagcagagtgtgagggagaccccggttatttcctcagctatttccaccaaatcctcctgtctttcgtggccaacaccccaggcaaggcttggggcccccgtctgctgctggacgcagagccatgaagaagaagttagtggtgctgggcctgctggccgtggtcctggtgctggtcattgtcggcctctgtctctggctgccctcagcctccaaggaacctgacaaccatgtgtacaccagggctgccgtggccgcggatgccaagcagtgctcgaagattgggagggatgcactgcgggacggtggctctgcggtggatgcagccattgcagccctgttgtgtgtggggctcatgaatgcccacagcatgggcatcgggggtggcctcttcctcaccatctacaacagcaccacacgaaaagctgaggtcatcaacgcccgcgaggtggcccccaggctggcctttgccaccatgttcaacagctcggagcagtcccagaagggggggctgtcggtggcggtgcctggggagatccgaggctatgagctggcacaccagcggcatgggcggctgccctgggctcgcctcttccagcccagcatccagctggcccgccagggcttccccgtgggcaagggcttggcggcagccctggaaaacaagcggaccgtcatcgagcagcagcctgtcttgtgtgaggtgttctgccgggatagaaaggtgcttcgggagggggagagactgaccctgccgcagctggctgacacctacgagacgctggccatcgagggtgcccaggccttctacaacggcagcctcacggcccagattgtgaaggacatccaggcggccgggggcattgtgacagctgaggacctgaacaactaccgtgctgagctgatcgagcacccgctgaacatcagcctgggagacgtggtgctgtacatgcccagtgcgccgctcagcgggcccgtgctggccctcatcctcaacatcctcaaagggtacaacttctcccgggagagcgtggagagccccgagcagaagggcctgacgtaccaccgcatcgtagaggctttccggtttgcctacgccaagaggaccctgcttggggaccccaagtttgtggatgtgactgaggtggtccgcaacatgacctccgagttcttcgctgcccagctccgggcccagatctctgacgacaccactcacccgatctcctactacaagcccgagttctacacgccggatgacgggggcactgctcacctgtctgtcgtcgcagaggacggcagtgctgtgtccgccaccagcaccatcaacctctactttggctccaaggtccgctccccggtcagcgggatcctgttcaataatgaaatggacgacttcagctctcccagcatcaccaacgagtttggggtacccccctcacctgccaatttcatccagccagggaagcagccgctctcgtccatgtgcccgacgatcatggtgggccaggacggccaggtccggatggtggtgggagctgctgggggcacacagatcaccacggccactgcactggccatcatctacaacctctggttcggctatgacgtgaagcgggccgtggaggagccccggctgcacaaccagcttctgcccaacgtcacgacagtggagagaaacattgaccaggcagtgactgcagccctggagacccggcaccatcacacccagatcgcgtccaccttcatcgctgtggtgcaagccatcgtccgcacggctggtggctgggcagctgcctcggactccaggaaaggcggggagcctgccggctactgagtgctccaggaggacaaggctgacaagcaatccagggacaagatactcaccaggaccaggaaggggactctgggggaccggcttcccctgtgagcagcagagcagcacaataaatgaggccactgtgcc

SEQ ID NO: 11844 - DNA, 2540 bp, Homo sapiens
  source 1..2540: mol_type = unassigned DNA
cagaccgggcgtcgggtgagcccagaagtgagagcagttggctgtgccccagtgctgtgtgacccagaggcgccgctcaccctctctgagctggtggacatcatagcgggtgcagcccagaactgtcttctgaggaagaggtgctctcctgggcccccactgtccccaggcctcagatgctgcatattgctggcccagctcctgaggctctttggacctccaggaatcggtgtctctatcaggaacccttaaccctgacccggactcccagctgggacccggggtgtcggagtggcaagagcgctgtcaggcctggtgaagggtgtgagctgtccaacggggcagggaggaggcagggcctgttctgcagttggacagacagagccctctagctgctttctggaagactgaagggcagcaaggcaagtgaggtgctgccgtcatccaggctggacagttcagtgatttgcctgaggccccacagcaggagaacgagaaggctgcctgatcagagagtccctgaagaagattctgtggctacaggcttcagcagagtgtgagggagaccccggttatttcctcagctatttccaccaaatcctcctgtctttcgtggccaacaccccaggcaaggcttggggcccccgtctgctgctggacgcagagccatgaagaagaagttagtggtgctgggcctgctggccgtggtcctggtgctggtcattgtcggcctctgtctctggctgccctcagcctccaaggaacctgacaaccatgtgtacaccagggctgccgtggccgcggatgccaagcagtgctcgaagattgggagggatgcactgcgggacggtggctctgcggtggatgcagccattgcagccctgttgtgtgtggggctcatgaatgcccacagcatgggcatcgggggtggcctcttcctcaccatctacaacagcaccacacgaaaagctgaggtcatcaacgcccgcgaggtggcccccaggctggcctttgccaccatgttcaacagctcggagcagtcccagaagggggggctgtcggtggcggtgcctggggagatccgaggctatgagctggcacaccagcggcatgggcggctgccctgggctcgcctcttccagcccagcatccagctggcccgccagggcttccccgtgggcaagggcttggcggcagccctggaaaacaagcggaccgtcatcgagcagcagcctgtcttgtgtgaggtgttctgccgggatagaaaggtgcttcgggagggggagagactgaccctgccgcagctggctgacacctacgagacgctggccatcgagggtgcccaggccttctacaacggcagcctcacggcccagattgtgaaggacatccaggcggccgggggcattgtgacagctgaggacctgaacaactaccgtgctgagctgatcgagcacccgctgaacatcagcctgggagacgtggtgctgtacatgcccagtgcgccgctcagcgggcccgtgctggccctcatcctcaacatcctcaaagggtacaacttctcccgggagagcgtggagagccccgagcagaagggcctgacgtaccaccgcatcgtagaggctttccggtttgcctacgccaagaggaccctgcttggggaccccaagtttgtggatgtgactgaggtggtccgcaacatgacctccgagttcttcgctgcccagctccgggcccagatctctgacgacaccactcacccgatctcctactacaagcccgagttctacacgccggatgacgggggcactgctcacctgtctgtcgtcgcagaggacggcagtgctgtgtccgccaccagcaccatcaacctctactttggctccaaggtccgctccccggtcagcgggatcctgttcaataatgaaatggacgacttcagctctcccagcatcaccaacgagtttggggtacccccctcacctgccaatttcatccagccagggaagcagccgctctcgtccatgtgcccgacgatcatggtgggccaggacggccaggtccggatggtggtgggagctgctgggggcacacagatcaccacggccactgcactggccatcatctacaacctctggttcggctatgacgtgaagcgggccgtggaggagccccggctgcacaaccagcttctgcccaacgtcacgacagtggagagaaacattgaccaggcagtgactgcagccctggagacccggcaccatcacacccagatcgcgtccaccttcatcgctgtggtgcaagccatcgtccgcacggctggtggctgggcagctgcctcggactccaggaaaggcggggagcctgccggctactgagtgctccaggaggacaaggctgacaagcaatccagggacaagatactcaccaggaccaggaaggggactctgggggaccggcttcccctgtgagcagcagagcagcacaataaatgaggccactgtgccaggctccaggtggcctccctggcctgtctcccc

SEQ ID NO: 11845 - DNA, 2628 bp, Homo sapiens
  source 1..2628: mol_type = unassigned DNA
gtgctgctggatgaccagaccgggcgtcgggtgagcccagaagtgagagcagttggctgtgccccagtgctgtgtgacccagaggcgccgctcaccctctctgagctggtggacatcataggtggggaagctcaggtcagggcactcccatgagtgtctggaggcctgagtcccattctcagctctgccatatgcttgctgcgctctagaggagttcctcttcctctccaagcctcggtttatgtacccgtgcagtgggagtgagttgcacttcggggtgaagggggcaagacttgtgtgggcgcatcctgcagaaggatcccacagcgggtgcagcccagaactgtcttctgaggaagaggtgctctcctgggcccccactgtccccaggcctcagcaaggcaagtgaggtgctgccgtcatccaggctggacagttcagtgatttgcctgaggccccacagcagagttcaactggagacagagaaaccagctagaggcagagggaggtaacacggagtcccccagaaaggtctgggctgcgcgtgcttcaggtaacctcccttgaccttcaggagaacgagaaggctgcctgatcagagagtccctgaagaagattctgtggctacaggcttcagcagagtgtgagggagaccccggttatttcctcagctatttccaccaaatcctcctgtctttcgtggccaacaccccaggcaaggcttggggcccccgtctgctgctggacgcagagccatgaagaagaagttagtggtgctgggcctgctggccgtggtcctggtgctggtcattgtcggcctctgtctctggctgccctcagcctccaaggaacctgacaaccatgtgtacaccagggctgccgtggccgcggatgccaagcagtgctcgaagattgggagggatgcactgcgggacggtggctctgcggtggatgcagccattgcagccctgttgtgtgtggggctcatgaatgcccacagcatgggcatcgggggtggcctcttcctcaccatctacaacagcaccacacgaaaagctgaggtcatcaacgcccgcgaggtggcccccaggctggcctttgccaccatgttcaacagctcggagcagtcccagaagggggggctgtcggtggcggtgcctggggagatccgaggctatgagctggcacaccagcggcatgggcggctgccctgggctcgcctcttccagcccagcatccagctggcccgccagggcttccccgtgggcaagggcttggcggcagccctggaaaacaagcggaccgtcatcgagcagcagcctgtcttgtgtgaggtgttctgccgggatagaaaggtgcttcgggagggggagagactgaccctgccgcagctggctgacacctacgagacgctggccatcgagggtgcccaggccttctacaacggcagcctcacggcccagattgtgaaggacatccaggcggccgggggcattgtgacagctgaggacctgaacaactaccgtgctgagctgatcgagcacccgctgaacatcagcctgggagacgtggtgctgtacatgcccagtgcgccgctcagcgggcccgtgctggccctcatcctcaacatcctcaaagggtacaacttctcccgggagagcgtggagagccccgagcagaagggcctgacgtaccaccgcatcgtagaggctttccggtttgcctacgccaagaggaccctgcttggggaccccaagtttgtggatgtgactgaggtggtccgcaacatgacctccgagttcttcgctgcccagctccgggcccagatctctgacgacaccactcacccgatctcctactacaagcccgagttctacacgccggatgacgggggcactgctcacctgtctgtcgtcgcagaggacggcagtgctgtgtccgccaccagcaccatcaacctctactttggctccaaggtccgctccccggtcagcgggatcctgttcaataatgaaatggacgacttcagctctcccagcatcaccaacgagtttggggtacccccctcacctgccaatttcatccagccagggaagcagccgctctcgtccatgtgcccgacgatcatggtgggccaggacggccaggtccggatggtggtgggagctgctgggggcacacagatcaccacggccactgcactggccatcatctacaacctctggttcggctatgacgtgaagcgggccgtggaggagccccggctgcacaaccagcttctgcccaacgtcacgacagtggagagaaacattgaccaggcagtgactgcagccctggagacccggcaccatcacacccagatcgcgtccaccttcatcgctgtggtgcaagccatcgtccgcacggctggtggctgggcagctgcctcggactccaggaaaggcggggagcctgccggctactgagtgctccaggaggacaaggctgacaagcaatccagggacaagatactcaccaggaccaggaaggggactctgggggaccggcttcccctgtgagcagcagagcagcacaataaatgaggccactgtgccaggctccaggtggcctccctggcctgtctcccca

SEQ ID NO: 11846 - DNA, 2413 bp, Homo sapiens
  source 1..2413: mol_type = unassigned DNA
gaccagaccgggcgtcgggtgagcccagaagtgagagcagttggctgtgccccagtgctgtgtgacccagaggcgccgctcaccctctctgagctggtggacatcatagcgggtgcagcccagaactgtcttctgaggaagaggtgctctcctgggcccccactgtccccaggcctcagcaaggcaagtgaggtgctgccgtcatccaggctggacagttcagtgatttgcctgaggccccacagcagagttcaactggagacagagaaaccagctagaggcagagggaggtaacacggagtcccccagaaaggtctgggctgcgcgtgcttcaggtaacctcccttgaccttcaggagaacgagaaggctgcctgatcagagagtccctgaagaagattctgtggctacaggcttcagcagagtgtgagggagaccccggttatttcctcagctatttccaccaaatcctcctgtctttcgtggccaacaccccaggcaaggcttggggcccccgtctgctgctggacgcagagccatgaagaagaagttagtggtgctgggcctgctggccgtggtcctggtgctggtcattgtcggcctctgtctctggctgccctcagcctccaaggaacctgacaaccatgtgtacaccagggctgccgtggccgcggatgccaagcagtgctcgaagattgggagggatgcactgcgggacggtggctctgcggtggatgcagccattgcagccctgttgtgtgtggggctcatgaatgcccacagcatgggcatcgggggtggcctcttcctcaccatctacaacagcaccacacgaaaagctgaggtcatcaacgcccgcgaggtggcccccaggctggcctttgccaccatgttcaacagctcggagcagtcccagaagggggggctgtcggtggcggtgcctggggagatccgaggctatgagctggcacaccagcggcatgggcggctgccctgggctcgcctcttccagcccagcatccagctggcccgccagggcttccccgtgggcaagggcttggcggcagccctggaaaacaagcggaccgtcatcgagcagcagcctgtcttgtgtgaggtgttctgccgggatagaaaggtgcttcgggagggggagagactgaccctgccgcagctggctgacacctacgagacgctggccatcgagggtgcccaggccttctacaacggcagcctcacggcccagattgtgaaggacatccaggcggccgggggcattgtgacagctgaggacctgaacaactaccgtgctgagctgatcgagcacccgctgaacatcagcctgggagacgtggtgctgtacatgcccagtgcgccgctcagcgggcccgtgctggccctcatcctcaacatcctcaaagggtacaacttctcccgggagagcgtggagagccccgagcagaagggcctgacgtaccaccgcatcgtagaggctttccggtttgcctacgccaagaggaccctgcttggggaccccaagtttgtggatgtgactgaggtggtccgcaacatgacctccgagttcttcgctgcccagctccgggcccagatctctgacgacaccactcacccgatctcctactacaagcccgagttctacacgccggatgacgggggcactgctcacctgtctgtcgtcgcagaggacggcagtgctgtgtccgccaccagcaccatcaacctctactttggctccaaggtccgctccccggtcagcgggatcctgttcaataatgaaatggacgacttcagctctcccagcatcaccaacgagtttggggtacccccctcacctgccaatttcatccagccagggaagcagccgctctcgtccatgtgcccgacgatcatggtgggccaggacggccaggtccggatggtggtgggagctgctgggggcacacagatcaccacggccactgcactggccatcatctacaacctctggttcggctatgacgtgaagcgggccgtggaggagccccggctgcacaaccagcttctgcccaacgtcacgacagtggagagaaacattgaccaggcagtgactgcagccctggagacccggcaccatcacacccagatcgcgtccaccttcatcgctgtggtgcaagccatcgtccgcacggctggtggctgggcagctgcctcggactccaggaaaggcggggagcctgccggctactgagtgctccaggaggacaaggctgacaagcaatccagggacaagatactcaccaggaccaggaaggggactctgggggaccggcttcccctgtgagcagcagagcagcacaataaatgaggccactgtgccaggctccaggtggcctccctggcctgtctccccactc

SEQ ID NO: 11847 - DNA, 968 bp, Homo sapiens
  source 1..968: mol_type = unassigned DNA
attgaatgcagcaagggtctggaggctgaggaccaggcagacagacattcagagttgctggaacgcgacagagacagggagtcagactggtcatgcaaggccagctctggggtctcggcaggtggtccgcaacatgacctccgagttcttcgctgcccagctccgggcccagatctctgacgacaccactcacccgatctcctactacaagcccgagttctacacgccggatgacgggggcactgctcacctgtctgtcgtcgcagaggacggcagtgctgtgtccgccaccagcaccatcaacctctactttggctccaaggtccgctccccggtcagcgggatcctgttcaataatgaaatggacgacttcagctctcccagcatcaccaacgagtttggggtacccccctcacctgccaatttcatccagccagggaagcagccgctctcgtccatgtgcccgacgatcatggtgggccaggacggccaggtccggatggtggtgggagctgctgggggcacacagatcaccacggccactgcactggccatcatctacaacctctggttcggctatgacgtgaagcgggccgtggaggagccccggctgcacaaccagcttctgcccaacgtcacgacagtggagagaaacattgaccaggcagtgactgcagccctggagacccggcaccatcacacccagatcgcgtccaccttcatcgctgtggtgcaagccatcgtccgcacggctggtggctgggcagctgcctcggactccaggaaaggcggggagcctgccggctactgagtgctccaggaggacaaggctgacaagcaatccagggacaagatactcaccaggaccaggaaggggactctgggggaccggcttcccctgtgagcagcagagcagcacaataaatgaggccactgtgccaggctccaggtggcctccctggcctgtc

SEQ ID NO: 11848 - DNA, 1033 bp, Homo sapiens
  source 1..1033: mol_type = unassigned DNA
agggagtcagactggtcatgcaaggtcctgggcctgcccttgggtcctggggagccacggaaggttgtgggtgccagagggttgcggtcagagtcacagtcaagggccttctgagacctgtgccccctccccaccctccctccccacctcctcaggccagctctggggtctcggcaggtggtccgcaacatgacctccgagttcttcgctgcccagctccgggcccagatctctgacgacaccactcacccgatctcctactacaagcccgagttctacacgccggatgacgggggcactgctcacctgtctgtcgtcgcagaggacggcagtgctgtgtccgccaccagcaccatcaacctctactttggctccaaggtccgctccccggtcagcgggatcctgttcaataatgaaatggacgacttcagctctcccagcatcaccaacgagtttggggtacccccctcacctgccaatttcatccagccagggaagcagccgctctcgtccatgtgcccgacgatcatggtgggccaggacggccaggtccggatggtggtgggagctgctgggggcacacagatcaccacggccactgcactggccatcatctacaacctctggttcggctatgacgtgaagcgggccgtggaggagccccggctgcacaaccagcttctgcccaacgtcacgacagtggagagaaacattgaccaggcagtgactgcagccctggagacccggcaccatcacacccagatcgcgtccaccttcatcgctgtggtgcaagccatcgtccgcacggctggtggctgggcagctgcctcggactccaggaaaggcggggagcctgccggctactgagtgctccaggaggacaaggctgacaagcaatccagggacaagatactcaccaggaccaggaaggggactctgggggaccggcttcccctgtgagcagcagagcagcacaataaatgaggccactgtgccaggctccaggtggcctccctggcctgtctccccactc

SEQ ID NO: 11849 - DNA, 853 bp, Homo sapiens
  source 1..853: mol_type = unassigned DNA
gacagggagtcagactggtcatgcaaggtggtccgcaacatgacctccgagttcttcgctgcccagctccgggcccagatctctgacgacaccactcacccgatctcctactacaagcccgagttctacacgccggatgacgggggcactgctcacctgtctgtcgtcgcagaggacggcagtgctgtgtccgccaccagcaccatcaacctctactttggctccaaggtccgctccccggtcagcgggatcctgttcaataatgaaatggacgacttcagctctcccagcatcaccaacgagtttggggtacccccctcacctgccaatttcatccagccagggaagcagccgctctcgtccatgtgcccgacgatcatggtgggccaggacggccaggtccggatggtggtgggagctgctgggggcacacagatcaccacggccactgcactggccatcatctacaacctctggttcggctatgacgtgaagcgggccgtggaggagccccggctgcacaaccagcttctgcccaacgtcacgacagtggagagaaacattgaccaggcagtgactgcagccctggagacccggcaccatcacacccagatcgcgtccaccttcatcgctgtggtgcaagccatcgtccgcacggctggtggctgggcagctgcctcggactccaggaaaggcggggagcctgccggctactgagtgctccaggaggacaaggctgacaagcaatccagggacaagatactcaccaggaccaggaaggggactctgggggaccggcttcccctgtgagcagcagagcagcacaataaatgaggccactgtgccaggctcc

SEQ ID NO: 11850 - DNA, 2375 bp, Homo sapiens
  source 1..2375: mol_type = unassigned DNA
cctgcaccctgtgcagatgcctcccactgtccgccggggctgctgggcacgccctggctggtctcttggactagcgggtgcagcccagaactgtcttctgaggaagaggtgctctcctgggcccccactgtccccaggcctcagcaaggcaagtgaggtgctgccgtcatccaggctggacagttcagtgatttgcctgaggccccacagcagagttcaactggagacagagaaaccagctagaggcagagggaggtaacacggagtcccccagaaaggtctgggctgcgcgtgcttcaggtaacctcccttgaccttcaggagaacgagaaggctgcctgatcagagagtccctgaagaagattctgtggctacaggcttcagcagagtgtgagggagaccccggttatttcctcagctatttccaccaaatcctcctgtctttcgtggccaacaccccaggcaaggcttggggcccccgtctgctgctggacgagccatgaagaagaagttagtggtgctgggcctgctggccgtggtcctggtgctggtcattgtcggcctctgtctctggctgccctcagcctccaaggaacctgacaaccatgtgtacaccagggctgccgtggccgcggatgccaagcagtgctcgaagattgggagggatgcactgcgggacggtggctctgcggtggatgcagccattgcagccctgttgtgtgtggggctcatgaatgcccacagcatgggcatcgggggtggcctcttcctcaccatctacaacagcaccacacgaaaagctgaggtcatcaacgcccgcgaggtggcccccaggctggcctttgccaccatgttcaacagctcggagcagtcccagaagggggggctgtcggtggcggtgcctggggagatccgaggctatgagctggcacaccagcggcatgggcggctgccctgggctcgcctcttccagcccagcatccagctggcccgccagggcttccccgtgggcaagggcttggcggcagccctggaaaacaagcggaccgtcatcgagcagcagcctgtcttgtgtgaggtgttctgccgggatagaaaggtgcttcgggagggggagagactgaccctgccgcagctggctgacacctacgagacgctggccatcgagggtgcccaggccttctacaacggcagcctcacggcccagattgtgaaggacatccaggcggccgggggcattgtgacagctgaggacctgaacaactaccgtgctgagctgatcgagcacccgctgaacatcagcctgggagacgtggtgctgtacatgcccagtgcgccgctcagcgggcccgtgctggccctcatcctcaacatcctcaaagggtacaacttctcccgggagagcgtggagagccccgagcagaagggcctgacgtaccaccgcatcgtagaggctttccggtttgcctacgccaagaggaccctgcttggggaccccaagtttgtggatgtgactgaggtggtccgcaacatgacctccgagttcttcgctgcccagctccgggcccagatctctgacgacaccactcacccgatctcctactacaagcccgagttctacacgccggatgacgggggcactgctcacctgtctgtcgtcgcagaggacggcagtgctgtgtccgccaccagcaccatcaacctctactttggctccaaggtccgctccccggtcagcgggatcctgttcaataatgaaatggacgacttcagctctcccagcatcaccaacgagtttggggtacccccctcacctgccaatttcatccagccagggaagcagccgctctcgtccatgtgcccgacgatcatggtgggccaggacggccaggtccggatggtggtgggagctgctgggggcacacagatcaccacggccactgcactggccatcatctacaacctctggttcggctatgacgtgaagcgggccgtggaggagccccggctgcacaaccagcttctgcccaacgtcacgacagtggagagaaacattgaccaggcagtgactgcagccctggagacccggcaccatcacacccagatcgcgtccaccttcatcgctgtggtgcaagccatcgtccgcacggctggtggctgggcagctgcctcggactccaggaaaggcggggagcctgccggctactgagtgctccaggaggacaaggctgacaagcaatccagggacaagatactcaccaggaccaggaaggggactctgggggaccggcttcccctgtgagcagcagagcagcacaataaatgaggccactgtgccaggctccaggtggcctccctggcctgtctccccactc

SEQ ID NO: 11851 - DNA, 758 bp, Homo sapiens
  source 1..758: mol_type = unassigned DNA
ggtcagagctttaagctgcagctctgatgccccagggacctctcagacccccctgcccagagcaggcagcccgcgggtgcagcccagaactgtcttctgaggaagaggtgctctcctgggcccccactgtccccaggcctcagcagcaaggcaagtgaggtgctgccgtcatccaggctggacagttcagtgatttgcctgaggccccacagcaggagaacgagaaggctgcctgatcagagagtccctgaagaagattctgtggctacaggcttcagcagagtgtgagggagaccccggttatttcctcagctatttccaccaaatcctcctgtctttcgtggccaacaccccaggcaaggcttggggcccccgtctgctgctggacgcagagccatgaagaagaagttagtggtgctgggcctgctggccgtggtcctggtgctggtcattgtcggcctctgtctctggctgccctcagcctccaaggaacctgacaaccatgtgtacaccagggctgccgtggccgcggatgccaagcagtgctcgaagattgggagggatgcactgcgggacggtggctctgcggtggatgcagccattgcagccctgttgtgtgtggggctcatgaatgcccacagcatgggcatcgggggtggcctcttcctcaccatctacaacagcaccacacgaaaagctgaggtcatcaacgcccgcgaggtggcccccaggctggcctttgccaccatgttcaacag

SEQ ID NO: 11852 - DNA, 2091 bp, Homo sapiens
  source 1..2091: mol_type = unassigned DNA
aggggagggaaggaggagctgggtcacagcagggaatcttagcttggttttggtgtgctgctggatgaccagaccgggcgtcgggtgagcccagaagtgagagcagttggctgtgccccagtgctgtgtgacccagaggcgccgctcaccctctctgagctggtggacatcataggtggggaagctcaggtcagggcactcccatgagtgtctggaggcctgagtcccattctcagctctgccatatgcttgctgcgctctagaggagttcctcttcctctccaagcctcggtttatgtacccgtgcagtgggagtgagttgcacttcggggtgaagggggcaagacttgtgtgggcgcatcctgcagaaggatcccacagcgggtgcagcccagaactgtcttctgaggaagaggtgctctcctgggcccccactgtccccaggcctcagcaaggcaagtgaggtgctgccgtcatccaggctggacagttcagtgatttgcctgaggccccacagcaggagaacgagaaggctgcctgatcagagagtccctgaagaagattctgtggctacaggcttcagcagagtgtgagggagaccccggttatttcctcagctatttccaccaaatcctcctgtctttcgtggccaacaccccaggcaaggcttggggcccccgtctgctgctggacgcagagccatgaagaagaagttagtggtgctgggcctgctggccgtggtcctggtgctggtcattgtcggcctctgtctctggctgccctcagcctccaaggaacctgacaaccatgtgtacaccagggctgccgtggccgcggatgccaagcagtgctcgaagattgggagggatgcactgcgggacggtggctctgcggtggatgcagccattgcagccctgttgtgtgtggggctcatgaatgcccacagcatgggcatcgggggtggcctcttcctcaccatctacaacagcaccacacgaaaagctgaggtcatcaacgcccgcgaggtggcccccaggctggcctttgccaccatgttcaacagctcggagcagtcccagaagggggggctgtcggtggcggtgcctggggagatccgaggctatgagctggcacaccagcggcatgggcggctgccctgggctcgcctcttccagcccagcatccagctggcccgccagggcttccccgtgggcaagggcttggcggcagccctggaaaacaagcggaccgtcatcgagcagcagcctgtcttgtgtgaggtgttctgccgggatagaaaggtgcttcgggagggggagagactgaccctgccgcagctggctgacacctacgagacgctggccatcgagggtgcccaggccttctacaacggcagcctcacggcccagattgtgaaggacatccaggcggccgggggcattgtgacagctgaggacctgaacaactaccgtgctgagctgatcgagcacccgctgaacatcagcctgggagacgtggtgctgtacatgcccagtgcgccgctcagcgggcccgtgctggccctcatcctcaacatcctcaaagggtacaacttctcccgggagagcgtggagagccccgagcagaagggcctgacgtaccaccgcatcgtagaggctttccggtttgcctacgccaagaggaccctgcttggggaccccaagtttgtggatgtgactgaggtggtccgcaacatgacctccgagttcttcgctgcccagctccgggcccagatctctgacgacaccactcacccgatctcctactacaagcccgagttctacacgccggatgacgggggcactgctcacctgtctgtcgtcgcagaggacggcagtgctgtgtccgccaccagcaccatcaacctctactttggctccaaggtccgctccccggtcagcgggatcctgttcaataatgaaatggacgacttcagctctcccagcatcaccaacgagtttggggtacccccctcacctgccaatttcatccagccagggaagcagccgctctcgtccatgtgcccgacgatcatggtgggccaggacggcc

SEQ ID NO: 11853 - DNA, 831 bp, Homo sapiens
  source 1..831: mol_type = unassigned DNA
ccagaccgggcgtcgggtgagcccagaagtgagagcagttggctgtgccccagtgctgtgtgacccagaggcgccgctcaccctctctgagctggtggacatcataggtggggaagctcaggtcagggcactcccatgagtgtctggaggcctgagtcccattctcagctctgccatatgcttgctgcgctctagaggagttcctcttcctctccaagcctcggtttatgtacccgtgcagtgggagtgagttgcacttcggggtgaagggggcaagacttgtgtgggcgcatcctgcagaaggatcccacagcaaggcaagtgaggtgctgccgtcatccaggctggacagttcagtgatttgcctgaggccccacagcagagttcaactggagacagagaaaccagctagaggcagagggaggtaacacggagtcccccagaaaggtctgggctgcgcgtgcttcaggcttcagcagagtgtgagggagaccccggttatttcctcagctatttccaccaaatcctcctgtctttcgtggccaacaccccaggcaaggcttggggcccccgtctgctgctggacgagccatgaagaagaagttagtggtgctgggcctgctggccgtggtcctggtgctggtcattgtcggcctctgtctctggctgccctcagcctccaaggaacctgacaaccatgtgtacaccagggctgccgtggccgcggatgccaagcagtgctcgaagattgggagggatgcactgcgggacggtggctctgcggtggatgcagccattgcagccctgttgtgtgtggggctcatgaatgcc

SEQ ID NO: 11854 - DNA, 1078 bp, Homo sapiens
  source 1..1078: mol_type = unassigned DNA
ggtgtgctgctggatgaccagaccgggcgtcgggtgagcccagaagtgagagcagttggctgtgccccagtgctgtgtgacccagaggcgccgctcaccctctctgagctggtggacatcatagcgggtgcagcccagaactgtcttctgaggaagaggtgctctcctgggcccccactgtccccaggcctcagcagcaaggcaagtgaggtgctgccgtcatccaggctggacagttcagtgatttgcctgaggccccacagcagagttcaactggagacagagaaaccagctagaggcagagggaggtaacacggagtcccccagaaaggtctgggctgcgcgtgcttcaggtaacctcccttgaccttcaggagaacgagaaggctgcctgatcagagagtccctgaagaagattctgtggctacaggcttcagcagagtgtgagggagaccccggttatttcctcagctatttccaccaaatcctcctgtctttcgtggccaacaccccaggcaaggcttggggcccccgtctgctgctggacgcagagccatgaagaagaagttagtggtgctgggcctgctggccgtggtcctggtgctggtcattgtcggcctctgtctctggctgccctcagcctccaaggaacctgacaaccatgtgtacaccagggctgccgtggccgcggatgccaagcagtgctcgaagattgggagggatgcactgcgggacggtggctctgcggtggatgcagccattgcagccctgttgtgtgtggggctcatgaatgcccacagcatgggcatcgggggtggcctcttcctcaccatctacaacagcaccacacgaaaagctgaggtcatcaacgcccgcgaggtggcccccaggctggcctttgccaccatgttcaacagctcggagcagtcccagaagggggggctgtcggtggcggtgcctggggagatccgaggctatgagctggcacaccagcggcatgggcggctgccctgggctcgcctcttccagcccagcatccagctggcccgccagggcttccccgtgggcaagggcttgg

SEQ ID NO: 11855 - DNA, 874 bp, Homo sapiens
  source 1..874: mol_type = unassigned DNA
accctgtgcagatgcctcccactgtccgccggggctgctgggcacgccctggctggtctcttggactagcgggtgcagcccagaactgtcttctgaggaagaggtgctctcctgggcccccactgtccccaggcctcagcaaggcaagtgaggtgctgccgtcatccaggctggacagttcagtgatttgcctgaggccccacagcagagttcaactggagacagagaaaccagctagaggcagagggaggtaacacggagtcccccagaaaggtctgggctgcgcgtgcttcaggtaacctcccttgaccttcaggagaacgagaaggctgcctgatcagagagtccctgaagaagattctgtggctacaggcttcagcagagtgtgagggagaccccggttatttcctcagctatttccaccaaatcctcctgtctttcgtggccaacaccccaggcaaggcttggggcccccgtctgctgctggacgagccatgaagaagaagttagtggtgctgggcctgctggccgtggtcctggtgctggtcattgtcggcctctgtctctggctgccctcagcctccaaggaacctgacaaccatgtgtacaccagggctgccgtggccgcggatgccaagcagtgctcgaagattgggagggatgcactgcgggacggtggctctgcggtggatgcagccattgcagccctgttgtgtgtggggctcatgaatgcccacagcatgggcatcgggggtggcctcttcctcaccatctacaacagcaccacacgaaaagctgaggtcatcaacgcccgcgaggtggcccccaggctggcctttgccaccatgttcaacagctcggagcagtcccagaa

SEQ ID NO: 11856 - DNA, 929 bp, Homo sapiens
  source 1..929: mol_type = unassigned DNA
gcccagaagtgagagcagttggctgtgccccagtgctgtgtgacccagaggcgccgctcaccctctctgagctggtggacatcataggtggggaagctcaggtcagggcactcccatgagtgtctggaggcctgagtcccattctcagctctgccatatgcttgctgcgctctagaggagttcctcttcctctccaagcctcggtttatgtacccgtgcagtgggagtgagttgcacttcggggtgaagggggcaagacttgtgtgggcgcatcctgcagaaggatcccacagcgggtgcagcccagaactgtcttctgaggaagaggtgctctcctgggcccccactgtccccaggcctcagcaaggcaagtgaggtgctgccgtcatccaggctggacagttcagtgatttgcctgaggccccacagcagagttcaactggagacagagaaaccagctagaggcagagggaggtaacacggagtcccccagaaaggtctgggctgcgcgtgcttcagctatttccaccaaatcctcctgtctttcgtggccaacaccccaggcaaggcttggggcccccgtctgctgctggacgcagagccatgaagaagaagttagtggtgctgggcctgctggccgtggtcctggtgctggtcattgtcggcctctgtctctggctgccctcagcctccaaggaacctgacaaccatgtgtacaccagggctgccgtggccgcggatgccaagcagtgctcgaagattgggagggatgcactgcgggacggtggctctgcggtggatgcagccattgcagccctgttgtgtgtggggctcatgaatgcccacagcatgggcatcgggggtggcctcttcctcaccatctacaacagcaccacacgaaaagctgaggtcatcaacgcccgcgaggt

SEQ ID NO: 11857 - DNA, 747 bp, Homo sapiens
  source 1..747: mol_type = unassigned DNA
tccgtgagaggcctgcctgtcctgcaccctgtgcagatgcctcccactgtccgccggggctgctgggcacgccctggctggtctcttggactagcgggtgcagcccagaactgtcttctgaggaagaggtgctctcctgggcccccactgtccccaggcctcagcaaggcaagtgaggtgctgccgtcatccaggctggacagttcagtgatttgcctgaggccccacagcaggagaacgagaaggctgcctgatcagagagtccctgaagaagattctgtggctacaggcttcagcagagtgtgagggagaccccggttatttcctcagctatttccaccaaatcctcctgtctttcgtggccaacaccccaggcaaggcttggggcccccgtctgctgctggacgcagagccatgaagaagaagttagtggtgctgggcctgctggccgtggtcctggtgctggtcattgtcggcctctgtctctggctgccctcagcctccaaggaacctgacaaccatgtgtacaccagggctgccgtggccgcggatgccaagcagtgctcgaagattgggagggatgcactgcgggacggtggctctgcggtggatgcagccattgcagccctgttgtgtgtggggctcatgaatgcccacagcatgggcatcgggggtggcctcttcctcaccatctacaacagcaccacacgaaaagctgaggtcatcaacgcccgcgaggtggccccc

SEQ ID NO: 11858 - DNA, 537 bp, Homo sapiens
  source 1..537: mol_type = unassigned DNA
gaccagaccgggcgtcgggtgagcccagaagtgagagcagttggctgtgccccagtgctgtgtgacccagaggcgccgctcaccctctctgagctggtggacatcatagcgggtgcagcccagaactgtcttctgaggaagaggtgctctcctgggcccccactgtccccaggcctcagcaaggcaagtgaggtgctgccgtcatccaggctggacagttcagtgatttgcctgaggccccacagcaggagaacgagaaggctgcctgatcagagagtccctgaagaagattctgtggctacaggcttcagcagagtgtgagggagaccccggttatttcctcagctatttccaccaaatcctcctgtctttcgtggccaacaccccaggcaaggcttggggcccccgtctgctgctggacgagccatgaagaagaagttagtggtgctgggcctgctggccgtggtcctggtgctggtcattgtcggcctctgtctctggctgccctcagcctccaaggaacctgacaaccatgtg

SEQ ID NO: 11859 - DNA, 606 bp, Homo sapiens
  source 1..606: mol_type = unassigned DNA
cttagcttggttttggtgtgctgctggatgaccagaccgggcgtcgggtgagcccagaagtgagagcagttggctgtgccccagtgctgtgtgacccagaggcgccgctcaccctctctgagctggtggacatcataggtggggaagctcagcgggtgcagcccagaactgtcttctgaggaagaggtgctctcctgggcccccactgtccccaggcctcaggagaacgagaaggctgcctgatcagagagtccctgaagaagattctgtggctacaggcttcagcagagtgtgagggagaccccggttatttcctcagctatttccaccaaatcctcctgtctttcgtggccaacaccccaggcaaggcttggggcccccgtctgctgctggacgcagagccatgaagaagaagttagtggtgctgggcctgctggccgtggtcctggtgctggtcattgtcggcctctgtctctggctgccctcagcctccaaggaacctgacaaccatgtgtacaccagggctgccgtggccgcggatgccaagcagtgctcgaagattgggagggatgcactgcgggacggtggctctgcggtggatgcagc

SEQ ID NO: 11860 - DNA, 743 bp, Homo sapiens
  source 1..743: mol_type = unassigned DNA
tcccagccaggctggacctccgtgagaggcctgcctgtcctgcaccctgtgcagatgcctcccactgtccgccggggctgctgggcacgccctggctggtctcttggactagcgggtgcagcccagaactgtcttctgaggaagaggtgctctcctgggcccccactgtccccaggcctcaggagaacgagaaggctgcctgatcagagagtccctgaagaagattctgtggctacaggcttcagcagagtgtgagggagaccccggttatttcctcagctatttccaccaaatcctcctgtctttcgtggccaacaccccaggcaaggcttggggcccccgtctgctgctggacgcagagccatgaagaagaagttagtggtgctgggcctgctggccgtggtcctggtgctggtcattgtcggcctctgtctctggctgccctcagcctccaaggaacctgacaaccatgtgtacaccagggctgccgtggccgcggatgccaagcagtgctcgaagattgggagggatgcactgcgggacggtggctctgcggtggatgcagccattgcagccctgttgtgtgtggggctcatgaatgcccacagcatgggcatcgggggtggcctcttcctcaccatctacaacagcaccacacgaaaagctgaggtcatcaacgcccgcgaggtggcccccaggctggcctttgccaccatgttcaacagctcggagcagtcccagaa

SEQ ID NO: 11861 - DNA, 853 bp, Homo sapiens
  source 1..853: mol_type = unassigned DNA
cctgcaccctgtgcagatgcctcccactgtccgccggggctgctgggcacgccctggctggtctcttggactagcgggtgcagcccagaactgtcttctgaggaagaggtgctctcctgggcccccactgtccccaggcctcagcagcaaggcaagtgaggtgctgccgtcatccaggctggacagttcagtgatttgcctgaggccccacagcagagttcaactggagacagagaaaccagctagaggcagagggaggtaacacggagtcccccagaaaggtctgggctgcgcgtgcttcaggtaacctcccttgaccttcaggagaacgagaaggctgcctgatcagagagtccctgaagaagattctgtggctacaggcttcagcagagtgtgagggagaccccggttatttcctcagctatttccaccaaatcctcctgtctttcgtggccaacaccccaggcaaggcttggggcccccgtctgctgctggacgcagagccatgaagaagaagttagtggtgctgggcctgctggccgtggtcctggtgctggtcattgtcggcctctgtctctggctgccctcagcctccaaggaacctgacaaccatgtgtacaccagggctgccgtggccgcggatgccaagcagtgctcgaagattgggagggatgcactgcgggacggtggctctgcggtggatgcagccattgcagccctgttgtgtgtggggctcatgaatgcccacagcatgggcatcgggggtggcctcttcctcaccatctacaacagcaccacacgaaaagctgaggtcatcaacgcccgcgaggtggcccccaggctggcctttgcc

SEQ ID NO: 11862 - DNA, 811 bp, Homo sapiens
  source 1..811: mol_type = unassigned DNA
gaccagaccgggcgtcgggtgagcccagaagtgagagcagttggctgtgccccagtgctgtgtgacccagaggcgccgctcaccctctctgagctggtggacatcatagcgggtgcagcccagaactgtcttctgaggaagaggtgctctcctgggcccccactgtccccaggcctcagcaaggcaagtgaggtgctgccgtcatccaggctggacagttcagtgatttgcctgaggccccacagcaggagaacgagaaggctgcctgatcagagagtccctgaagaagattctgtggctacaggcttcagcagagtgtgagggagaccccggttatttcctcagctatttccaccaaatcctcctgtctttcgtggccaacaccccaggcaaggcttggggcccccgtctgctgctggacgcagagccatgaagaagaagttagtggtgctgggcctgctggccgtggtcctggtgctggtcattgtcggcctctgtctctggctgccctcagcctccaaggaacctgacaaccatgtgtacaccagggctgccgtggccgcggatgccaagcagtgctcgaagattgggagggatgcactgcgggacggtggctctgcggtggatgcagccattgcagccctgttgtgtgtggggctcatgaatgcccacagcatgggcatcgggggtggcctcttcctcaccatctacaacagcaccacacgaaaagctgaggtcatcaacgcccgcgaggtggcccccaggctggcctttgccaccatgttcaacagctcggagcagtcccagaagg

SEQ ID NO: 11863 - DNA, 579 bp, Homo sapiens
  source 1..579: mol_type = unassigned DNA
agaccgggcgtcgggtgagcccagaagtgagagcagttggctgtgccccagtgctgtgtgacccagaggcgccgctcaccctctctgagctggtggacatcataggagaacgagaaggctgcctgatcagagagtccctgaagaagattctgtggctacaggcttcagcagagtgtgagggagaccccggttatttcctcagctatttccaccaaatcctcctgtctttcgtggccaacaccccaggcaaggcttggggcccccgtctgctgctggacgcagagccatgaagaagaagttagtggtgctgggcctgctggccgtggtcctggtgctggtcattgtcggcctctgtctctggctgccctcagcctccaaggaacctgacaaccatgtgtacaccagggctgccgtggccgcggatgccaagcagtgctcgaagattgggagggatgcactgcgggacggtggctctgcggtggatgcagccattgcagccctgttgtgtgtggggctcatgaatgcccacagcatgggcatcgggggtggcctcttcctcaccatctacaacagcaccac

SEQ ID NO: 11864 - DNA, 597 bp, Homo sapiens
  source 1..597: mol_type = unassigned DNA
cccggtcagagctttaagctgcagctctgatgccccagggacctctcagacccccctgcccagagcaggcagcccgcgggtgcagcccagaactgtcttctgaggaagaggtgctctcctgggcccccactgtccccaggcctcagcagcaaggcaagtgaggtgctgccgtcatccaggctggacagttcagtgatttgcctgaggccccacagcagagttcaactggagacagagaaaccagctagaggcagagggaggtaacacggagtcccccagaaaggtctgggctgcgcgtgcttcaggtaacctcccttgaccttcaggagaacgagaaggctgcctgatcagagagtccctgaagaagattctgtggctacaggcttcagcagagtgtgagggagaccccggttatttcctcagctatttccaccaaatcctcctgtctttcgtggccaacaccccaggcaaggcttggggcccccgtctgctgctggacgcagagccatgaagaagaagttagtggtgctgggcctgctggccgtggtcctggtgctggtcattgtcggcctctgtctctggctgccctcagcctcc

SEQ ID NO: 11865 - DNA, 2366 bp, Homo sapiens
  source 1..2366: mol_type = unassigned DNA
atgctgcatattgctggcccagctcctgaggctctttggacctccaggaatcggtgtctctaccaggaacccttaaccctgacccggactcccggctgggacccggggtgttggagtggcaagagcgctgtcaggcctggtgaagggtgtgagctgtccaacagggcagggaggaggcagggcctgttctgcagttggacagacagagccctctagctgctttctggaagactgaagggcagcaaggcaagtgaggtgctgccgtcatccaggctggacagttcagtgatttgcctgaggccccacagcaggagaacgagaaggctgcctgatcagagagtctctgaagaagattctgtggctacaggcttcagcagagtgtgagggagaccccggttatttcctcagctgtttccaccaaatcctcctgtctttcgtggccaacaccccaggcaaggcttggggcccccgtctgctgctggacgcagagccatgaagaagaagttagtggtgctgggcctgctggccgtggtcctggtgctggtcattgtcggcctctgtctctggctgccctcggcctccaaggaacctgacaaccatgtgtacaccagggctgccatggccgcggatgccaagcagtgcttggagattgggagggacacactgcgggacggtggctctgcagtggatgcagccattgcagccctgttgtgtgtggggctcatgaatgcccacagcatgggcatcggggttggcctcttcctcaccatctacaacagcaccactcgaaaagctgaggtcatcaatgcccgcgaggtggcccccaggctggcctttgccagcatgttcaacagctcggagcagtcccagaagggagggctgtcggtggcggtgcctggggagatccgaggctatgagctggcacaccagcggcatgggcggctgccctgggctcgcctcttccagcccagcatccagctggcccgccagggcttccctgtgggcaagggcttggcggcagtcctggaaaacaagcggactgtcatcgagcagcagcctgtcttgtggtatgtgttctgccgggatagaaaggtgcttcgggagggggagagactgaccctgccgcggctggctgacacctatgagatgctggccatcgagggtgcccaggccttctacaacggcagcctcatggcccagattgtgaaggacatccaggcggctgggggcattgtgacagctgaggacctgaacaactaccgtgctgagctgatcgagcacccgctgaacatcagcctgggagacgcggtgctgtacatgcccagtgcgcggctcagcgggcccgtgctggccctcatcctcaacatcctcaaagggtacaacttctcccgggagagcgtggagacccccgagcagaagggcctgacgtaccaccgcatcgtagaggctttccggtttgcctacgccaagaggaccctgcttggggaccccaagtttgtggatgtgactgaggtggtccgcaacatgacctctgagttcttcgctgcccagctccggtcccagatctctgaccacaccactcacccgatctcctactacaagcccgagttctacacgccggatgacgggggcactgctcacctgtctgtcgtcgcagaggacggcagtgctgtgtccgccaccagcaccatcaacctctactttggctccaaggtctgctccccggtcagtgggatcctgttcaataatgaatggacgacttcagctctcccagcattcaccaatgagtttggggcacccccctcacctgccaatttcatccagccagggaagcagccgctcttgtccatgtgcctgacgatcatggtgggccaggacggccaggtccggatggtggtgggagctgctgggggcacgcagatcaccacagacactgcactggccatcatctacaacctctggttcggctatgacgtgaagagggccgtggaggagccccggctgcacaacaagcttctgcccaacgtcacgacagtggagagaaacattgaccaggcagtgactgcagccctggagacccggcaccatcacacccagatcgcgtccaccttcatcgctgtggtgcaagccatcgtccgcacggctggtggctgggcagctgcctcggactccaggaaaggcggggaacctgctggctactgattgctccaggcagacaaggctgacaagcaatccagggacaagatactcaccaggatgaggaagaggactttgggggacgggcttcccctgtgagcagcagagcagcataataaatgaggccactgtgccaggctccaggtggcctccctggcctgtctccccac

SEQ ID NO: 11866 - DNA, 1845 bp, Homo sapiens
  source 1..1845: mol_type = unassigned DNA
atgaagaagaagttagtggtgctgggcctgctggccgtggtcctggtgctggtcattgtcggcctctgtctctggctgccctcggcctccaaggaacctgacaaccatgtgtacaccagggctgccatggccgcggatgccaagcagtgcttggagattgggagggacacactgcgggacggtggctctgcagtggatgcagccattgcagccctgttgtgtgtggggctcatgaatgcccacagcatgggcatcggggttggcctcttcctcaccatctacaacagcaccactcgaaaagctgaggtcatcaatgcccgcgaggtggcccccaggctggcctttgccagcatgttcaacagctcggagcagtcccagaagggagggctgtcggtggcggtgcctggggagatccgaggctatgagctggcacaccagcggcatgggcggctgccctgggctcgcctcttccagcccagcatccagctggcccgccagggcttccctgtgggcaagggcttggcggcagtcctggaaaacaagcggactgtcatcgagcagcagcctgtcttgtggtatgtgttctgccgggatagaaaggtgcttcgggagggggagagactgaccctgccgcggctggctgacacctatgagatgctggccatcgagggtgcccaggccttctacaacggcagcctcatggcccagattgtgaaggacatccaggcggctgggggcattgtgacagctgaggacctgaacaactaccgtgctgagctgatcgagcacccgctgaacatcagcctgggagacgcggtgctgtacatgcccagtgcgcggctcagcgggcccgtgctggccctcatcctcaacatcctcaaagggtacaacttctcccgggagagcgtggagacccccgagcagaagggcctgacgtaccaccgcatcgtagaggctttccggtttgcctacgccaagaggaccctgcttggggaccccaagtttgtggatgtgactgaggtggtccgcaacatgacctctgagttcttcgctgcccagctccggtcccagatctctgaccacaccactcacccgatctcctactacaagcccgagttctacacgccggatgacgggggcactgctcacctgtctgtcgtcgcagaggacggcagtgctgtgtccgccaccagcaccatcaacctctatgggatcctgttcaataatgaatggacgacttcagctctcccagcattcaccaatgagtttggggcacccccctcacctgccaatttcatccagccagggaagcagccgctcttgtccatgtgcctgacgatcatggtgggccaggacggccaggtccggatggtggtgggagctgctgggggcacgcagatcaccacagacactgcactggccatcatctacaacctctggttcggctatgacgtgaagagggccgtggaggagccccggctgcacaacaagcttctgcccaacgtcacgacagtggagagaaacattgaccaggcagtgactgcagccctggagacccggcaccatcacacccagatcgcgtccaccttcatcgctgtggtgcaagccatcgtccgcacggctggtggctgggcagctgcctcggactccaggaaaggcggggaacctgctggctactgattgctccaggcagacaaggctgacaagcaatccagggacaagatactcaccaggatgaggaagaggactttgggggacgggcttcccctgtgagcagcagagcagcataataaatgaggccactgtgccaggctccaggtggcctccctggcctgtctccccact

SEQ ID NO: 11867 - DNA, 2039 bp, Homo sapiens
  source 1..2039: mol_type = unassigned DNA
tcccttgaccttcaggagaacgagaaggctgcctgatcagagagtctctgaagaagattctgtggctacaggcttcagcagagtgtgagggagaccccggttatttcctcagctgtttccaccaaatcctcctgtctttcgtggccaacaccccaggcaaggcttggggcccccgtctgctgctggacgcagagccatgaagaagaagttagtggtgctgggcctgctggccgtggtcctggtgctggtcattgtcggcctctgtctctggctgccctcggcctccaaggaacctgacaaccatgtgtacaccagggctgccatggccgcggatgccaagcagtgcttggagattgggagggacacactgcgggacggtggctctgcagtggatgcagccattgcagccctgttgtgtgtggggctcatgaatgcccacagcatgggcatcggggttggcctcttcctcaccatctacaacagcaccactcgaaaagctgaggtcatcaatgcccgcgaggtggcccccaggctggcctttgccagcatgttcaacagctcggagcagtcccagaagggagggctgtcggtggcggtgcctggggagatccgaggctatgagctggcacaccagcggcatgggcggctgccctgggctcgcctcttccagcccagcatccagctggcccgccagggcttccctgtgggcaagggcttggcggcagtcctggaaaacaagcggactgtcatcgagcagcagcctgtcttgtggtatgtgttctgccgggatagaaaggtgcttcgggagggggagagactgaccctgccgcggctggctgacacctatgagatgctggccatcgagggtgcccaggccttctacaacggcagcctcatggcccagattgtgaaggacatccaggcggctgggggcattgtgacagctgaggacctgaacaactaccgtgctgagctgatcgagcacccgctgaacatcagcctgggagacgcggtgctgtacatgcccagtgcgcggctcagcgggcccgtgctggccctcatcctcaacatcctcaaagggtacaacttctcccgggagagcgtggagacccccgagcagaagggcctgacgtaccaccgcatcgtagaggctttccggtttgcctacgccaagaggaccctgcttggggaccccaagtttgtggatgtgactgaggtggtccgcaacatgacctctgagttcttcgctgcccagctccggtcccagatctctgaccacaccactcacccgatctcctactacaagcccgagttctacacgccggatgacgggggcactgctcacctgtctgtcgtcgcagaggacggcagtgctgtgtccgccaccagcaccatcaacctctactttggctccaaggtctgctccccggtcagtgggatcctgttcaataatgaatggacgacttcagctctcccagcattcaccaatgagtttggggcacccccctcacctgccaatttcatccagccagggaagcagccgctcttgtccatgtgcctgacgatcatggtgggccaggacggccaggtccggatggtggtgggagctgctgggggcacgcagatcaccacagacactgcactggccatcatctacaacctctggttcggctatgacgtgaagagggccgtggaggagccccggctgcacaacaagcttctgcccaacgtcacgacagtggagagaaacattgaccaggcagtgactgcagccctggagacccggcaccatcacacccagatcgcgtccaccttcatcgctgtggtgcaagccatcgtccgcacggctggtggctgggcagctgcctcggactccaggaaaggcggggaacctgctggctactgattgctccaggcagacaaggctgacaagcaatccagggacaagatactcaccaggatgaggaagaggactttgggggacgggcttcccctgtgagcagcagagcagcataataaatgaggccactgtgccaggc

SEQ ID NO: 11868 - DNA, 2334 bp, Homo sapiens
  source 1..2334: mol_type = unassigned DNA
actccgtagtgtgcacttggtgagggcagcagctcgccacagctgccagccatctgtccattcacccatctgtccatctggcagcccgctgttcagacctgtctgtctgtccgcccatctgtaagcccatctctgtcccattgtctatctgaccatctttctcttactgtcctctttgtctagctatctggcctatctgtcgatccatcttcgtgtctgtcttcagcccccacctgtttgtccatctgtccaattacctgtgactctgtgcatcttcttgtccattcatctgcccacccatccgtccctccgtctgcccaccagccgcccctctcctcctgggctgcagagccatggcccggggctacggggccacggtcagcctagtcctgctgggtctggggctggcgctggctgtcattgtgctggctgtggtcctctctcgacaccaggccccatgtggcccccaggcctttgcccacgctgctgttgccgccgactccaaggtctgctcggatattggacgagccatcctccagcagcagggctcacccgtggatgccaccatcgcggctctggtctgcaccagcgtcgtcaaccctcagagcatgggcctgggcggaggggtcatcttcaccatctacaatgtgacaacaggggcccagtggatcggggtgcccggggagctccgtggctatgccgaggcccaccgccgccatggccgcctgccctgggcgcagctgttccagcccaccatcgcgctgctccgaggggggcatgtggtggcccctgtcctcagccgtttcctgcacaacagcatcctgcggccttccttgcaggcgtcaaccctgcgccagctcttcttcaacgggacagaacccctgaggcctcaggacccactcccatggcctgcactggccaccaccctggagaccgtggccacagagggcgtggaggtcttctacacggggaggctgggccagatgctggtggaggacattgccaaggaagggagccagctgacgctgcaggacctggccaagttccagcccgaggtggtggatgccctggaggtgcccctgggggactataccctgtactcaccaccgccgcctgcagggggtgccattctcagctttatcctcaacgtgctaagagggttcaacttctcaacagagtctatggccaggcctgaagggagggtgaacgtgtaccaccaccttgtagagacgctcaagtttgccaaggggcagaggtggaggctgggggaccctcgaagccacccgaagctccagaatgcctcccgggacctgctgggggagaccctggcccagctcatccgccaacagatcgatggccggggggaccaccagctcagccactacagcttggccgaggcctggggccacgggacaggcacgtcccatgtgtctgtgctgggggaggatggcagcgccgtggctgccaccagcaccatcaacacaccctttggagcgatggtgtattcaccacggacaggcatcatcctcaacaacgagctcctggacttatgcgagcgatgcccccggggttccggcaccaccccctcacctgtgagtggagacagggtgggtggagctcccggaaggtgctggcccccagttccaggcgagcgttccccatcctccatggtgccctccatcttgatcaacaaagcccaggggtcgaagctagtgattggcggggctggcggggagctcatcatctctgctgtggcccaggccatcatgagcaagctgtggcttggctttgacctgagagcggccattgcagcccccatcctgcatgtcaacagcaagggctgtgtggagtacgagcccaacttcagccaggaggtgcagaggggactccaagaccgtggccagaaccagacccagaggcccttcttcctgaacgtggtccaggctgtgtcccaggagggggcctgtgtgtacgccgtctcggacctgaggaagagtggggaggccgcaggctactaagacactgctctgcccagagctgaagtctggccccaccatgagtcctgtgtccaggccggacatggctgggggaccaactactctggcaggatctggacccctggcaggggagtccagctgagagtggaagaggtggcggggaccagctgggcagatgagaggctgagcctcatccctaaccccctttcccagagcccctggtggtcctgaaccggcccctctatccctccgcaggcctcttgcctggggccactctcccaccctctcgatctgtatatcctccagtccaagattaaagaggcggactgtggcctga

SEQ ID NO: 11869 - DNA, 2494 bp, Homo sapiens
  source 1..2494: mol_type = unassigned DNA
tgcctggcctcctgccagcaacaagcaggagctgaaaaccagaagttgaggcgtgagtttggccactccgtagtgtgcacttggtgagggcagcagctcgccacagctgccagccatctgtccattcacccatctgtccatctggcagcccgctgttcagacctgtctgtctgtccgcccatctgtaagcccatctctgtcccattgtctatctgaccatctttctcttactgtcctctttgtctagctatctggcctatctgtcgatccatcttcgtgtctgtcttcagcccccacctgtttgtccatctgtccaattacctgtgactctgtgcatcttcttgtccattcatctgcccacccatccgtccctccgtctgcccaccagccgcccctctcctcctgggctgcagagccatggcccggggctacggggccacggtcagcctagtcctgctgggtctggggctggcgctggctgtcattgtgctggctgtggtcctctctcgacaccaggccccatgtggcccccaggcctttgcccacgctgctgttgccgccgactccaaggtctgctcggatattggacgagccatcctccagcagcagggctcacccgtggatgccaccatcgcggctctggtctgcaccagcgtcgtcaaccctcagagcatgggcctgggcggaggggtcatcttcaccatctacaatgtgacaacagggaaggtggaggtcatcaatgcccgggagacggtgccggccagccacgccccgagcctgctggaccagtgtgcacaggctctgccactgggcacaggggcccagtggatcggggtgcccggggagctccgtggctatgccgaggcccaccgccgccatggccgcctgccctgggcgcagctgttccagcccaccatcgcgctgctccgaggggggcatgtggtggcccctgtcctcagccgtttcctgcacaacagcatcctgcggccttccttgcaggcgtcaaccctgcgccagctcttcttcaacgggacagaacccctgaggcctcaggacccactcccatggcctgcactggccaccaccctggagaccgtggccacagagggcgtggaggtcttctacacggggaggctgggccagatgctggtggaggacattgccaaggaagggagccagctgacgctgcaggacctggccaagttccagcccgaggtggtggatgccctggaggtgcccctgggggactataccctgtactcaccaccgccgcctgcagggggtgccattctcagctttatcctcaacgtgctaagagggttcaacttctcaacagagtctatggccaggcctgaagggagggtgaacgtgtaccaccaccttgtagagacgctcaagtttgccaaggggcagaggtggaggctgggggaccctcgaagccacccgaagctccagaatgcctcccgggacctgctgggggagaccctggcccagctcatccgccaacagatcgatggccggggggaccaccagctcagccactacagcttggccgaggcctggggccacgggacaggcacgtcccatgtgtctgtgctgggggaggatggcagcgccgtggctgccaccagcaccatcaacacaccctttggagcgatggtgtattcaccacggacaggcatcatcctcaacaacgagctcctggacttatgcgagcgatgcccccggggttccggcaccaccccctcacctgtgagtggagacagggtgggtggagctcccggaaggtgctggcccccagttccaggcgagcgttccccatcctccatggtgccctccatcttgatcaacaaagcccaggggtcgaagctagtgattggcggggctggcggggagctcatcatctctgctgtggcccaggccatcatgagcaagctgtggcttggctttgacctgagagcggccattgcagcccccatcctgcatgtcaacagcaagggctgtgtggagtacgagcccaacttcagccaggaggtgcagaggggactccaagaccgtggccagaaccagacccagaggcccttcttcctgaacgtggtccaggctgtgtcccaggagggggcctgtgtgtacgccgtctcggacctgaggaagagtggggaggccgcaggctactaagacactgctctgcccagagctgaagtctggccccaccatgagtcctgtgtccaggccggacatggctgggggaccaactactctggcaggatctggacccctggcaggggagtccagctgagagtggaagaggtggcggggaccagctgggcagatgagaggctgagcctcatccctaaccccctttcccagagcccctggtggtcctgaaccggcccctctatccctccgcaggcctcttgcctggggccactctcccaccctctcgatctgtatatcctccagtccaagattaaagaggcggactgtggcctga

SEQ ID NO: 11870 - DNA, 2408 bp, Homo sapiens
  source 1..2408: mol_type = unassigned DNA
gtgagggcagcagctcgccacagctgccagccatctgtccattcacccatctgtccatctggcagcccgctgttcagacctgtctgtctgtccgcccatctgtaagcccatctctgtcccattgtctatctgaccatctttctcttactgtcctctttgtctagctatctggcctatctgtcgatccatcttcgtgtctgtcttcagcccccacctgtttgtccatctgtccaattacctgtgactctgtgcatcttcttgtccattcatctgcccacccatccgtccctccgtctgcccaccagccgcccctctcctcctgggctgcagagccatggcccggggctacggggccacggtcagcctagtcctgctgggtctggggctggcgctggctgtcattgtgctggctgtggtcctctctcgacaccaggccccatgtggcccccaggcctttgcccacgctgctgttgccgccgactccaaggtctgctcggatattggacgagccatcctccagcagcagggctcacccgtggatgccaccatcgcggctctggtctgcaccagcgtcgtcaaccctcagagcatgggcctgggcggaggggtcatcttcaccatctacaatgtgacaacagggaaggtggaggtcatcaatgcccgggagacggtgccggccagccacgccccgagcctgctggaccagtgtgcacaggctctgccactgggcacaggggcccagtggatcggggtgcccggggagctccgtggctatgccgaggcccaccgccgccatggccgcctgccctgggcgcagctgttccagcccaccatcgcgctgctccgaggggggcatgtggtggcccctgtcctcagccgtttcctgcacaacagcatcctgcggccttccttgcaggcgtcaaccctgcgccagctcttcttcaacgggacagaacccctgaggcctcaggacccactcccatggcctgcactggccaccaccctggagaccgtggccacagagggcgtggaggtcttctacacggggaggctgggccagatgctggtggaggacattgccaaggaagggagccagctgacgctgcaggacctggccaagttccagcccgaggtggtggatgccctggaggtgcccctgggggactataccctgtactcaccaccgccgcctgcagggggtgccattctcagctttatcctcaacgtgctaagagggttcaacttctcaacagagtctatggccaggcctgaagggagggtgaacgtgtaccaccaccttgtagagacgctcaagtttgccaaggggcagaggtggaggctgggggaccctcgaagccacccgaagctccagaatgcctcccgggacctgctgggggagaccctggcccagctcatccgccaacagatcgatggccggggggaccaccagctcagccactacagcttggccgaggcctggggccacgggacaggcacgtcccatgtgtctgtgctgggggaggatggcagcgccgtggctgccaccagcaccatcaacacaccctttggagcgatggtgtattcaccacggacaggcatcatcctcaacaacgagctcctggacttatgcgagcgatgcccccggggttccggcaccaccccctcacctgcagtgagtggagacagggtgggtggagctcccggaaggtgctggcccccagttccaggcgagcgttccccatcctccatggtgccctccatcttgatcaacaaagcccaggggtcgaagctagtgattggcggggctggcggggagctcatcatctctgctgtggcccaggccatcatgagcaagctgtggcttggctttgacctgagagcggccattgcagcccccatcctgcatgtcaacagcaagggctgtgtggagtacgagcccaacttcagccaggaggtgcagaggggactccaagaccgtggccagaaccagacccagaggcccttcttcctgaacgtggtccaggctgtgtcccaggagggggcctgtgtgtacgccgtctcggacctgaggaagagtggggaggccgcaggctactaagacactgctctgcccagagctgaagtctggccccaccatgagtcctgtgtccaggccggacatggctgggggaccaactactctggcaggatctggacccctggcaggggagtccagctgagagtggaagaggtggcggggaccagctgggcagatgagaggctgagcctcatccctaaccccctttcccagagcccctggtggtcctgaaccggcccctctatccctccgcaggcctcttgcctggggccactctcccaccctctcgatctgtatatcctccagtccaagattaaagaggcggactgtg

SEQ ID NO: 11871 - DNA, 2120 bp, Homo sapiens
  source 1..2120: mol_type = unassigned DNA
ggccactccgtagtgtgcacttggtgagggcagcagctcgccacagctgccagccatctgtccattcacccatctgtccatctggcagcccgctgttcagacctgtctgtctgtccgcccatctgtaagcccatctctgtcccattgtctatctgaccatctttctcttactgtcctctttgtctagctatctggcctatctgtcgatccatcttcgtgtctgtcttcagcccccacctgtttgtccatctgtccaattacctgtgactctgtgcatcttcttgtccattcatctgcccacccatccgtccctccgtctgcccaccagccgcccctctcctcctgggctgcagagccatggcccggggctacggggccacggtcagcctagtcctgctgggtctggggctggcgctggctgtcattgtgctggctgtggtcctctctcgacaccaggccccatgtggcccccaggcctttgcccacgctgctgttgccgccgactccaaggtctgctcggatattggacggggcccagtggatcggggtgcccggggagctccgtggctatgccgaggcccaccgccgccatggccgcctgccctgggcgcagctgttccagcccaccatcgcgctgctccgaggggggcatgtggtggcccctgtcctcagccgtttcctgcacaacagcatcctgcggccttccttgcaggcgtcaaccctgcgctcttcttcaacgggacagaacccctgaggcctcaggacccactcccatggcctgcactggccaccaccctggagaccgtggccacagagggcgtggaggtcttctacacggggaggctgggccagatgctggtggaggacattgccaaggaagggagccagctgacgctgcaggacctggccaagttccagcccgaggtggtggatgccctggaggtgcccctgggggactataccctgtactcaccaccgccgcctgcagggggtgccattctcagctttatcctcaacgtgctaagagggttcaacttctcaacagagtctatggccaggcctgaagggagggtgaacgtgtaccaccaccttgtagagacgctcaagtttgccaaggggcagaggtggaggctgggggaccctcgaagccacccgaagctccagaatgcctcccgggacctgctgggggagaccctggcccagctcatccgccaacagatcgatggccggggggaccaccagctcagccactacagcttggccgaggcctggggccacgggacaggcacgtcccatgtgtctgtgctgggggaggatggcagcgccgtggctgccaccagcaccatcaacacaccctttggagcgatggtgtattcaccacggacaggcatcatcctcaacaacgagctcctggacttatgcgagcgatgcccccggggttccggcaccaccccctcacctgcagtgagtggagacagggtgggtggagctcccggaaggtgctggcccccagttccaggcgagcgttccccatcctccatggtgccctccatcttgatcaacaaagcccaggggtcgaagctagtgattggcggggctggcggggagctcatcatctctgctgtggcccaggccatcatgagcaagctgtggcttggctttgacctgagagcggccattgcagcccccatcctgcatgtcaacagcaagggctgtgtggagtacgagcccaacttcagccaggaggtgcagaggggactccaagaccgtggccagaaccagacccagaggcccttcttcctgaacgtggtccaggctgtgtcccaggagggggcctgtgtgtacgccgtctcggacctgaggaagagtggggaggccgcaggctactaagacactgctctgcccagagctgaagtctggccccaccatgagtcctgtgtccaggccggacatggctgggggaccaactactctggcaggatctggacccctggcaggggagtccagctgagagtggaagaggtggcggggaccagctgggcagatgagaggctgagcctcatccctaaccccctttcccagagcccctggtggtcctgaaccggcccctctatccctcc

SEQ ID NO: 11872 - DNA, 2268 bp, Homo sapiens
  source 1..2268: mol_type = unassigned DNA
actccgtagtgtgcacttggtgagggcagcagctcgccacagctgccagccatctgtccattcacccatctgtccatctggcagcccgctgttcagacctgtctgtctgtccgcccatctgtaagcccatctctgtcccattgtctatctgaccatctttctcttactgtcctctttgtctagctatctggcctatctgtcgatccatcttcgtgtctgtcttcagcccccacctgtttgtccatctgtccaattacctgtgactctgtgcatcttcttgtccattcatctgcccacccatccgtccctccgtctgcccacgctgctgttgccgccgactccaaggtctgctcggatattggacgagccatcctccagcagcagggctcacccgtggatgccaccatcgcggctctggtctgcaccagcgtcgtcaaccctcagagcatgggcctgggcggaggggtcatcttcaccatctacaatgtgacaacagggaaggtggaggtcatcaatgcccgggagacggtgccggccagccacgccccgagcctgctggaccagtgtgcacaggctctgccactgggcacaggggcccagtggatcggggtgcccggggagctccgtggctatgccgaggcccaccgccgccatggccgcctgccctgggcgcagctgttccagcccaccatcgcgctgctccgaggggggcatgtggtggcccctgtcctcagccgtttcctgcacaacagcatcctgcggccttccttgcaggcgtcaaccctgcgccagctcttcttcaacgggacagaacccctgaggcctcaggacccactcccatggcctgcactggccaccaccctggagaccgtggccacagagggcgtggaggtcttctacacggggaggctgggccagatgctggtggaggacattgccaaggaagggagccagctgacgctgcaggacctggccaagttccagcccgaggtggtggatgccctggaggtgcccctgggggactataccctgtactcaccaccgccgcctgcagggggtgccattctcagctttatcctcaacgtgctaagagggttcaacttctcaacagagtctatggccaggcctgaagggagggtgaacgtgtaccaccaccttgtagagacgctcaagtttgccaaggggcagaggtggaggctgggggaccctcgaagccacccgaagctccagaatgcctcccgggacctgctgggggagaccctggcccagctcatccgccaacagatcgatggccggggggaccaccagctcagccactacagcttggccgaggcctggggccacgggacaggcacgtcccatgtgtctgtgctgggggaggatggcagcgccgtggctgccaccagcaccatcaacacaccctttggagcgatggtgtattcaccacggacaggcatcatcctcaacaacgagctcctggacttatgcgagcgatgcccccggggttccggcaccaccccctcacctgtgagtggagacagggtgggtggagctcccggaaggtgctggcccccagttccaggcgagcgttccccatcctccatggtgccctccatcttgatcaacaaagcccaggggtcgaagctagtgattggcggggctggcggggagctcatcatctctgctgtggcccaggccatcatgagcaagctgtggcttggctttgacctgagagcggccattgcagcccccatcctgcatgtcaacagcaagggctgtgtggagtacgagcccaacttcagccaggaggtgcagaggggactccaagaccgtggccagaaccagacccagaggcccttcttcctgaacgtggtccaggctgtgtcccaggagggggcctgtgtgtacgccgtctcggacctgaggaagagtggggaggccgcaggctactaagacactgctctgcccagagctgaagtctggccccaccatgagtcctgtgtccaggccggacatggctgggggaccaactactctggcaggatctggacccctggcaggggagtccagctgagagtggaagaggtggcggggaccagctgggcagatgagaggctgagcctcatccctaaccccctttcccagagcccctggtggtcctgaaccggcccctctatccctccgcaggcctcttgcctggggccactctcccaccctctcgatctgtatatcctccagtccaagattaaagaggcggactgtggcctg

SEQ ID NO: 11873 - DNA, 2532 bp, Homo sapiens
  source 1..2532: mol_type = unassigned DNA
ctctgagacacagccggaaaggctggcaggcaggagggctggggcgagcactggggggccatggagcgggcagaagagcccgtggtctatcagaagctgctgccctgggagccaagcttggagtcggaggaggaagtggaggaggaggagacatcagaggcgctggttctaaacccccggaggcaccaggactcttccaggaacaaggctggcgggctgcccggaacctgggcccgtgtagtggcagccctgctgctgctggctgttggctgctccctggctgtgaggcagctccagaatcagggcaggtcgacaggaagcttgggctctgtggcccctccacccggcggacactcccacggccctggcgtataccaccacggtgccatcatcagccctgcaggtgccatgttttggggcctcttccacgatagctcctcaggcaattccacggccctgacatcaggcccagcacagaccctggcccccggcctggggctgcccgcggctctgcccaccctgcacctgctgcatgcacgcttcggccgcctgccctggccacgcctgctagtgggccccaccacgctggctcaggagggcttcctggtggacacacccctggcaagggctctggtggctcggggcacagaaggcctctgtccactactttgccatgctgatgggacacccctgggcgctggggcccgagccaccaacccacaactggcagctgtgcttcgcagcgcagccctcgctcccacctcagaccttgctggggatgctctactgagtctactggcgggagacctgggggtggaggtgccctcggctgtgcccaggcccactttggaaccagcagagcagctacctgtgccccagggcatcctgttcaccacccccagtccctcagctggcccagaactgctggcactgttggaggcagccctgcgctccggggcgcccatccctgacccctgcccaccgttcctgcagactgctgtgagccccgagagcagtgccctggccgccgtggacagcagcggctctgtgctccttctcacctcctcgctcaactgctcctttggctctgcacacctgtccccaagcactggggttctgctcagcaacctggtggccaagtctaccactagtgcctgggcctgccccctcatcctccgtggcagcctggatgacacagaggctgatgtgttggggcttgtggcttcagggacccctgatgtggccagggccatgactcacaccctactcaggcatctggcagcaaggccccctacccaggcccagcaccagcatcagggtcagcaagaaccaacagagcatcccagcacttgtggccaagggaccctgctccaggtggcagcccacacagagcacgcccatgtctccagtgtcccccatgcctgctgccccttccaggggttctaacaggatgggggtgggtctggcagaaggcagagttatctgaagcatgggggcaggagcagagcagacacagcagcaatggagtgtgcacccgcagggtgtggtgcctcacacctgtaatctcagcactttgggtggtcaaggcaggaagatacctcgaggccaggagtttgaaactagcctagacaacaaagcaagatctcatctgtactaaaaatttaaaaatttgccaggggcggtggcacatgcctgttgtcccagctgcttgggaggctgaggcaggaagctcgcttgagctcaggagttcaaggctgcagagagctaggatcacaccactgcactccagcctggacaacagagtgagaacctgtctttaaaataataataataataataaaaaaatagctgggtgcggtggctcatgcctgtaatcccagcactttgggaggccaaggcaggtggatcacctgaggctaggagttcgagaccagcttgggcaacatggcgaaaccccgtctctactaaaaatacaaaaaattagctgggcatggtggcgggcacctgtaatcccagctacttgggaggctgaggcaggagaatcacttgaacccgagaggtggaggttgcagtgaaccaagatcgcaccattgcaaccccacctgggcaacaagagggaaaccctgtctaaaaaaaaaaaaaaaaaaaaggatttattatgtgctcactgctggctcaggccccaacctctggccttttaagttacctagacttgagttctggcatccagagctaacaatcattcttcagatcacccacaccggatggaatctctagctattttatcagctaagaaaatcagggtaataacgaaaaagcagtagggcctggggctagcactgagttcagatccagctttcaggaggacagtggaaagagtgcagagcctctgcctaggccctgggccccacgaagcaggacaggcagagcccagggtactgttggcatctctgtccttcccttcaggacaccccttacctatctgcctcaaccagactgggtacaaaataaagatcaagtctcccggaaacc

SEQ ID NO: 11874 - DNA, 2628 bp, Homo sapiens
  source 1..2628: mol_type = unassigned DNA
ctctgagacacagccggaaaggctggcaggcaggagggctggggcgagcactggggggccatggagcgggcagaagagcccgtggtctatcagaagctgctgccctgggagccaagcttggagtcggaggaggaagtggaggaggaggagacatcagaggcgctggttctaaacccccggaggcaccaggactcttccaggaacaaggctggcgggctgcccggaacctgggcccgtgtagtggcagccctgctgctgctggctgttggctgctccctggctgtgaggcagctccagaatcagggcaggtcgacaggaagcttgggctctgtggcccctccacccggcggacactcccacggccctggcgtataccaccacggtgccatcatcagccctgcaggccgagagctgcttgttgccgggggcaacgtcgtggatgctggagttggagctgcattgtgcctggcagtggtgcatcctcatgccacggggctaggtgccatgttttggggcctcttccacgatagctcctcaggcaattccacggccctgacatcaggcccagcacagaccctggcccccggcctggggctgcccgcggctctgcccaccctgcacctgctgcatgcacgcttcggccgcctgccctggccacgcctgctagtgggccccaccacgctggctcaggagggcttcctggtggacacacccctggcaagggctctggtggctcggggcacagaaggcctctgtccactactttgccatgctgatgggacacccctgggcgctggggcccgagccaccaacccacaactggcagctgtgcttcgcagcgcagccctcgctcccacctcagaccttgctggggatgctctactgagtctactggcgggagacctgggggtggaggtgccctcggctgtgcccaggcccactttggaaccagcagagcagctacctgtgccccagggcatcctgttcaccacccccagtccctcagctggcccagaactgctggcactgttggaggcagccctgcgctccggggcgcccatccctgacccctgcccaccgttcctgcagactgctgtgagccccgagagcagtgccctggccgccgtggacagcagcggctctgtgctccttctcacctcctcgctcaactgctcctttggctctgcacacctgtccccaagcactggggttctgctcagcaacctggtggccaagtctaccactagtgcctgggcctgccccctcatcctccgtggcagcctggatgacacagaggctgatgtgttggggcttgtggcttcagggacccctgatgtggccagggccatgactcacaccctactcaggcatctggcagcaaggccccctacccaggcccagcaccagcatcagggtcagcaagaaccaacagagcatcccagcacttgtggccaagggaccctgctccaggtggcagcccacacagagcacgcccatgtctccagtgtcccccatgcctgctgccccttccaggggttctaacaggatgggggtgggtctggcagaaggcagagttatctgaagcatgggggcaggagcagagcagacacagcagcaatggagtgtgcacccgcagggtgtggtgcctcacacctgtaatctcagcactttgggtggtcaaggcaggaagatacctcgaggccaggagtttgaaactagcctagacaacaaagcaagatctcatctgtactaaaaatttaaaaatttgccaggggcggtggcacatgcctgttgtcccagctgcttgggaggctgaggcaggaagctcgcttgagctcaggagttcaaggctgcagagagctaggatcacaccactgcactccagcctggacaacagagtgagaacctgtctttaaaataataataataataataaaaaaatagctgggtgcggtggctcatgcctgtaatcccagcactttgggaggccaaggcaggtggatcacctgaggctaggagttcgagaccagcttgggcaacatggcgaaaccccgtctctactaaaaatacaaaaaattagctgggcatggtggcgggcacctgtaatcccagctacttgggaggctgaggcaggagaatcacttgaacccgagaggtggaggttgcagtgaaccaagatcgcaccattgcaaccccacctgggcaacaagagggaaaccctgtctaaaaaaaaaaaaaaaaaaaaggatttattatgtgctcactgctggctcaggccccaacctctggccttttaagttacctagacttgagttctggcatccagagctaacaatcattcttcagatcacccacaccggatggaatctctagctattttatcagctaagaaaatcagggtaataacgaaaaagcagtagggcctggggctagcactgagttcagatccagctttcaggaggacagtggaaagagtgcagagcctctgcctaggccctgggccccacgaagcaggacaggcagagcccagggtactgttggcatctctgtccttcccttcaggacaccccttacctatctgcctcaaccagactgggtacaaaataaagatcaagtctcccggaaacc

SEQ ID NO: 11875 - DNA, 1808 bp, Homo sapiens
  source 1..1808: mol_type = unassigned DNA
cccatccccatgtctgcccaagatgcacccgctgccaagaagccctttctccttggctgacttgtgctcctcttgctaaatcaaaccttttgggaaatattccctggggtctcttggggtccttgggcatccctctgtcccagccgtggctcaggacaccccccctctgcaggaacaaggctggcgggctgcccggaacctgggcccgtgtagtggcagccctgctgctgctggctgttggctgctccctggctgtgaggcagctccagaatcagggcaggtcgacaggaagcttgggctctgtggcccctccacccggcggacactcccacggccctggcgtataccaccacggtgccatcatcagccctgcagccacatgctcccacctaggccgagagctgcttgttgccgggggcaacgtcgtggatgctggagttggagctgcattgtgcctggcagtggtgcatcctcatgccacggggctaggtgccatgttttggggcctcttccacgatagctcctcaggcaattccacggccctgacatcaggcccagcacagaccctggcccccggcctggggctgcccgcggctctgcccaccctgcacctgctgcatgcacgcttcggccgcctgccctggccacgcctgctagtgggccccaccacgctggctcaggagggcttcctggtggacacacccctggcaagggctctggtggctcggggcacagaaggcctctgtccactactttgccatgctgatgggacacccctgggcgctggggcccgagccaccaacccacaactggcagctgtgcttcgcagcgcagccctcgctcccacctcagaccttgctggggatgctctactgagtctactggcgggagacctgggggtggaggtgccctcggctgtgcccaggcccactttggaaccagcagagcagctacctgtgccccagggcatcctgttcaccacccccagtccctcagctggcccagaactgctggcactgttggaggcagccctgcgctccggggcgcccatccctgacccctgcccaccgttcctgcagactgctgtgagccccgagagcagtgccctggccgccgtggacagcagcggctctgtgctccttctcacctcctcgctcaactgctcctttggctctgcacacctgtccccaagcactggggttctgctcagcaacctggtggccaagtctaccactagtgcctgggcctgccccctcatcctccgtggcagcctggatgacacagaggctgatgtgttggggcttgtggcttcagggacccctgatgtggccagggccatgactcacaccctactcaggcatctggcagcaaggccccctacccaggcccagcaccagcatcagggtcagcaagaaccaacagagcatcccagcacttgtggccaagggaccctgctccaggtggcagcccacacagagcacgcccatgtctccagtgtcccccatgcctgctgccccttccaggggttctaacaggatgggggtgggtctggcagaaggcagagttatctgaagcatgggggcaggagcagagcagacacagcagcaatggagtgtgcacccgcagggtgtggtgcctcacacctgtaatctcagcactttgggtggtcaaggcaggaagatacctcgaggccaggagtttgaaactagcctagacaacaaagcaagatctctgtccttcccttcaggacaccccttacctatctgcctcaaccagactgggtacaaaataaagatcaagtctcccgg

SEQ ID NO: 11876 - DNA, 2482 bp, Homo sapiens
  source 1..2482: mol_type = unassigned DNA
agtatcaaggttgtggcattaaggctgaactccttctcgacctcactgagctgtggccccttacaggcagtcaccccgggaaccctgtcgcgagagctcctcgggccttgtgtcctaatggggcaggctcacatgcagcctccttggccccgtgccctgcccagacctgttctggattccacccccacccttccccaaggtcgctgccacctcccacctgccaggcttgggcagggcctctgagacacagccggaaaggctggcaggcaggagggctggggcgagcactggggggccatggagcgggcagaagagcccgtggtctatcagaagctgctgccctgggagccaagcttggagtcggaggaggaagtggaggaggaggagacatcagaggcgctggttctaaacccccggaggcaccaggactcttccaggaacaaggctggcgggctgcccggaacctgggcccgtgtagtggcagccctgctgctgctggctgttggctgctccctggctgtgaggcagctccagaatcagggcaggtcgacaggaagcttgggctctgtggcccctccacccggcggacactcccacggccctggcgtataccaccacggtgccatcatcagccctgcaggccgagagctgcttgttgccgggggcaacgtcgtggatgctggagttggagctgcattgtgcctggcagtggtgcatcctcatgccacggggctaggtgccatgttttggggcctcttccacgatagctcctcaggcaattccacggccctgacatcaggcccagcacagaccctggcccccggcctggggctgcccgcggctctgcccaccctgcacctgctgcatgcacgcttcggccgcctgccctggccacgcctgctagtgggccccaccacgctggctcaggagggcttcctggtggacacacccctggcaagggctctggtggctcggggcacagaaggcctctgtccactactttgccatgctgatgggacacccctgggcgctggggcccgagccaccaacccacaactggcagctgtgcttcgcagcgcagccctcgctcccacctcagaccttgctggggatgctctactgagtctactggcgggagacctgggggtggaggtgccctcggctgtgcccaggcccactttggaaccagcagagcagctacctgtgccccagggcatcctgttcaccacccccagtccctcagctggcccagaactgctggcactgttggaggcagccctgcgctccggggcgcccatccctgacccctgcccaccgttcctgcagactgctgtgagccccgagagcagtgccctggccgccgtggacagcagcggctctgtgctccttctcacctcctcgctcaactgctcctttggctctgcacacctgtccccaagcactggggttctgctcagcaacctggtggccaagtctaccactagtgcctgggcctgccccctcatcctccgtggcagcctggatgacacagaggctgatgtgttggggcttgtggcttcagggacccctgatgtggccagggccatgactcacaccctactcaggcatctggcagcaaggccccctacccaggcccagcaccagcatcagggtcagcaagaaccaacagagcatcccagcacttgtggccaagggaccctgctccaggtggcagcccacacagagcacgcccatgtctccagtgtcccccatgcctgctgccccttccaggggttctaacaggatgggggtgggtctggcagaaggcagagttatctgaagcatgggggcaggagcagagcagacacagcagcaatggagtgtgcacccgcagggtgtggtgcctcacacctgtaatctcagcactttgggtggtcaaggcaggaagatacctcgaggccaggagtttgaaactagcctagacaacaaagcaagatctcatctgtactaaaaatttaaaaatttgccaggggcggtggcacatgcctgttgtcccagctgcttgggaggctgaggcaggaagctcgcttgagctcaggagttcaaggctgcagagagctaggatcacaccactgcactccagcctggacaacagagtgagaacctgtctttaaaataataataataataataaaaaaatagctgggtgcggtggctcatgcctgtaatcccagcactttgggaggccaaggcaggtggatcacctgaggctaggagttcgagaccagcttgggcaacatggcgaaaccccgtctctactaaaaatacaaaaaattagctgggcatggtggcgggcacctgtaatcccagctacttgggaggctgaggcaggagaatcacttgaacccgagaggtggaggttgcagtgaaccaagatcgcaccattgcaaccccacctgggcaacaagagggaaaccctgtctaaaaaaaaaaaaaaaaaaaa

SEQ ID NO: 11877 - DNA, 974 bp, Homo sapiens
  source 1..974: mol_type = unassigned DNA
attgaatgcagcaagggtctggaggctgaggaccaggcagacaaacattcagagttgctggaatgcgacagagacagggagtcagactggtcatgcaaggccagctctggggtctcggcaggtggtccgcgacatgacctccgagttcttctctgcccagctccgggcccagatctctgacgacaccactcacccgatctcctactacaagcccgagttctacatgccggatgacgggggcactgctcacctgtctgtggtcgcagaggacggcagtgctgtgtccgccaccagcaccatcaacctctactttggctccaaggtgcgctccccagtcagcgggatcctgctcaataatgaaatggatgacttcagctctaccagcatcaccaacgagtttggggtacccccctcacctgccaatttcatccagccagggaagcagccgctctcgtccatgtgcccgacgatcatggtgggccaggacggccaggtccggatggtggtgggagctgccgggggcacgcagatcaccatggccactgcactggccatcatctacaacctctggttcggctatgacgtgaagtgggccgtggaggagccccggctgcacaaccagcttctgcccaacgtcacgacagtggagagaaacattgaccaggaagtgactgcagccctggagacccggcaccatcacacccagatcacgtccaccttcattgctgtggtgcaagccatcgtccgcatggctggtggctgggcagctgcctcggactccaggaaaggtggggaacctgctggctactgattgctccaggcggacaaggctgacaagcaatccaggaacaaaatactcaccaggacgaggaagaggactttgggggacaggcttctcctgtgagcagcagagcagcacaataaatgaggccactgtgccaggctccaggtggcctccctggcctgtctcccca

SEQ ID NO: 11878 - DNA, 1025 bp, Homo sapiens
  source 1..1025: mol_type = unassigned DNA
gtcagactggtcatgcaaggtcctgggcctgcccttgggtcctggggagccacggaaggttgtgggtgccagagggttgtggtcagagccacagtcaggggccttctgagacctgtgccccctccccaccctccctccccacctccctaggccagctctggggtctcggcaggtggtccgcgacatgacctccgagttcttctctgcccagctccgggcccagatctctgacgacaccactcacccgatctcctactacaagcccgagttctacatgccggatgacgggggcactgctcacctgtctgtggtcgcagaggacggcagtgctgtgtccgccaccagcaccatcaacctctactttggctccaaggtgcgctccccagtcagcgggatcctgctcaataatgaaatggatgacttcagctctaccagcatcaccaacgagtttggggtacccccctcacctgccaatttcatccagccagggaagcagccgctctcgtccatgtgcccgacgatcatggtgggccaggacggccaggtccggatggtggtgggagctgccgggggcacgcagatcaccatggccactgcactggccatcatctacaacctctggttcggctatgacgtgaagtgggccgtggaggagccccggctgcacaaccagcttctgcccaacgtcacgacagtggagagaaacattgaccaggaagtgactgcagccctggagacccggcaccatcacacccagatcacgtccaccttcattgctgtggtgcaagccatcgtccgcatggctggtggctgggcagctgcctcggactccaggaaaggtggggaacctgctggctactgattgctccaggcggacaaggctgacaagcaatccaggaacaaaatactcaccaggacgaggaagaggactttgggggacaggcttctcctgtgagcagcagagcagcacaataaatgaggccactgtgccaggctccaggtggcctccctggcctgtctcccca

SEQ ID NO: 11879 - DNA, 1046 bp, Homo sapiens
  source 1..1046: mol_type = unassigned DNA
ctcgagagctgggctctgcgtcctcgtccagccgccaactcggccaaaggcgaagccagcagtttcttctgctgccgggcaacgcgccttttaaacctgagggagtgggcgcgtgagcacttaatggcgccggtgacagagtgagcttaacggattaataagcgcagccaggccagctctggggtctcggcaggtggtccgcgacatgacctccgagttcttctctgcccagctccgggcccagatctctgacgacaccactcacccgatctcctactacaagcccgagttctacatgccggatgacgggggcactgctcacctgtctgtggtcgcagaggacggcagtgctgtgtccgccaccagcaccatcaacctctactttggctccaaggtgcgctccccagtcagcgggatcctgctcaataatgaaatggatgacttcagctctaccagcatcaccaacgagtttggggtacccccctcacctgccaatttcatccagccagggaagcagccgctctcgtccatgtgcccgacgatcatggtgggccaggacggccaggtccggatggtggtgggagctgccgggggcacgcagatcaccatggccactgcactggccatcatctacaacctctggttcggctatgacgtgaagtgggccgtggaggagccccggctgcacaaccagcttctgcccaacgtcacgacagtggagagaaacattgaccaggaagtgactgcagccctggagacccggcaccatcacacccagatcacgtccaccttcattgctgtggtgcaagccatcgtccgcatggctggtggctgggcagctgcctcggactccaggaaaggtggggaacctgctggctactgattgctccaggcggacaaggctgacaagcaatccaggaacaaaatactcaccaggacgaggaagaggactttgggggacaggcttctcctgtgagcagcagagcagcacaataaatgaggccactgtgccaggctccaggtggcctccctggcctgtctcccca

SEQ ID NO: 11880 - DNA, 678 bp, Homo sapiens
  source 1..678: mol_type = unassigned DNA
atgacctctgagttcttcgctgcccagctccgggcccagatctctgacgacaccactcacccgatctcctactacaagcccgagttctacacgccggttgatgggggcactgctcacctgtctgtcgtcgcagaggacggcagtgctgtgtccgccaccagcaccatcaacctctactttggctccaaggtccgctccccggtcagcgagatcctgttcaatgatgaaatggatgacttcagctctcccaacatcaccaacgagtttggggtgcccccctcacctgccaatttcatccagccagggaagcagccgctctcgtcaatgtgcccgacgatcatggtgggccaggacggccaggtccggatggtggtgggagctgctgggggcacacagatcaccacagccactgcactggccatcatctacaacctctggttcggctatgacgtgaagcgggccgtggaggagccccggctgcacaaccagcttctgcccaacgtcacgacagtggagagaaacattgaccaggcagtgactgcagccctggagacccggcaccatcacacccagatcgcgtccaccttcatcgctgtggtgcaagccatcgtccgcacggctggtggctgggcagctgcctcggactccaggaaaggcggggagcctgccggctactga

SEQ ID NO: 11881 - DNA, 657 bp, Homo sapiens
  source 1..657: mol_type = unassigned DNA
atgacctctgagttcttcgctgcccagctccgggcccagatctctgacgacaccactcacccgatctcctactacaagcccgagttctacacgccggttgatgggggcactgctcacctgtctgtcgtcgcagaggacggcagtgctgtgtccgccaccagcaccatcaacctctactttggctccaaggtccgctccccggtcagcgagatcctgttcaatgatgaaatggatgacttcagctctcccaacatcaccaacgagtttggggtgcccccctcacctgccaatttcatccagccagggaagcagccgctctcgtcaatgtgcccgacgatcatggtgggccaggacggccagcccccaagccatgctgatcacactcccatgccccaggccatcatctacaacctctggttcggctatgacgtgaagcgggccgtggaggagccccggctgcacaaccagcttctgcccaacgtcacgacagtggagagaaacattgaccaggcagtgactgcagccctggagacccggcaccatcacacccagatcgcgtccaccttcatcgctgtggtgcaagccatcgtccgcacggctggtggctgggcagctgcctcggactccaggaaaggcggggagcctgccggctactga

SEQ ID NO: 11882 - DNA, 968 bp, Homo sapiens
  source 1..968: mol_type = unassigned DNA
attgaatgcggcaagggtctggaggctgaggaccaggcagacagacattcagagttgctggaacgcgacagagacagggagtcagactggtcatgcaaggccagctctggggtctcagcaggtggtccgcaacatgacctctgagttcttcgctgcccagctccggtcccagatctctgaccacaccactcacccgatctcctactacaagcccgagttctacacgccggatgacgggggcactgctcacctgtctgtcgtcgcagaggacggcagtgctgtgtccgccaccagcaccatcaacctctactttggctccaaggtctgctccccggtcagtgggatcctgttcaataatgaatggacgacttcagctctcccagcattcaccaatgagtttggggcacccccctcacctgccaatttcatccagccagggaagcagccgctcttgtccatgtgcccgacgatcatggtgggccaggacggccaggtccggatggtggtgggagctgctgggggcacgcagatcaccacagacactgcactggccatcatctacaacctctggttcggctatgacgtgaagagggccgtggaggagccccggctgcacaacaagcttctgcccaacgtcacgacagtggagagaaacattgaccaggcagtgactgcagccctggagacccggcaccatcacacccagatcgcatccaccttcatcgctgtggtgcaagccatcgtccgcacggctggtggctgggcagctgcctcggactccaggaaaggcggggaacctgctggctactgattgctccaggcagacaaggctgacaagcaatccagggacaagatactcaccaggatgaggaagaggactttgggggacgggcttcccctgtgagcagcagagcagcataataaatgaggccactgtgccaggctccaggtggcctccctggcctgtc

SEQ ID NO: 11883 - DNA, 873 bp, Homo sapiens
  source 1..873: mol_type = unassigned DNA
ccagctctggggtctcagcaggtggtccgcaacatgacctctgagttcttcgctgcccagctccggtcccagatctctgaccacaccactcacccgatctcctactacaagcccgagttctacacgccggatgacgggggcactgctcacctgtctgtcgtcgcagaggacggcagtgctgtgtccgccaccagcaccatcaacctctactttggctccaaggtctgctccccggtcagtgggatcctgttcaataatgaatggacgacttcagctctcccagcattcaccaatgagtttggggcacccccctcacctgccaatttcatccagccagggaagcagccgctcttgtccatgtgcccgacgatcatggtgggccaggacggccaggtccggatggtggtgggagctgctgggggcacgcagatcaccacagacactgcactggccatcatctacaacctctggttcggctatgacgtgaagagggccgtggaggagccccggctgcacaacaagcttctgcccaacgtcacgacagtggagagaaacattgaccaggcagtgactgcagccctggagacccggcaccatcacacccagatcgcatccaccttcatcgctgtggtgcaagccatcgtccgcacggctggtggctgggcagctgcctcggactccaggaaaggcggggaacctgctggctactgattgctccaggcagacaaggctgacaagcaatccagggacaagatactcaccaggatgaggaagaggactttgggggacgggcttcccctgtgagcagcagagcagcataataaatgaggccactgtgccaggctccaggtggcctccctggcctgtctcccc

SEQ ID NO: 11884 - DNA, 3666 bp, Homo sapiens
  source 1..3666: mol_type = unassigned DNA
ggaaacgccttgcggggcagtgtgggagggagaagtccagggcggacaggctgggcgcacccgtgctcgcgcaccccaagatggctgagaggcaggaagagcagagagggagcccgcccttgagggcggaaggcaaggccgacgcggaggttaagctcattctgtaccattggacgcattcgttcagctctcaaaaggtgcgcttggtaattgctgaaaaggcattgaagtgcgaggaacatgatgtaagtctgcccttgagtgagcacaatgagccttggtttatgcgtttgaactcaactggagaagtgcctgtccttatccacggggaaaacataatttgtgaggccactcagatcattgattatcttgaacagactttcctggatgaaagaacacccaggttaatgcctgataaagaaagcatgtattacccacgggtacaacattaccgagagctgcttgactccttgccaatggatgcctatacacatggctgcattttacatcctgagttaactgtggactccatgatcccggcttatgcaactacaaggattcgtagccaaattggaaacacagagtctgagctgaagaaacttgctgaagaaaacccagatttacaagaagcatacattgcaaaacagaaacgacttaaatcaaagctgcttgatcatgacaatgtcaagtatttgaagaaaattcttgatgagttggagaaagtcttggatcaggttgaaactgaattgcaaagaagaaatgaagaaaccccagaagagggccagcaaccttggctctgcggtgaatccttcaccctggcagacgtctcactcgctgtcacattgcatcgactgaagttcctggggtttgcaaggagaaactggggaaacggaaagcgaccaaacttggaaacctattacgagcgtgtcttgaagagaaaaacatttaacaaggttttaggacatgtcaacaatatattaatctctgcagtgctgccaacagcattccgggtggccaagaaaagggccccaaaagttcttggcacgacccttgtggttggtttgcttgcaggagtgggatattttgcttttatgcttttcagaaagaggcttggcagcatgatattagcatttagacccagaccaaattatttctaggtttgttgggatcttgtcgtggcagctcatccaagcatttagctagaccctgtgattgcccgtggctctctgagtctgtcttattgagtagttagcagtattttttcctaaaattcagaagtcatctttgttacacaacacaggggttcaggtagcaataggacacaaaattgctttattctacaactgccagctccaggcagaaataggaaggcaaagagataagagaaggaaaaatgagagaatgaagtctgtatagggtagagcaatagaaagtaagcttcgggtgcctccaacgttcatggctgcctgtctcattggtaaacctcacatttagttacttgtggctactgcccacacatacacttctgtaattgagaactcttaggagaggactagggaatcactggggatagtgggctggagagaaccccaggctttatatgtatactttgacctcagtgttaattttaaatgcttatgaatcacacacattgctttagtaagattaagtgcttatatactagaaatttgatgctcattggaacacatctgcctagcatttctgtaaaagtcttaagtgatattaagatgattccttaccatttcagatggtccgcaatttgaattaccaagtggtaatggttccttactgttttagatggtgcctgtgagataccattcctctggatggtcatgtccagtcagtgggaggtagaaagggtggcatctgtagccctcttcatacacataagtggcatttaggtgaatgtcccagctaatcactagcatgtctaggtattggctgggtagtgggtattttgatgatctgggagcaccaaatatgttcattcttcgtttggggaggctggtctgtaaacacaaaaattgttgtccagatctttcatctgtttatgatcatcaacaaagacttgttagaaaggtctagtcttagcacttggcagttaatctagggaagatgaattaaatgggtagatagtgatgcatacctgtattcactgatgtatgtttaagggatttgggggggatacctcagttcatgtggaagggacagtctcggtgtgtcccatgaataaccttggaactgcaacaaatggtttgtgctcagaaaaagtctttcatggtgacaggaagacagtttccctggagctggccatgaaggccttagaagccatttctggtgtctggtgggtagcaggcatagagatgatgtgccgaggtcccagtgaacaacagtagccaaagaatgtactaactttatcattaataggaaagtcatacctaggaaacaatgactttttgatggcaaaatgattttttaattctattttgatgctgtaattccatttcatgacctagttgtattagaaaaccttgatgaactatatgttcccgatttacaaaaaaattaataaaacctccagagtaaactcagtcaaacaataattgagtagcagcttttataacatttaaaatttgcacatgagtgtgttgtcatatggagtgtctgaatctgttgctgggacataccaatccatgtattcattagagccatagaagttattattcattagttcatagtgtttgagttctttatgtcactctgttagaaacaagaactgagtcgtgaagaaataagaattggatttttataaaaacctctgaaggatatttacctatgaaaaagttgttaagaataaaaattagaagtccatggttaacttttccttcaatttatattattcctgaatcatagggaatctttctagaatgtgtttataatttccttgtacagtttctttggaaatacgttaaagatagtggcaatttcatatatttcatggatacttgagtttgtgcttttaaggtgtttgtttagggatacaatgaccactagatgtcgctgtttatccagtagactaagattgagtgttctttttgttcagcaactcttctaaaatgtttcaagcaaagatagtaatgacctcagtttctgaaataagggcatcttcatcagattattcttctgttttaaaaaaaagcttgaggcaaatgtgagtgatttccagtgctttgaaagggattacagtatcacacaatgtcaagctagagttaaacacagtattagctaaataggcacttatgtgtattttctttttcatgattatcggtgactggtcagtgtactcatcaatttccaaaatttgtataaatatcacaattagaaaaatgcctgaggtactaaagttatgttggctttttgtgtcttaacacacataaatactattgttattgcagcagatgccttttgaatccattttccataattgcggatagtcataaattgcttgctcaatttttagtaattattgctgttgacaccagcgttgtagatttttggtgttgttgaatgcagtagagagaccaagacactattctgtaagatcaataaaagtaattggaaaataaatatgaaccctaaaacaaa

SEQ ID NO: 11885 - DNA, 1228 bp, Homo sapiens
  source 1..1228: mol_type = unassigned DNA
ccagggcggacaggctgggcgcacccgtgctcgcgcaccccaagatggctgagaggcattgaagtgcgaggaacatgatgtaagtctgcccttgagtgagcacaatgagccttggtttatgcgtttgaactcaactggagaagtgcctgtccttatccacggggaaaacataatttgtgaggccactcagatcattgattatcttgaacagactttcctggatgaaagaacacccaggttaatgcctgataaagaaagcatgtattacccacgggtacaacattaccgagagctgcttgactccttgccaatggatgcctatacacatggctgcattttacatcctgagttaactgtggactccatgatcccggcttatgcaactacaaggattcgtagccaaattggaaacacagagtctgagctgaagaaacttgctgaagaaaacccagatttacaagaagcatacattgcaaaacagaaacgacttaaatcaaagctgcttgatcatgacaatgtcaagtatttgaagaaaattcttgatgagttggagaaagtcttggatcaggttgaaactgaattgcaaagaagaaatgaagaaaccccagaagagggccagcaaccttggctctgcggtgaatccttcaccctggcagacgtctcactcgctgtcacattgcatcgactgaagttcctggggtttgcaaggagaaactggggaaacggaaagcgaccaaacttggaaacctattacgagcgtgtcttgaagagaaaaacatttaacaaggttttaggacatgtcaacaatatattaatctctgcagtgctgccaacagcattccgggtggccaagaaaagggccccaaaagttcttggcacgacccttgtggttggtttgcttgcaggagtgggatattttgcttttatgcttttcagaaagaggcttggcagcatgatattagcatttagacccagaccaaattatttctaggtttgttgggatcttgtcgtggcagctcatccaagcatttagctagaccctgtgattgcccgtggctctctgagtctgtcttattgagtagttagcagtattttttcctaaaattcagaagtcatctttgttacacaacacaggggttcaggtagcaataggacacaaaattgctttattctacaactgccagctccaggcagaaataggaaggcaaagagataagagaaggaaaaa

SEQ ID NO: 11886 - DNA, 1652 bp, Homo sapiens
  source 1..1652: mol_type = unassigned DNA
atgggggactggaacttattgggtggcatcctagaggaagttcactcccactcaaccatagtggggaaaatctggctgaccatcctcttcatcttccgaatgctggtacttcgtgtggctgctgaggatgtctgggatgatgaacagtcagcatttgcctgcaacacccggcagccaggttgcaacaatatctgttatgatgatgcattccctatctctttgatcaggttctgggttttacagatcatctttgtgtcttctccttctttggtctatatgggccatgcactttataggctcagggcctttgagaaagacaggcagaggaaaaagtcacaccttagagcccagatggagaatccagatcttgacttggaggagcagcaaagaatagatagggaactgaggaggttagaggagcagaagaggatccataaagtccctctgaaaggatgtctgctgcgtacttatgtcttacacatcttgaccagatctgtgctggaagtaggattcatgataggccaatatattctctatgggtttcaaatgcaccccctttacaaatgcactcaacctccttgccccaatgcggtggattgctttgtatccaggcccactgagaagacaattttcatgctttttatgcacagcattgcagccatttccttgttactcaatatactggaaatatttcatctaggcatcagaaaaattatgaggacactttataagaaatccagcagtgagggcattgaggatgaaacaggccctccattccatttgaagaaatattctgtggcccagcagtgtatgatttgctcttcattgcctgaaagaatctctccacttcaagctaacaatcaacagcaagtcattcgagttaatgtgccaaagtctaaaaccatgtggcaaatcccacagccaaggcaacttgaagtagacccttccaatgggaaaaaggactggtctgagaaggatcagcatagcggacagctccatgttcacagcccgtgtccctgggctggcagtgctggaaatcagcacctgggacagcaatcagaccattcctcatttggcctgcagaatacaatgtctcagtcctggctaggtacaactacggctcctagaaactgtccatcctttgcagtaggaacctgggagcagtcccaggacccagaaccctcaggtgagcctctcacagatcttcatagtcactgcagagacagtgaaggcagcatgagagagagtggggtctggatagacagatctcgcccaggcagtcgcaaggccagctttctgtccagattgttgtctgaaaagcgacatctgcacagtgactcaggaagctctggttctcggaatagctcctgcttggattttcctcactgggaaaacagcccctcacctctgccttcagtcactgggcacagaacatcaatggtaagacaggcagccctaccgatcatggaactatcacaagagctgttccattctggatgctttctttttcctttctttcttcctggggtgtgtatgtatgtttgtgttgacagagaggcagatggagggggagattatttatggagagataaaattattcattcgatacattcagttaaattcaattcataaaatagacttagaaaaatctt

SEQ ID NO: 11887 - DNA, 5211 bp, Homo sapiens
  source 1..5211: mol_type = unassigned DNA
cactggggctgcagggatggcgatcagggcggggaggtcgggccctggcgcggggcgcacgcgtgaagcagcaccgcacgtgtgaaaggaattcttttcagagcggccgggagccctgctccggaggaacgcacccgggtcgccgccgcggcagagcggggttaggaatctgaagcaatgggcgactggagctttctgggaagactcttagaaaatgcacaggagcactccacggtcatcggcaaggtttggctgaccgtgctgttcatcttccgcatcttggtgctgggggccgcggcggaggacgtgtggggcgatgagcagtcagacttcacctgcaacacccagcagccgggctgcgagaacgtctgctacgacagggccttccccatctcccacatccgcttctgggcgctgcagatcatcttcgtgtccacgcccaccctcatctacctgggccacgtgctgcacatcgtgcgcatggaagagaagaagaaagagagggaggaggaggagcagctgaagagagagagccccagccccaaggagccaccgcaggacaatccctcgtcgcgggacgaccgcggcagggtgcgcatggccggggcgctgctgcggacctacgtcttcaacatcatcttcaagacgctgttcgaggtgggcttcatcgccggccagtactttctgtacggcttcgagctgaagccgctctaccgctgcgaccgctggccctgccccaacacggtggactgcttcatctccaggcccacggagaagaccatcttcatcatcttcatgctggcggtggcctgcgcgtccctgctgctcaacatgctggagatctaccacctgggctggaagaagctcaagcagggcgtgaccagccgcctcggcccggacgcctccgaggccccgctggggacagccgatcccccgcccctgccccccagctcccggccgcccgccgttgccatcgggttcccaccctactatgcgcacaccgctgcgcccctgggacaggcccgcgccgtgggctaccccggggccccgccaccagccgcggacttcaaactgctagccctgaccgaggcgcgcggaaagggccagtccgccaagctctacaacggccaccaccacctgctgatgactgagcagaactgggccaaccaggcggccgagcggcagcccccggcgctcaaggcttacccggcagcgtccacgcctgcagcccccagccccgtcggcagcagctccccgccactcgcgcacgaggctgaggcgggcgcggcgcccctgctgctggatgggagcggcagcagtctggaggggagcgccctggcagggacccccgaggaggaggagcaggccgtgaccaccgcggcccagatgcaccagccgcccttgcccctcggagacccaggtcgggccagcaaggccagcagggccagcagcgggcgggccagaccggaggacttggccatctagtgcccgggtgcctgcctccagacagctgtgtagtgatctttttcttagaaaccaaaaccaaagtgcacttcccaccagcagatagaacctgaaagtcccaggaggtgggagcgactggagtcccaggaggtggacgatggaggagagatcaggtttccgtgttcaatgcttgctgttcttagcactgtgagttacagtggggataactcccactttctgagtttgggggtggcggggacaagggttgtgggcctttaagatcttcacagcagcccagaaatctggtcgctgagggctgtctctgggggtaactgttctgtagtggtaaagcaacaggtatcctgcagtccctttagctcctgggcaattgggtttgctattcctaagctctccagagcctctgggcggcccagagggtcttagctctgggccagagcacttagctctatctctttgatacttttaacttagagttgaatttcatttgggatatttgccaaactgcactaaaaaaagatttacagcaagtctatgtagtgtcatttgagtttccgaaattgcatgtgaagcccaggatatcaagcttcaggcctcatgacaagtgacaaagagcagttgccctccagaggcaggctcagtgggcaagggccccagaggttgctggcagaaggcaggtggaaacgcagccacgcctgaggccatttttaaacagttgaggaaattgacataaaagtgtgtcgggtatgccgtaggtatttattttctaaatgattattttgtgctttgaatggtgcagctatgcctattttctcccactttctttcaggaaaaatgaaagaaaaatagtgtttttctttctttaaatactgttagaatgattgctgaccaagacagtgctaatttgccctaatgcatgctactagcatctttactaaagattttgaactttcttgtaaaagaaattctttaatttcatgagtcacctaattataatgagaatgtattatataaaacaaaagcaggggaaagttttaagtgcattcaaatagaagttctgaagattttgaatgggaagtgaaaagtgaactactgttgccaggaaaattatttatacagatgaatctatgacaatctacacttttaaaaagtacagaataaaacacttcaagcttcctaatcattctttgtgggcagcctgtttgctttctccagtgtaaataatataagtgtctggggatccctgcctgggggagggcgcgtgctcatgcaggctgtatgccccattctgcctccacaccagagctgtcctgacagggaaggctatttatgtgtgtgggcatggctggaagacggcagaattttctgtcctgcacacacagctgtagtatcttggtcaccatttgtttataaaatgaacgatggtcatgttgagcctgtttctactcacacttttcacctccaacttctactgagtatcattagcccttgttcagcgagaccaatgtaatacatttctttttataaattaacttctcgatgatgcatttgggaccacactccaaacatactttctgttttctatcataaagggtgctccactaacaatctgatgaaaggaatgcaatttccaagtctcagattcttgcatgcaactagtttttcatgtcagtcaaacacaaagaatttgttagtacattctgcttgctgtaggatgcactggacaggctcctaggcttgaaaaatgctaacttttccatacgtctcctcagagactttctcaaccagattgacaagagagaaattagccctttggaaaactgtgagtgactttctcactcctctccaggctggtgcataactacagccattctagatgcataacttctctccgaagttcactcattacatgcagtgtatgccataggcctagggcagcaggacttagttcttgtgagtgataagggctgctagaagatcctagtgtgagaagcattccgataaaaagctttggccattttagaaaatgcaatagcaatcatccaagagcacaagtacagctcaagtacaagtggatgtcaatacttggttctttaagttctaccataataaatgttcataacagtaacaagcttcttatttacccacaatttgattttgagtggggttggagatgagcatgagaactcaaattgtatctagtttttacattttaaaattgaatttagtcacaatatgtttatggaaatgccagtattgtaccattgaccatagtctagtgggtccatttagagtggataggagtgtagaattagattcacctacttgaaaatcactaatctataaagaagtgaggttttgcaatagaacagtgcctgtggtgttttttcaggttagcatactgatttcagttcatgtaagaaatgaacgcatgtttcacatccttttgctctttgaggtatccatgattctaaaggctgggtccttctctctcaggcagtgtggaattgttctctactcaactagtcctttaagacattgaaacatgcaataaaaatagaaattgcctctctctgtgggcaagattccagacctatttttttctagcctggaaatttcactgaaactattttgttcttgattcattagaaagttttaaaaaatctctaagcctattttaaaactcaaatgctatacctatagcatttgagtattatatttacatacatggtttttaagctgctgtatacaattacttcttatatccctgtttttataaaatgttaaacatcactatagttacagtaccaaaaatcattttttaaattctaaaactattacttatattatcactcactttctcctttttaaacttttaatggttattcttgtattttttaataaaattgacacgaataaatccttaaatttacaaaagaaaaatagcaagccagcatctttctcatttatcctggatttcttcggctctggacaagtaagtggataggtcatagaattcctacacaagaatacctggactaataactatgaatataatttaaacatcactttacaaaaaattaatccaatagggtttaggtctcctttcacgttaggctttttaaaaagtattattaacactttctttattttgtattactgaataaactccttttttctgaattttttgaacttctgatatttgtaacactaattcatgaatctccaccaaaataaatacttatagagagtattgcatgatttaagagagtaaatgtgttttccaaagatgaatagagtcctgccaccatcaccacccgccacccctacaaattgaggatatcctaaataacctttaatatagcatatggacattgtacatttaaggtcagggaaggcacttttcttcctaattttatattacagtgcaaatcttgggttgactcactttaaggtttctgactgcccaaaatattttttcccctttacgttacagaacattataataaggcaaacaagttagggatttgaataacactcaaagcaacaaactgtttccagaaagtaccatatttgaagctgtttggtgtgtaaatgttcatttagctcatgtatttacaaaactcttactaaaacttaatttttgtgccataacagtgtctttcctggattacattgtaactggaagtaagcattttctaaaataataaaagtgcccttaagtttaaa

SEQ ID NO: 11888 - DNA, 1622 bp, Homo sapiens
  source 1..1622: mol_type = unassigned DNA
cagcagggctcccgcgggcgtcactccggccatcgtccccacctccacctgggccgcccggcaggcaggcgacggaggcccgggagccatgggtgactggggcttcctggagaagttgctggaccaggtccaggagcactcgaccgtggtgggtaagatctggctgacggtgctcttcatcttccgcatcctcatcctgggcctggccggcgagtcagtgtggggtgacgagcaatcagatttcgagtgtaacacggcccagccaggctgcaccaacgtctgctatgaccaggccttccccatctcccacatccgctactgggtgctgcagttcctcttcgtcagcacacccaccctggtctacctgggccatgtcatttacctgtctcggcgagaagagcggctgcggcagaaggagggggagctgcgggcactgccggccaaggacccacaggtggagcgggcgctggcggccgtagagcgtcagatggccaagatctcggtggcagaagatggtcgcctgcgcatccgcggagcactgatgggcacctatgtcgccagtgtgctctgcaagagtgtgctagaggcaggcttcctctatggccagtggcgcctgtacggctggaccatggagcccgtgtttgtgtgccagcgagcaccctgcccctacctcgtggactgctttgtctctcgccccacggagaagaccatcttcatcatcttcatgttggtggttggactcatctccctggtgcttaacctgctggagttggtgcacctgctgtgtcgctgcctcagccgggggatgagggcacggcaaggccaagacgcacccccgacccagggcacctcctcagacccttacacggaccaggtcttcttctacctccccgtgggccaggggccctcatccccaccatgccccacctacaatgggctctcatccagtgagcagaactgggccaacctgaccacagaggagaggctggcgtcttccaggccccctctcttcctggacccaccccctcagaatggccaaaaacccccaagtcgtcccagcagctctgcttctaagaagcagtatgtatagaggcctgtggcttatgtcacccaacagaggggtcctgagaagtctggctgcctgggatgccccctgccccctcctggaaggctctgcagagatgactgggctggggaagcaggtgcttgctggccatggagcctcattgcaagttgttcttgaacacctgaggccttcctggtgcccaccaggcactacggcttcctctccagaatgtggctttgcctgagcacagacagagtcagcatggaatgctcttggccaagggtactgggggccctctggccttttgcagctgatccagaggaacccagagccaacttaccccaacctcaccctatggaacagtcacctgtgcgcaggttgtcctcaaaccctctcctcacaggaaaaggcggattgaggctgctgggtcagccttgatcgcacagacagagcttgtgccggatttggccctgtcaaggggactggtgccttgttttcatcactccttcctagttctactgttcaagcttctgaaataaacaggacttgatcacaa

SEQ ID NO: 11889 - DNA, 1059 bp, Homo sapiens
  source 1..1059: mol_type = unassigned DNA
agcagggctcccgcgggcgtcactccggccatcgtccccacctccacctgggccgcccggcaggcaggcggtagaacgggcgtggcagacctccctgcaggcttgttgctgggcgaacgagaaggatgccatgctgacacactgacgtgctctgtctccttgcagacggaggcccgggagccatgggtgactggggcttcctggagaagttgctggaccaggtccaggagcactcgaccgtggtgggtaagatctggctgacggtgctcttcatcttccgcatcctcatcctgggcctggccggcgagtcagtgtggggtgacgagcaatcagatttcgagtgtaacacggcccagccaggctgcaccaacgtctgctatgaccaggccttccccatctcccacatccgctactgggtgctgcagttcctcttcgtcagcacacccaccctggtctacctgggccatgtcatttacctgtctcggcgagaagagcggctgcggcagaaggagggggagctgcgggcactgccggccaaggacccacaggtggagcgggcgctggcggccgtagagcgtcagatggccaagatctcggtggcagaagatggtcgcctgcgcatccgcggagcactgatgggcacctatgtcgccagtgtgctctgcaagagtgtgctagaggcaggcttcctctatggccagtggcgcctgtacggctggaccatggagcccgtgtttgtgtgccagcgagcaccctgcccctacctcgtggactgctttgtctctcgccccacggagaagaccatcttcatcatcttcatgttggtggttggactcatctccctggtgcttaacctgctggagttggtgcacctgctgtgtcgctgcctcagccgggggatgagggcacggcaaggccaagacgcacccccgacccagggcacctcctcagacccttacacggaccaggtcttcttctacctccccgtgggccaggggccctcatccccaccatgccccacctacaatgggctctcatccagtgagcagaactgggcca

SEQ ID NO: 11890 - DNA, 1029 bp, Homo sapiens
  source 1..1029: mol_type = unassigned DNA
atgggtgactggggcttcctggagaagttgctggaccaggtccaggagcactcgaccgtggtgggtaagatctggctgacggtgctcttcatcttccgcatcctcatcctgggcctggccggcgagtcagtgtggggtgacgagcaatcagatttcgagtgtaacacggcccagccaggctgcaccaacgtctgctatgaccaggccttccccatctcccacatccgctactgggtgctgcagttcctcttcgtcagcacacccaccctggtctacctgggccatgtcatttacctgtctcggcgagaagagcggctgcggcagaaggagggggagctgcgggcactgccggccaaggacccacaggtggagcgggcgctggcggccgtagagcgtcagatggccaagatctcggtggcagaagatggtcgcctgcgcatccgcggagcactgatgggcacctatgtcgccagtgtgctctgcaagagtgtgctagaggcaggcttcctctatggccagtggcgcctgtacggctggaccatggagcccgtgtttgtgtgccagcgagcaccctgcccctacctcgtggactgctttgtctctcgccccacggagaagaccatcttcatcatcttcatgttggtggttggactcatctccctggtgcttaacctgctggagttggtgcacctgctgtgtcgctgcctcagccgggggatgagggcacggcaaggccaagacgcacccccgacccagggcacccctcagacccttacacggaccaggtcttcttctacctccccgtgggccaggggccctcatccccaccatgccccacctacaatgggctctcatccagtgagcagaactgggccaacctgaccacagaggagaggctggcgtcttccaggccccctctcttcctggacccaccccctcagaatggccaaaaacccccaagtcgtcccagcagctctgcttctaagaagcagtatgtatagaggcctgtggcttatgtcacccaacaga

SEQ ID NO: 11891 - DNA, 3177 bp, Homo sapiens
  source 1..3177: mol_type = unassigned DNA
attaaaaagacggtggaagaggaacaactgacaggctcaagagcaaaaagcgtgggcagttggagaagaagcagccagagtgtgaagaagcccacggaaggaaagtccagggaggaggaaaagaagcagaagttttggcatctgttccctggctgtgccaagatgggcgattggagcttcctgggaaatttcctggaggaagtacacaagcactcgaccgtggtaggcaaggtctggctcactgtcctcttcatattccgtatgctcgtgctgggcacagctgctgagtcttcctggggggatgagcaggctgatttccggtgtgatacgattcagcctggctgccagaatgtctgctacgaccaggctttccccatctcccacattcgctactgggtgctgcagatcatcttcgtctccacgccctctctggtgtacatgggccacgccatgcacactgtgcgcatgcaggagaagcgcaagctacgggaggccgagagggccaaagaggtccggggctctggctcttacgagtacccggtggcagagaaggcagaactgtcctgctgggaggaagggaatggaaggattgccctccagggcactctgctcaacacctatgtgtgcagcatcctgatccgcaccaccatggaggtgggcttcattgtgggccagtacttcatctacggaatcttcctgaccaccctgcatgtctgccgcaggagtccctgtccccacccggtcaactgttacgtatcccggcccacagagaagaatgtcttcattgtctttatgctggctgtggctgcactgtccctcctccttagcctggctgaactctaccacctgggctggaagaagatcagacagcgatttgtcaaaccgcggcagcacatggctaagtgccagctttctggcccctctgtgggcatagtccagagctgcacaccaccccccgactttaatcagtgcctggagaatggccctgggggaaaattcttcaatcccttcagcaataatatggcctcccaacaaaacacagacaacctggtcaccgagcaagtacgaggtcaggagcagactcctggggaaggtttcatccaggttcgttatggccagaagcctgaggtgcccaatggagtctcaccaggtcaccgccttccccatggctatcatagtgacaagcgacgtcttagtaaggccagcagcaaggcaaggtcagatgacctatcagtgtgaccctcctttatgggaggatcaggaccaggtgggaacaaaggaggctcagagaagaaagacgtgtcccttctgaactgatgctttctcactgtcatcactgcttggctcctttgagccccgggtctcaatgacgttgctcattaattctagaaactataaccagggctctgggatagtaagagaggtgacaacccacccagactgcagttccctccccaccctctacccagtatacgaagcctttcagattactcatgaaacagggtagagggaaagaagggaagcatggcaaaagctggcctggaagggatagccagagggatagaatgactctctctctacataccagcagcataccaaatgcgttctctaagttcctacctccttgacctgatcaccctccctcctccaaggaagagctcaaagttcccagccaatagacagcatgaatcaaggaacttgcattatatgtgctcttgaatctgttgtctccatggaccattcctcggagtagtggtgagatggccttgggttgcccttggcttctcctccctctactcagccttaaaaagggcttcttggaactttaccagcagcctcagctttacaaatgccttggtatgtacctctggcaaatgccccaccttggtgatgttgcaacctttccttctgctagggtgtacacctagcctgtgcaggtgtcagccctgctagggagtcactgtacacacaaactctactggaattcctgccaacatctgtcaccctgcagctcctttacagttcaatccaatgatagaaaccatcccttccctttctcccttggctgttcacccagccattccctgaaggccttaccaacaggaatatccaagaagctgttgtcccctctcgaaccctgaccagatcatcagccactgaggccagtggaatttccccaggccttgttaaaacaaagaaagcattgtacctctcagattccccttgtggaaaaaaaaattctgctgtgaagatgaaaataaaaatggagagaaaacactggaaaactattttcccctcctatttacttcctttgctgactgccaacttagtgccaagaggaggtgtgatgacagctatggaggcccccagatctctctctcctggaggctttagcaggggcaaggaaatagtaggggaatctccagctctcttggcagggcctttatttaaagagcgcagagattcctatgtctccctagtgcccctaatgagactgccaagtgggggctgtagaaaagccttgccttccccagggattggcctggtctctgtattcactggatccataatgggttgctgttgttttggatgaaggtaaacgatgcttggaattggaaactgagacttatagagggattattacattattaaaatgcacgtgtgtgtgtgtgtgggtgctgatgggatgggtaaaggcttggggagtcctgaaataaggaaaggaaaccacagagaaacttgtgtcttcctgctctcctctccggctgcctggcagttattaacctaaacagatagccacaagaggttgggacagaggagggtaaaggctcagaaggaggttcaacctctgactcacctgcccatctctgggccctctgctgacacttggatgctattgttgggtggaaagataaatgagagtggagaggtggaggaaagtgactaggatgccatttaggaaggaatgtctgatcatcccgggtccctggaggggacaccttttaatctattgcctagcattaatattttctctccttctatctctgaaatgttttatgaaatgagtgttcttgaattagaaattctgtgggatcaatctttgatggtgagggttttagaaaggaaaaatatagtaaaatgtgtaatttgtcttaataaaatctatctctacatcta

SEQ ID NO: 11892 - DNA, 2153 bp, Homo sapiens
  source 1..2153: mol_type = unassigned DNA
ccattttcaaacagtccctcctgggagaacacagacaggcagaggattacaacacaaggcagcaagcactgggagacgaaagttttggcatctgttccctggctgtgccaagatgggcgattggagcttcctgggaaatttcctggaggaagtacacaagcactcgaccgtggtaggcaaggtctggctcactgtcctcttcatattccgtatgctcgtgctgggcacagctgctgagtcttcctggggggatgagcaggctgatttccggtgtgatacgattcagcctggctgccagaatgtctgctacgaccaggctttccccatctcccacattcgctactgggtgctgcagatcatcttcgtctccacgccctctctggtgtacatgggccacgccatgcacactgtgcgcatgcaggagaagcgcaagctacgggaggccgagagggccaaagaggtccggggctctggctcttacgagtacccggtggcagagaaggcagaactgtcctgctgggaggaagggaatggaaggattgccctccagggcactctgctcaacacctatgtgtgcagcatcctgatccgcaccaccatggaggtgggcttcattgtgggccagtacttcatctacggaatcttcctgaccaccctgcatgtctgccgcaggagtccctgtccccacccggtcaactgttacgtatcccggcccacagagaagaatgtcttcattgtctttatgctggctgtggctgcactgtccctcctccttagcctggctgaactctaccacctgggctggaagaagatcagacagcgatttgtcaaaccgcggcagcacatggctaagtgccagctttctggcccctctgtgggcatagtccagagctgcacaccaccccccgactttaatcagtgcctggagaatggccctgggggaaaattcttcaatcccttcagcaataatatggcctcccaacaaaacacagacaacctggtcaccgagcaagtacgaggtcaggagcagactcctggggaaggtttcatccaggttcgttatggccagaagcctgaggtgcccaatggagtctcaccaggtcaccgccttccccatggctatcatagtgacaagcgacgtcttagtaaggccagcagcaaggcaaggtcagatgacctatcagtgtgaccctcctttatgggaggatcaggaccaggtgggaacaaaggaggctcagagaagaaagacgtgtcccttctgaactgatgctttctcactgtcatcactgcttggctcctttgagccccgggtctcaatgacgttgctcattaattctagaaactataaccagggctctgggatagtaagagaggtgacaacccacccagactgcagttccctccccaccctctacccagtatacgaagcctttcagattactcatgaaacagggtagagggaaagaagggaagcatggcaaaagctggcctggaagggatagccagagggatagaatgactctctctctacataccagcagcataccaaatgcgttctctaagttcctacctccttgacctgatcaccctccctcctccaaggaagagctcaaagttcccagccaatagacagcatgaatcaaggaacttgcattatatgtgctcttgaatctgttgtctccatggaccattcctcggagtagtggtgagatggccttgggttgcccttggcttctcctccctctactcagccttaaaaagggcttcttggaactttaccagcagcctcagctttacaaatgccttggtatgtacctctggcaaatgccccaccttggtgatgttgcaacctttccttctgctagggtgtacacctagcctgtgcaggtgtcagccctgctagggagtcactgtacacacaaactctactggaattcctgccaacatctgtcaccctgcagctcctttacagttcaatccaatgatagaaaccatcccttccctttctcccttggctgttcacccagccattccctgaaggccttaccaacaggaatatccaagaagctgttgtcccctctcgaaccctgaccagatcatcagccactgaggccagtggaatttccccaggccttgttaaaacaaagaaagca

SEQ ID NO: 11893 - DNA, 891 bp, Homo sapiens
  source 1..891: mol_type = unassigned DNA
actgacaggctcaagagcaaaaagcgtgggcagttggagaagaagcagccagagtgtgaagaagcccacggaaggaaagtccagggaggaggaaaagaagcagaagttttggcatctgttccctggctgtgccaagatgggcgattggagcttcctgggaaatttcctggaggaagtacacaagcactcgaccgtggtaggcaaggtctggctcactgtcctcttcatattccgtatgctcgtgctgggcacagctgctgagtcttcctggggggatgagcaggctgatttccggtgtgatacgattcagcctggctgccagaatgtctgctacgaccaggctttccccatctcccacattcgctactgggtgctgcagatcatcttcgtctccacgccctctctggtgtacatgggccacgccatgcacactgtgcgcatgcaggagaagcgcaagctacgggaggccgagagggccaaagaggtccggggctctggctcttacgagtacccggtggcagagaaggcagaactgtcctgctgggaggaagggaatggaaggattgccctccagggcactctgctcaacacctatgtgtgcagcatcctgatccgcaccaccatggaggtgggcttcattgtgggccagtacttcatctacggaatcttcctgaccaccctgcatgtctgccgcaggagtccctgtccccacccggtcaactgttacgtatcccggcccacagagaagaatgtcttcattgtctttatgctggctgtggctgcactgtccctcctccttagcctggctgaactctaccacctgggctggaagaagatcagacagcgatttgtcaaaccgcggcagcacatggctaagtgccagctttctgg

SEQ ID NO: 11894 - DNA, 1364 bp, Homo sapiens
  source 1..1364: mol_type = unassigned DNA
gagaaagagcacatatttctccgtgggacactccttgtattggtgggtgagaaatgggcgactggagtttcctggggaacatcttggaggaggtgaatgagcactccaccgtcatcggcagagtctggctcaccgtgcttttcatcttccggatcctcatccttggcacggccgcagagttcgtgtggggggatgagcaatccgacttcgtgtgcaacacccagcagcctggctgcgagaacgtctgctacgacgaggcctttcccatctcccacattcgcctctgggtgctgcagatcatcttcgtctccaccccgtccctgatgtacgtggggcacgcggtgcactacgtccgcatggaggagaagcgcaaaagccgcgaggcggaggagctgggccagcaggcggggactaacggcggcccggaccagggcagcgtcaagaagagcagcggcagcaaaggcactaagaagttccggctggaggggaccctgctgaggacctacatctgccacatcatcttcaagaccctctttgaagtgggcttcatcgtgggccactacttcctgtacgggttccggatcctgcctctgtaccgctgcagccggtggccctgccccaatgtggtggactgcttcgtgtcccggcccacggagaaaaccatcttcatcctgttcatgttgtctgtggcctctgtgtccctattcctcaacgtgatggagttgggccacctgggcctgaaggggatccggtctgccttgaagaggcctgtagagcagcccctgggggagattcctgagaaatccctccactccattgctgtctcctccatccagaaagccaagggctatcagctcctagaagaagagaaaatcgtttcccactatttccccttgaccgaggttgggatggtggagaccagcccactgcctgccaagcctttcaatcagttcgaggagaagatcagcacaggacccctgggggacttgtcccggggctaccaagagacactgccttcctacgctcaggtgggggcacaagaagtggagggcgaggggccgcctgcagaggagggagccgaacccgaggtgggagagaagaaggaggaagcagagaggctgaccacggaggagcaggagaaggtggccgtgccagagggggagaaagtagagacccccggagtggataaggagggtgaaaaagaagagccgcagtcggagaaggtgtcaaagcaagggctgccagctgagaagacaccttcactctgtccagagctgacaacagatgatgccagacccctgagcaggctaagcaaagccagcagccgagccaggtcagacgatctaaccgtatgaagtgacgcc

SEQ ID NO: 11895 - DNA, 1302 bp, Homo sapiens
  source 1..1302: mol_type = unassigned DNA
atgggcgactggagtttcctggggaacatcttggaggaggtgaatgagcactccaccgtcatcggcagagtctggctcaccgtgcttttcatcttccggatcctcatccttggcacggccgcagagttcgtgtggggggatgagcaatccgacttcgtgtgcaacacccagcagcctggctgcgagaacgtctgctacgacgaggcctttcccatctcccacattcgcctctgggtgctgcagatcatcttcgtctccaccccgtccctgatgtacgtggggcacgcggtgcactacgtccgcatggaggagaagcgcaaaagccgcgaggcggaggagctgggccagcaggcggggactaacggcggcccggaccagggcagcgtcaagaagagcagcggcagcaaaggcactaagaagttccggctggaggggaccctgctgaggacctacatctgccacatcatcttcaagaccctctttgaagtgggcttcatcgtgggccactacttcctgtacgggttccggatcctgcctctgtaccgctgcagccggtggccctgccccaatgtggtggactgcttcgtgtcccggcccacggagaaaaccatcttcatcctgttcatgttgtctgtggcctctgtgtccctattcctcaacgtgatggagttgggccacctgggcctgaaggggatccggtctgccttgaagaggcctgtagagcagcccctgggggagattcctgagaaatccctccactccattgctgtctcctccatccagaaagccaagggctatcagctcctagaagaagagaaaatcgtttcccactatttccccttgaccgaggttgggatggtggagaccagcccactgcctgccaagcctttcaatcagttcgaggagaagatcagcacaggacccctgggggacttgtcccggggctaccaagagacactgccttcctacgctcaggtgggggcacaagaagtggagggcgaggggccgcctgcagaggagggagccgaacccgaggtgggagagaagaaggaggaagcagagaggctgaccacggaggagcaggagaaggtggccgtgccagagggggagaaagtagagacccccggagtggataaggagggtgaaaaagaagagccgcagtcggagaaggtgtcaaagcaagggctgccagctgagaagacaccttcactctgtccagagctgacaacagatgatgccagacccctgagcaggctaagcaaagccagcagccgagccaggtcagacgatctaaccgtatga

SEQ ID NO: 11896 - DNA, 2313 bp, Homo sapiens
  source 1..2313: mol_type = unassigned DNA
ttttaaaagcaaggataagcagaaagggacatggattttagttgatggatgactcactcactacattcaactgaactgaatctgctctataccagcaaagggacaaattcagaaaataaattgaagatggccatgctgtaacttctaaacatggtttgcttctcagatttacctaaactaagaaaggtttgctttaagaaatagtgctcccttcagaatggaagaatttatctgcctcttatttgatgtggatcagagctaagatggctgactaaataaacatgggggactggaatctccttggagatactctggaggaagttcacatccactccaccatgattggaaagatctggctcaccatcctgttcatatttcgaatgcttgttctgggtgtagcagctgaagatgtctggaatgatgagcagtctggcttcatctgcaatacagaacaaccaggctgcagaaatgtatgctacgaccaggcctttcctatctccctcattagatactgggttctgcaggtgatatttgtgtcttcaccatccctggtctacatgggccatgcattgtaccgactgagagttcttgaggaagagaggcaaaggatgaaagctcagttaagagtagaactggaggaggtagagtttgaaatgcctagggatcggaggagattggagcaagagctttgtcagctggagaaaaggaaactaaataaagctccactcagaggaaccttgctttgcacttatgtgatacacattttcactcgctctgtggttgaagttggattcatgattggacagtaccttttatatggatttcacttagagccgctatttaagtgccatggccacccgtgtccaaatataatcgactgttttgtctcaagaccaacagaaaagacaatattcctattatttatgcaatctatagccactatttcacttttcttaaacattcttgaaattttccacctaggttttaaaaagattaaaagagggctttggggaaaatacaagttgaagaaggaacataatgaattccatgcaaacaaggcaaaacaaaatgtagccaaataccagagcacatctgcaaattcactgaagcgactcccttctgcccctgattataatctgttagtggaaaagcaaacacacactgcagtgtaccctagtttaaattcatcttctgtattccagccaaatcctgacaatcatagtgtaaatgatgagaaatgcattttggatgaacaggaaactgtactttctaatgagatttccacacttagtactagttgtagtcattttcaacacatcagttcaaacaataacaaagacactcataaaatatttggaaaagaacttaatggtaaccagttaatggaaaaaagagaaactgaaggcaaagacagcaaaaggaactactactctagaggtcaccgttctattccaggtgttgctatagatggagagaacaacatgaggcagtcaccccaaacagttttctccttgccagctaactgcgattggaaaccgcggtggcttagagctacatggggttcctctacagaacatgaaaaccgggggtcacctcctaaaggtaacctcaagggccagttcagaaagggcacagtcagaacccttcctccttcacaaggagattctcaatcacttgacattccaaacactgctgattctttgggagggctgtcctttgagccagggttggtcagaacctgtaataatcctgtttgtcctccaaatcacgtagtgtccctaacgaacaatctcattggtaggcgggttcccacagatcttcagatctaaacagcggttggcttttagacattatatatattatcagagaagtagcctagtggtcgtggggcacagaaaaaatagataggggcagctctaaagaccagctgttaagacagacaactgcaaactcatttaagcaagagaaaaacagctctaattcgagattgtgaagcaacacttctaaattcaaagacatagagttgtcaaatcaggatttttttttttttaaatgatatcctttcgaatgtaactgattttgggaaaatcacatgttcagaattgaggctaaatggtttgatcaggttttctctttgaagagaccacagccttaggaaatggttcttgatctatacaattccaccttggacactgggttaattctgtttgcccctggaacacaatcacgtaagtttccttctagactggcatcctgatgtgtcttgagtataatcacatgttgctacctagtaaataaaatcttaagaagatc

SEQ ID NO: 11897 - DNA, 1901 bp, Homo sapiens
  source 1..1901: mol_type = unassigned DNA
cagggagttgtggttgcaacactgtactccagcctgggcaacagagggagactctgtctcaacaaacaaacaaacaaagaaaaaaccccacagctatctagggaaaaagtaaagcaaccagcatatagaagtgacatattgttatattttcaccataggtttgctttaagaaatagtgctcccttcagaatggaagaatttatctgcctcttatttgatgtggatcagagctaagatggctgactaaataaacatgggggactggaatctccttggagatactctggaggaagttcacatccactccaccatgattggaaagatctggctcaccatcctgttcatatttcgaatgcttgttctgggtgtagcagctgaagatgtctggaatgatgagcagtctggcttcatctgcaatacagaacaaccaggctgcagaaatgtatgctacgaccaggcctttcctatctccctcattagatactgggttctgcaggtgatatttgtgtcttcaccatccctggtctacatgggccatgcattgtaccgactgagagttcttgaggaagagaggcaaaggatgaaagctcagttaagagtagaactggaggaggtagagtttgaaatgcctagggatcggaggagattggagcaagagctttgtcagctggagaaaaggaaactaaataaagctccactcagaggaaccttgctttgcacttatgtgatacacattttcactcgctctgtggttgaagttggattcatgattggacagtaccttttatatggatttcacttagagccgctatttaagtgccatggccacccgtgtccaaatataatcgactgttttgtctcaagaccaacagaaaagacaatattcctattatttatgcaatctatagccactatttcacttttcttaaacattcttgaaattttccacctaggttttaaaaagattaaaagagggctttggggaaaatacaagttgaagaaggaacataatgaattccatgcaaacaaggcaaaacaaaatgtagccaaataccagagcacatctgcaaattcactgaagcgactcccttctgcccctgattataatctgttagtggaaaagcaaacacacactgcagtgtaccctagtttaaattcatcttctgtattccagccaaatcctgacaatcatagtgtaaatgatgagaaatgcattttggatgaacaggaaactgtactttctaatgagatttccacacttagtactagttgtagtcattttcaacacatcagttcaaacaataacaaagacactcataaaatatttggaaaagaacttaatggtaaccagttaatggaaaaaagagaaactgaaggcaaagacagcaaaaggaactactactctagaggtcaccgttctattccaggtgttgctatagatggagagaacaacatgaggcagtcaccccaaacagttttctccttgccagctaactgcgattggaaaccgcggtggcttagagctacatggggttcctctacagaacatgaaaaccgggggtcacctcctaaaggtaacctcaagggccagttcagaaagggcacagtcagaacccttcctccttcacaaggagattctcaatcacttgacattccaaacactgctgattctttgggagggctgtcctttgagccagggttggtcagaacctgtaataatcctgtttgtcctccaaatcacgtagtgtccctaacgaacaatctcattggtaggcgggttcccacagatcttcagatctaaacagcggttggcttttagacattatatatattatcagagaagtagcctagtggtcgtggggcacagaaaaaatagataggggcagctctaaagaccagct

SEQ ID NO: 11898 - DNA, 2377 bp, Homo sapiens
  source 1..2377: mol_type = unassigned DNA
aaaagcaaggataagcagaaagggacatggattttagttgatggatgactcactcactacattcaactgaactgaatctgctctataccagcaaagggacaaattcagaaaataaattgaagatggccatgctgtaacttctaaacatggtttgcttctcagatttacctaaactaagaaaggtttgctttaagaaatagtgctcccttcagaatggaagaatttatctgcctcttatttgatgtggatcagagctaagatggctgactaaataaacatgggggactggaatctccttggagatactctggaggaagttcacatccactccaccatgattggaaagatctggctcaccatcctgttcatatttcgaatgcttgttctgggtgtagcagctgaagatgtctggaatgatgagcagtctggcttcatctgcaatacagaacaaccaggctgcagaaatgtatgctacgaccaggcctttcctatctccctcattagatactgggttctgcaggtgatatttgtgtcttcaccatccctggtctacatgggccatgcattgtaccgactgagagttcttgaggaagagaggcaaaggatgaaagctcagttaagagtagaactggaggaggtagagtttgaaatgcctagggatcggaggagattggagcaagagctttgtcagctggagaaaaggaaactaaataaagctccactcagaggaaccttgctttgcacttatgtgatacacattttcactcgctctgtggttgaagttggattcatgattggacagtaccttttatatggatttcacttagagccgctatttaagtgccatggccacccgtgtccaaatataatcgactgttttgtctcaagaccaacagaaaagacaatattcctattatttatgcaatctatagccactatttcacttttcttaaacattcttgaaattttccacctaggttttaaaaagattaaaagagggctttggggaaaatacaagttgaagaaggaacataatgaattccatgcaaacaaggcaaaacaaaatgtagccaaataccagagcacatctgcaaattcactgaagcgactcccttctgcccctgattataatctgttagtggaaaagcaaacacacactgcagtgtaccctagtttaaattcatcttctgtattccagccaaatcctgacaatcatagtgtaaatgatgagaaatgcattttggatgaacaggaaactgtactttctaatgagatttccacacttagtactagttgtagtcattttcaacacatcagttcaaacaataacaaagacactcataaaatatttggaaaagaacttaatggtaaccagttaatggaaaaaagagaaactgaaggcaaagacagcaaaaggaactactactctagaggtcaccgttctattccaggtgttgctatagatggagagaacaacatgaggcagtcaccccaaacagttttctccttgccagctaactgcgattggaaaccgcggtggcttagagctacatggggttcctctacagaacatgaaaaccgggggtcacctcctaaagtgcctggctcaaaagctactgcaagctcgttactgctcatcctccagaggcccacatcaagtcagccacgactcaaggagactccaaagataaaagctgaagccaaaatatatgattctaaacaccctcctcggctactgcaaagcactgtgagcactttctcaggacgagagccaagaagcccagcacctatgggtcaccacagtttccgaggtcccagatgaaaaagatgcgctcgctaccaccgtgcggcggtcctttctctcgcaatagtctcaatgctcccgggccctgcctccggacgccaggacagaggccgccgactcgaagcgtgagcagttccggaggtacttggagaagtcgggggtgctggacacgctgaccaaggtgttggtagccttatatgaagaaccagagaaacctaacagtgctttggattttttaaagcatcacttaggagctgctactccagaaaatccagaaatagagctgcttcgcctagaactggccgaaatgaaagagaagtatgaagctattgtagaagaaaataaaaaactgaaagcaaagcttgctcagtatgaaccacctcaggaggagaagcgtgctgaataggattcttctcagtttgaaagacaatgaaaaatggttttgtatgacttgaatagtttgtatagtatataatcttttctgaacagatgctatagaactcttttaatatgtttaattcacctatcacactctgttaaaaacacatagaatcatcaataaaaactcaatat

SEQ ID NO: 11899 - DNA, 1637 bp, Homo sapiens
  source 1..1637: mol_type = unassigned DNA
atatgactccccagcaccgggcggtgatgaattgggacgcaggcgcggagcccagggaccactccccctgcacagacatgagaccataggggacctgtctgggtggcctcagggataggcgctccccaaggtgtgaatgaggcaggatgaactggacaggtttgtacaccttgctcagtggcgtgaaccggcattctactgccattggccgagtatggctctcggtcatcttcatcttcagaatcatggtgctggtggtggctgcagagagtgtgtggggtgatgagaaatcttccttcatctgcaacacactccagcctggctgcaacagcgtttgctatgaccaattcttccccatctcccatgtgcggctgtggtccctgcagctcatcctagtttccaccccagctctcctcgtggccatgcacgtggctcaccagcaacacatagagaagaaaatgctacggcttgagggccatggggaccccctacacctggaggaggtgaagaggcacaaggtccacatctcagggacactgtggtggacctatgtcatcagcgtggtgttccggctgttgtttgaggccgtcttcatgtatgtcttttatctgctctaccctggctatgccatggtgcggctggtcaagtgcgacgtctacccctgccccaacacagtggactgcttcgtgtcccgccccaccgagaaaaccgtcttcaccgtcttcatgctagctgcctctggcatctgcatcatcctcaatgtggccgaggtggtgtacctcatcatccgggcctgtgcccgccgagcccagcgccgctccaatccaccttcccgcaagggctcgggcttcggccaccgcctctcacctgaatacaagcagaatgagatcaacaagctgctgagtgagcaggatggctccctgaaagacatactgcgccgcagccctggcaccggggctgggctggctgaaaagagcgaccgctgctcggcctgctgatgccacataccaggcaacctcccatcccacccccgaccctgccctgggcgagcccctccttctcccctgccggtgcacaggcctctgcctgctggggattactcgatcaaaaccttccttccctggctacttcccttcctcccggggccttccttttgaggagctggaggggtggggagctagaggccacctatgccagtgctcaaggttactgggagtgtgggctgcccttgttgcctgcacccttccctcttccctctccctctctctgggaccactgggtacaagagatgggatgctccgacagcgtctccaattatgaaactaatcttaaccctgtgctgtcagataccctgtttctggagtcacatcagtgaggagggatgtgggtaagaggagcagagggcaggggtgctgtggacatgtgggtggagaagggagggtggccagcactagtaaaggaggaatagtgcttgctggccacaaggaaaaggaggaggtgtctggggtgagggagttagggagagagaagcaggcagataagttggagcaggggttggtcaaggccacctctgcctctagtccccaaggcctctctctgcctgaaatgttacacattaaacaggattttacagtaaa

SEQ ID NO: 11900 - DNA, 1904 bp, Homo sapiens
  source 1..1904: mol_type = unassigned DNA
ctggtggcatagggcagacacgcctgcagacattctctgggaaagggcagcagcagccaggtgtggcagtgacagggaggtgtgaatgaggcaggatgaactggacaggtttgtacaccttgctcagtggcgtgaaccggcattctactgccattggccgagtatggctctcggtcatcttcatcttcagaatcatggtgctggtggtggctgcagagagtgtgtggggtgatgagaaatcttccttcatctgcaacacactccagcctggctgcaacagcgtttgctatgaccaattcttccccatctcccatgtgcggctgtggtccctgcagctcatcctagtttccaccccagctctcctcgtggccatgcacgtggctcaccagcaacacatagagaagaaaatgctacggcttgagggccatggggaccccctacacctggaggaggtgaagaggcacaaggtccacatctcagggacactgtggtggacctatgtcatcagcgtggtgttccggctgttgtttgaggccgtcttcatgtatgtcttttatctgctctaccctggctatgccatggtgcggctggtcaagtgcgacgtctacccctgccccaacacagtggactgcttcgtgtcccgccccaccgagaaaaccgtcttcaccgtcttcatgctagctgcctctggcatctgcatcatcctcaatgtggccgaggtggtgtacctcatcatccgggcctgtgcccgccgagcccagcgccgctccaatccaccttcccgcaagggctcgggcttcggccaccgcctctcacctgaatacaagcagaatgagatcaacaagctgctgagtgagcaggatggctccctgaaagacatactgcgccgcagccctggcaccggggctgggctggctgaaaagagcgaccgctgctcggcctgctgatgccacataccaggcaacctcccatcccacccccgaccctgccctgggcgagcccctccttctcccctgccggtgcacaggcctctgcctgctggggattactcgatcaaaaccttccttccctggctacttcccttcctcccggggccttccttttgaggagctggaggggtggggagctagaggccacctatgccagtgctcaaggttactgggagtgtgggctgcccttgttgcctgcacccttccctcttccctctccctctctctgggaccactgggtacaagagatgggatgctccgacagcgtctccaattatgaaactaatcttaaccctgtgctgtcagataccctgtttctggagtcacatcagtgaggagggatgtgggtaagaggagcagagggcaggggtgctgtggacatgtgggtggagaagggagggtggccagcactagtaaaggaggaatagtgcttgctggccacaaggaaaaggaggaggtgtctggggtgagggagttagggagagagaagcaggcagataagttggagcaggggttggtcaaggccacctctgcctctagtccccaaggcctctctctgcctgaaatgttacacattaaacaggattttacagtaaatgaagaggtggcttgtgtgtttgtcaagttctttctcctgcaacctctgacctcccccaggatgagctggccttggttttttactgattaagaaaggaacagggcaaaagaagtagttacttgagtagctgaagctgcaaatgaggaaatcactgtacttctgggccgcagagccagccccggagccattcctccctgttgcttttgttgttgtggttcttgtctttttcattgtctaataacagctttattgggatttagtttacatacctccttcctctgattttgaaaagattaaaaatgacaactccctctgaa

SEQ ID NO: 11901 - DNA, 1587 bp, Homo sapiens
  source 1..1587: mol_type = unassigned DNA
gggctgggctgacagtacctggtggcatagggcagacacgcctgcagacattctctgggaaagggcagcagcagccaggtgtgaatgaggcaggatgaactggacaggtttgtacaccttgctcagtggcgtgaaccggcattctactgccattggccgagtatggctctcggtcatcttcatcttcagaatcatggtgctggtggtggctgcagagagtgtgtggggtgatgagaaatcttccttcatctgcaacacactccagcctggctgcaacagcgtttgctatgaccaattcttccccatctcccatgtgcggctgtggtccctgcagctcatcctagtttccaccccagctctcctcgtggccatgcacgtggctcaccagcaacacatagagaagaaaatgctacggcttgagggccatggggaccccctacacctggaggaggtgaagaggcacaaggtccacatctcagggacactgtggtggacctatgtcatcagcgtggtgttccggctgttgtttgaggccgtcttcatgtatgtcttttatctgctctaccctggctatgccatggtgcggctggtcaagtgcgacgtctacccctgccccaacacagtggactgcttcgtgtcccgccccaccgagaaaaccgtcttcaccgtcttcatgctagctgcctctggcatctgcatcatcctcaatgtggccgaggtggtgtacctcatcatccgggcctgtgcccgccgagcccagcgccgctccaatccaccttcccgcaagggctcgggcttcggccaccgcctctcacctgaatacaagcagaatgagatcaacaagctgctgagtgagcaggatggctccctgaaagacatactgcgccgcagccctggcaccggggctgggctggctgaaaagagcgaccgctgctcggcctgctgatgccacataccaggcaacctcccatcccacccccgaccctgccctgggcgagcccctccttctcccctgccggtgcacaggcctctgcctgctggggattactcgatcaaaaccttccttccctggctacttcccttcctcccggggccttccttttgaggagctggaggggtggggagctagaggccacctatgccagtgctcaaggttactgggagtgtgggctgcccttgttgcctgcacccttccctcttccctctccctctctctgggaccactgggtacaagagatgggatgctccgacagcgtctccaattatgaaactaatcttaaccctgtgctgtcagataccctgtttctggagtcacatcagtgaggagggatgtgggtaagaggagcagagggcaggggtgctgtggacatgtgggtggagaagggagggtggccagcactagtaaaggaggaatagtgcttgctggccacaaggaaaaggaggaggtgtctggggtgagggagttagggagagagaagcaggcagataagttggagcaggggttggtcaaggccacctctgcctctagtccccaaggcctctctctgcctgaaatgttacacattaaacaggattttacagtaaatg

SEQ ID NO: 11902 - DNA, 484 bp, Homo sapiens
  source 1..484: mol_type = unassigned DNA
cagcagcagccaggtgtggcagtgacagggagacactatctgcagaagcacagggagcctgctgtagaaagacttctgtctcagatacattgtttcatcctacctatcctaccgctttggaacggtgtgaccttgaggagttacttatctgagcttcagcttcttcatctggaaaatgggataacaggcttcctaaatgggtcgaaagaaaaaatgtgtgaatgaggcaggatgaactggacaggtttgtacaccttgctcagtggcgtgaaccggcattctactgccattggccgagtatggctctcggtcatcttcatcttcagaatcatggtgctggtggtggctgcagagagtgtgtggggtgatgagaaatcttccttcatctgcaacacactccagcctggctgcaacagcgtttgctatgaccaattcttccccatctcccatgtgcggctgtggtccctgcagctcatcctagttt

SEQ ID NO: 11903 - DNA, 2309 bp, Homo sapiens
  source 1..2309: mol_type = unassigned DNA
atttaatcctatgacaaactaagttggttctgtcttcacctgttttggtgaggttgtgtaagagttggtgtttgctcaggaagagatttaagcatgcttgcttacccagactcagagaagtctccctgttctgtcctagctagtgattcctgtgttgtgtgcattcgtcttttccagagcaaaccgcccagagtagaagatggattggggcacgctgcagacgatcctggggggtgtgaacaaacactccaccagcattggaaagatctggctcaccgtcctcttcatttttcgcattatgatcctcgttgtggctgcaaaggaggtgtggggagatgagcaggccgactttgtctgcaacaccctgcagccaggctgcaagaacgtgtgctacgatcactacttccccatctcccacatccggctatgggccctgcagctgatcttcgtgtccacgccagcgctcctagtggccatgcacgtggcctaccggagacatgagaagaagaggaagttcatcaagggggagataaagagtgaatttaaggacatcgaggagatcaaaacccagaaggtccgcatcgaaggctccctgtggtggacctacacaagcagcatcttcttccgggtcatcttcgaagccgccttcatgtacgtcttctatgtcatgtacgacggcttctccatgcagcggctggtgaagtgcaacgcctggccttgtcccaacactgtggactgctttgtgtcccggcccacggagaagactgtcttcacagtgttcatgattgcagtgtctggaatttgcatcctgctgaatgtcactgaattgtgttatttgctaattagatattgttctgggaagtcaaaaaagccagtttaacgcattgcccagttgttagattaagaaatagacagcatgagagggatgaggcaacccgtgctcagctgtcaaggctcagtcgctagcatttcccaacacaaagattctgaccttaaatgcaaccatttgaaacccctgtaggcctcaggtgaaactccagatgccacaatggagctctgctcccctaaagcctcaaaacaaaggcctaattctatgcctgtcttaattttctttcacttaagttagttccactgagaccccaggctgttaggggttattggtgtaaggtactttcatattttaaacagaggatatcggcatttgtttctttctctgaggacaagagaaaaaagccaggttccacagaggacacagagaaggtttgggtgtcctcctggggttctttttgccaactttccccacgttaaaggtgaacattggttctttcatttgctttggaagttttaatctctaacagtggacaaagttaccagtgccttaaactctgttacactttttggaagtgaaaactttgtagtatgataggttattttgatgtaaagatgttctggataccattatatgttccccctgtttcagaggctcagattgtaatatgtaaatggtatgtcattcgctactatgatttaatttgaaatatggtcttttggttatgaatactttgcagcacagctgagaggctgtctgttgtattcattgtggtcatagcacctaacaacattgtagcctcaatcgagtgagacagactagaagttcctagtgatggcttatgatagcaaatggcctcatgtcaaatatttagatgtaattttgtgtaagaaatacagactggatgtaccaccaactactacctgtaatgacaggcctgtccaacacatctcccttttccatgactgtggtagccagcatcggaaagaacgctgatttaaagaggtcgcttgggaattttattgacacagtaccatttaatggggaggacaaaatggggcaggggagggagaagtttctgtcgttaaaaacagatttggaaagactggactctaaagtctgttgattaaagatgagctttgtctacttcaaaagtttgtttgcttaccccttcagcctccaattttttaagtgaaaatatagctaataacatgtgaaaagaatagaagctaaggtttagataaatattgagcagatctataggaagattgaacctgaatattgccattatgcttgacatggtttccaaaaaatggtactccacatatttcagtgagggtaagtattttcctgttgtcaagaatagcattgtaaaagcattttgtaataataaagaatagctttaatgatatgcttgtaactaaaataattttgtaatgtatcaaatacatttaaaacattaaaatataatctctataat

SEQ ID NO: 11904 - DNA, 2250 bp, Homo sapiens
  source 1..2250: mol_type = unassigned DNA
cggagcccctcggcggcgcccggcccaggacccgcctaggagcgcaggagccccagcgcagagaccccaacgccgagacccccgccccggccccgccgcgcttcctcccgacgcagagcaaaccgcccagagtagaagatggattggggcacgctgcagacgatcctggggggtgtgaacaaacactccaccagcattggaaagatctggctcaccgtcctcttcatttttcgcattatgatcctcgttgtggctgcaaaggaggtgtggggagatgagcaggccgactttgtctgcaacaccctgcagccaggctgcaagaacgtgtgctacgatcactacttccccatctcccacatccggctatgggccctgcagctgatcttcgtgtccacgccagcgctcctagtggccatgcacgtggcctaccggagacatgagaagaagaggaagttcatcaagggggagataaagagtgaatttaaggacatcgaggagatcaaaacccagaaggtccgcatcgaaggctccctgtggtggacctacacaagcagcatcttcttccgggtcatcttcgaagccgccttcatgtacgtcttctatgtcatgtacgacggcttctccatgcagcggctggtgaagtgcaacgcctggccttgtcccaacactgtggactgctttgtgtcccggcccacggagaagactgtcttcacagtgttcatgattgcagtgtctggaatttgcatcctgctgaatgtcactgaattgtgttatttgctaattagatattgttctgggaagtcaaaaaagccagtttaacgcattgcccagttgttagattaagaaatagacagcatgagagggatgaggcaacccgtgctcagctgtcaaggctcagtcgctagcatttcccaacacaaagattctgaccttaaatgcaaccatttgaaacccctgtaggcctcaggtgaaactccagatgccacaatggagctctgctcccctaaagcctcaaaacaaaggcctaattctatgcctgtcttaattttctttcacttaagttagttccactgagaccccaggctgttaggggttattggtgtaaggtactttcatattttaaacagaggatatcggcatttgtttctttctctgaggacaagagaaaaaagccaggttccacagaggacacagagaaggtttgggtgtcctcctggggttctttttgccaactttccccacgttaaaggtgaacattggttctttcatttgctttggaagttttaatctctaacagtggacaaagttaccagtgccttaaactctgttacactttttggaagtgaaaactttgtagtatgataggttattttgatgtaaagatgttctggataccattatatgttccccctgtttcagaggctcagattgtaatatgtaaatggtatgtcattcgctactatgatttaatttgaaatatggtcttttggttatgaatactttgcagcacagctgagaggctgtctgttgtattcattgtggtcatagcacctaacaacattgtagcctcaatcgagtgagacagactagaagttcctagtgatggcttatgatagcaaatggcctcatgtcaaatatttagatgtaattttgtgtaagaaatacagactggatgtaccaccaactactacctgtaatgacaggcctgtccaacacatctcccttttccatgactgtggtagccagcatcggaaagaacgctgatttaaagaggtcgcttgggaattttattgacacagtaccatttaatggggaggacaaaatggggcaggggagggagaagtttctgtcgttaaaaacagatttggaaagactggactctaaagtctgttgattaaagatgagctttgtctacttcaaaagtttgtttgcttaccccttcagcctccaattttttaagtgaaaatatagctaataacatgtgaaaagaatagaagctaaggtttagataaatattgagcagatctataggaagattgaacctgaatattgccattatgcttgacatggtttccaaaaaatggtactccacatatttcagtgagggtaagtattttcctgttgtcaagaatagcattgtaaaagcattttgtaataataaagaatagctttaatgatatgcttgtaactaaaataattttgtaatgtatcaaatacatttaaaacattaaaatataatctctataataa

SEQ ID NO: 11905 - DNA, 1797 bp, Homo sapiens
  source 1..1797: mol_type = unassigned DNA
agacagcacccaagggtagaagatgggggcccaggagggagctgcaccctggtgggcagccatgggagtgtgtcaggtggaagcagccgtcagggtccctctctgctctctgtccggacagacagggctccaaccttcacttcagttcttgtgaactcccaccaggtaggcacggcccccaccaggcgccatggactggaagacactccaggccctactgagcggtgtgaacaagtactccacagcgttcgggcgcatctggctgtccgtggtgttcgtcttccgggtgctggtatacgtggtggctgcagagcgcgtgtggggggatgagcagaaggactttgactgcaacaccaagcagcccggctgcaccaacgtctgctacgacaactacttccccatctccaacatccgcctctgggccctgcagctcatcttcgtcacatgcccctcgctgctggtcatcctgcacgtggcctaccgtgaggagcgggagcgccggcaccgccagaaacacggggaccagtgcgccaagctgtacgacaacgcaggcaagaagcacggaggcctgtggtggacctacctgttcagcctcatcttcaagctcatcattgagttcctcttcctctacctgctgcacactctctggcatggcttcaatatgccgcgcctggtgcagtgtgccaacgtggccccctgccccaacatcgtggactgctacattgcccgacctaccgagaagaaaatcttcacctacttcatggtgggcgcctccgccgtctgcatcgtactcaccatctgtgagctctgctacctcatctgccacagggtcctgcgaggcctgcacaaggacaagcctcgagggggttgcagcccctcgtcctccgccagccgagcttccacctgccgctgccaccacaagctggtggaggctggggaggtggatccagacccaggcaataacaagctgcaggcttcagcacccaacctgacccccatctgaccacagggcaggggtggggcaacatgcgggctgccaatgggacatgcagggcggtgtggcaggtggagaggtcctacaggggctgagtgaccccactctgagttcactaagttatgcaactttcgttttggcagatattttttgacactgggaactgggctgtctagccgggtataggtaacccacaggcccagtgccagccctcaaaggacatagactttgaaacaagcgaattaactatctacgctgcctgcaaggggccacttagggcactgctagcagggcttcaaccaggaagggatcaacccaggaagggatgatcaggagaggcttccctgaggacataatgtgtaagagaggtgagaagtgctcccaagcagacacaacagcagcacagaggtctggaggccacacaaaaagtgatgctcgccctgggctagcctcagcagacctaaggcatctctactccctccagaggagccgcccagattcctgcagtggagaggaggtcttccagcagcagcaggtctggagggctgagaatgaacctgactagaggttctggagatacccagaggtcccccaggtcatcacttggctcagtggaagccctctttccccaaatcctactccctcagcctcaggcagtggtgctcccatcttcctccccacaactgtgctcaggctggtgccagcctttcagaccctgctcccagggacttgggtggatgcgctgatagaacatcctcaagacagtttccttgaaatcaataaatactgtgttttatacaggt

SEQ ID NO: 11906 - DNA, 2217 bp, Homo sapiens
  source 1..2217: mol_type = unassigned DNA
gaacttctttcctggcacaggactcactgtgccccttcccgctgtgggtacaaggtctgccccccaccccagctctccaaagcccaccggcctccctggaggccgaggtcgacggcccgtcgcaccgggagggggggctcccaggggtgccccacgcacggtcaaggtcccgcgccaagcggggaccgggctgggccggaagcgggcacggtactcgcggcaaactagcgtgggcgagtcctgattgcagtcggacctgccgccgcggcacttaacagtttgcagagtgcttcccgcccctgatctcattggagccttcggacagcccagcccatggccaccgatgcccccatttcacgcctgaggaagcggaggctcagacgggccaccagcccctccggaggctggcccgggagcgcctggcagcgtcgggtctaggagccggctccctcctgctccctcctccgcgccgcccggggtgtgcccgccgtctgtgtgcaccactgctgagcccagctccggcgccctcgcctctgctgtgggccccggggacgcggggtcaggccaccgcgttggccaggccgctgcaggtaggcacggcccccaccaggcgccatggactggaagacactccaggccctactgagcggtgtgaacaagtactccacagcgttcgggcgcatctggctgtccgtggtgttcgtcttccgggtgctggtatacgtggtggctgcagagcgcgtgtggggggatgagcagaaggactttgactgcaacaccaagcagcccggctgcaccaacgtctgctacgacaactacttccccatctccaacatccgcctctgggccctgcagctcatcttcgtcacatgcccctcgctgctggtcatcctgcacgtggcctaccgtgaggagcgggagcgccggcaccgccagaaacacggggaccagtgcgccaagctgtacgacaacgcaggcaagaagcacggaggcctgtggtggacctacctgttcagcctcatcttcaagctcatcattgagttcctcttcctctacctgctgcacactctctggcatggcttcaatatgccgcgcctggtgcagtgtgccaacgtggccccctgccccaacatcgtggactgctacattgcccgacctaccgagaagaaaatcttcacctacttcatggtgggcgcctccgccgtctgcatcgtactcaccatctgtgagctctgctacctcatctgccacagggtcctgcgaggcctgcacaaggacaagcctcgagggggttgcagcccctcgtcctccgccagccgagcttccacctgccgctgccaccacaagctggtggaggctggggaggtggatccagacccaggcaataacaagctgcaggcttcagcacccaacctgacccccatctgaccacagggcaggggtggggcaacatgcgggctgccaatgggacatgcagggcggtgtggcaggtggagaggtcctacaggggctgagtgaccccactctgagttcactaagttatgcaactttcgttttggcagatattttttgacactgggaactgggctgtctagccgggtataggtaacccacaggcccagtgccagccctcaaaggacatagactttgaaacaagcgaattaactatctacgctgcctgcaaggggccacttagggcactgctagcagggcttcaaccaggaagggatcaacccaggaagggatgatcaggagaggcttccctgaggacataatgtgtaagagaggtgagaagtgctcccaagcagacacaacagcagcacagaggtctggaggccacacaaaaagtgatgctcgccctgggctagcctcagcagacctaaggcatctctactccctccagaggagccgcccagattcctgcagtggagaggaggtcttccagcagcagcaggtctggagggctgagaatgaacctgactagaggttctggagatacccagaggtcccccaggtcatcacttggctcagtggaagccctctttccccaaatcctactccctcagcctcaggcagtggtgctcccatcttcctccccacaactgtgctcaggctggtgccagcctttcagaccctgctcccagggacttgggtggatgcgctgatagaacatcctcaagacagtttccttgaaatcaataaatactgtgttttata

SEQ ID NO: 11907 - DNA, 765 bp, Homo sapiens
  source 1..765: mol_type = unassigned DNA
atggactggaagacactccaggccctactgagcggtgtgaacaagtactccacagcgttcgggcgcatctggctgtccgtggtgttcgtcttccgggtgctggtatacgtggtggctgcagagcgcgtgtggggggatgagcagaaggactttgactgcaacaccaagcagcccggctgcaccaacgtctgctacgacaactacttccccatctccaacatccgcctctgggccctgcagctcatcttcgtcacatgcccctcgctgctggtcatcctgcacgtggcctaccgtgaggagcgggagcgccggcaccgccagaaacacggggaccagtgcgccaagctgtacgacaacgcaggcaagaagcacggaggcctgtggtggacctacctgctgcacactctctggcatggcttcaatatgccgcgcctggtgcagtgtgccaacgtggccccctgccccaacatcgtggactgctacattgcccgacctaccgagaagaaaatcttcacctacttcatggtgggcgcctccgccgtctgcatcgtactcaccatctgtgagctctgctacctcatctgccacagggtcctgcgaggcctgcacaaggacaagcctcgagggggttgcagcccctcgtcctccgccagccgagcttccacctgccgctgccaccacaagctggtggaggctggggaggtggatccagacccaggcaataacaagctgcaggcttcagcacccaacctgacccccatctga

SEQ ID NO: 11908 - DNA, 2840 bp, Homo sapiens
  source 1..2840: mol_type = unassigned DNA
aaacagacaagcccaaggacaaggaagcagctactggacccaagaaggaataaggtagaccctgattttggaacctgaagaccaaagtgcaagattagctctgctacttccatctgtggaccattgggcaggtatctctgggccttcacttactctttgtgaaatgaggacaggggcaatccctaccctaccaagtcattgggagtgaagacatgatgacacggtgattgtgaaaagattttgtcaatcgcaccagcattaagggtgcccatctccaggttcccccaggcctcaaggctcccaaggcctgagtgggcaggtagcacccaggtatagaccttccacgtgcagcacccaggacacagccagcatgaactgggcatttctgcagggcctgctgagtggcgtgaacaagtactccacagtgctgagccgcatctggctgtctgtggtgttcatctttcgtgtgctggtgtacgtggtggcagcggaggaggtgtgggacgatgagcagaaggactttgtctgcaacaccaagcagcccggctgccccaacgtctgctatgacgagttcttccccgtgtcccacgtgcgcctctgggccctacagctcatcctggtcacgtgcccctcactgctcgtggtcatgcacgtggcctaccgcgaggaacgcgagcgcaagcaccacctgaaacacgggcccaatgccccgtccctgtacgacaacctgagcaagaagcggggcggactgtggtggacgtacttgctgagcctcatcttcaaggccgccgtggatgctggcttcctctatatcttccaccgcctctacaaggattatgacatgccccgcgtggtggcctgctccgtggagccttgcccccacactgtggactgttacatctcccggcccacggagaagaaggtcttcacctacttcatggtgaccacagctgccatctgcatcctgctcaacctcagtgaagtcttctacctggtgggcaagaggtgcatggagatcttcggccccaggcaccggcggcctcggtgccgggaatgcctacccgatacgtgcccaccatatgtcctctcccagggagggcaccctgaggatgggaactctgtcctaatgaaggctgggtcggccccagtggatgcaggtgggtatccataacctgcgagatcagcagataagatcaacaggtcccccccacatgaggccacccaggaaaaaaggcaggggcagtggcatccttgccgtagcagggtggtgaggagggtggctgtgggggctcaggaagctcgcccaggggccaatgtgggaggttgggggtagtttggtccctgggtcctgagcctcaggggagggaggttgatagctactggggattttgtatatggcaacagtatatgtcaaacctcttaataaatatgattttcccagtactttgcagaccaggtggggagtggccgataggaaaacggggggcaggggggattaggtggacctcagagaggatgccaagactactcagtgagcacctgagcactggaacctcagatccaggctcacccatcaccccccaacacacacagtgtgtgcccccagaacatgatgggctgtgcccaaaggcagaggctactccaggggcctctgggttgtgcaaccacctggccaaagcaggaggagaggaattccaggagaccctgtgcccagcaggagtcagttctcagtgatcgtccatcacaggaatgagcgtgggttgggcctccctagccctgcccagcacaggtcccggataggtgagtcccctctgacggtgggagggtcacggctgagagcaagccagggatgggaatctgtcaaggtgcccaagaggcacatcctacaggccagggcccactgagagtgtctgagctgaaaggtcccttgtggatcctggagtctatggaatttcatgttctttttcactgatacaacttccccatcccatactcccccaccccaccaccactcagactttggcaactcccagaaccacacctccaccctaacatgcctctgagtcccaccaaatgcccactagacaattccctgggaggcccccaggcatctcatacccgccactcccaagctgacctcatcagctcacccagacctgcccccttgaagatgccccaccccatctcatgcaggacacagctattcacccagctgcccaagccaggggacgagacaagcctgacatccttgtccctcacaccccacacccccactggcaccaaatcccactgattccagtccctaaatgccacctgaatctgctcttcctctccttacaacaacctaactacctcctggacctcccccatctgccctccgctacagggatggagtgatttatctgtctatgcaactgaccatgtcattccacctgctttaaaatttcttccaccatcaccagccccatgccctcagcatggcccccgctgacctccccacctcatcccagcttcctccccttttctacctgcaagtaataccaaagggctcctggttccccaggcagacacgtcatgtggtgtcattcctcgtgcctttgtcatgctatttcctctggctagaatgcccttcccaccccctctgtgatcctccctcgaacctctaggacagctttacccatctctctaagtgccagcctcgcttgtccctctgccactctccccaaatcggaattgtcacttcccctgagtgtctccctatcagtctgtgagcccttaatgggcaggtcactgagtcatccaggtccctgctgccttcaataaatgcttgttagatgagt

SEQ ID NO: 11909 - DNA, 1355 bp, Homo sapiens
  source 1..1355: mol_type = unassigned DNA
agcacacccggcaggctctgtcctggaaacaggcttcaacgggcttccccgaaaaccttccccgcttctggatatgaaattcaagctgcttgctgagtcctattgccggctgctgggagccaggagagccctgaggagtagtcactcagtagcagctgacgcgtgggtccaccatgaactggagtatctttgagggactcctgagtggggtcaacaagtactccacagcctttgggcgcatctggctgtctctggtcttcatcttccgcgtgctggtgtacctggtgacggccgagcgtgtgtggagtgatgaccacaaggacttcgactgcaatactcgccagcccggctgctccaacgtctgctttgatgagttcttccctgtgtcccatgtgcgcctctgggccctgcagcttatcctggtgacatgcccctcactgctcgtggtcatgcacgtggcctaccgggaggttcaggagaagaggcaccgagaagcccatggggagaacagtgggcgcctctacctgaaccccggcaagaagcggggtgggctctggtggacatatgtctgcagcctagtgttcaaggcgagcgtggacatcgcctttctctatgtgttccactcattctaccccaaatatatcctccctcctgtggtcaagtgccacgcagatccatgtcccaatatagtggactgcttcatctccaagccctcagagaagaacattttcaccctcttcatggtggccacagctgccatctgcatcctgctcaacctcgtggagctcatctacctggtgagcaagagatgccacgagtgcctggcagcaaggaaagctcaagccatgtgcacaggtcatcacccccacggtaccacctcttcctgcaaacaagacgacctcctttcgggtgacctcatctttctgggctcagacagtcatcctcctctcttaccagaccgcccccgagaccatgtgaagaaaaccatcttgtgaggggctgcctggactggtctggcaggttgggcctggatggggaggctctagcatctctcataggtgcaacctgagagtgggggagctaagccatgaggtaggggcaggcaagagagaggattcagacgctctgggagccagttcctagtcctcaactccagccacctgccccagctcgacggcactgggccagttccccctctgctctgcagctcggtttccttttctagaatggaaatagtgagggccaatgcccagggttggagggaggagggcgttcatagaagaacacacatgcgggcaccttcatcgtgtgtggcccactgtcagaacttaataaaagtcaactcatttgctggt

SEQ ID NO: 11910 - DNA, 1808 bp, Homo sapiens
  source 1..1808: mol_type = unassigned DNA
acataactgggggtgtggagagcgcctcattgccactgcagtgactaaagctgggaagacgctggtcagttcacctgccccactggttgttttttaaacaaattctgatacaggcgacatcctcactgaccgagcaaagattgacattcgtatcatcactgtgcaccattggcttctaggcactccagtggggtaggagaaggaggtctgaaaccctcgcagagggatcttgccctcattctttgggtctgaaacactggcagtcgttggaaacaggactcagggataaaccagcgcaatggattgggggacgctgcacactttcatcgggggtgtcaacaaacactccaccagcatcgggaaggtgtggatcacagtcatctttattttccgagtcatgatcctcgtggtggctgcccaggaagtgtggggtgacgagcaagaggacttcgtctgcaacacactgcaaccgggatgcaaaaatgtgtgctatgaccactttttcccggtgtcccacatccggctgtgggccctccagctgatcttcgtctccaccccagcgctgctggtggccatgcatgtggcctactacaggcacgaaaccactcgcaagttcaggcgaggagagaagaggaatgatttcaaagacatagaggacattaaaaagcagaaggttcggatagaggggtcgctgtggtggacgtacaccagcagcatctttttccgaatcatctttgaagcagcctttatgtatgtgttttacttcctttacaatgggtaccacctgccctgggtgttgaaatgtgggattgacccctgccccaaccttgttgactgctttatttctaggccaacagagaagaccgtgtttaccatttttatgatttctgcgtctgtgatttgcatgctgcttaacgtggcagagttgtgctacctgctgctgaaagtgtgttttaggagatcaaagagagcacagacgcaaaaaaatcaccccaatcatgccctaaaggagagtaagcagaatgaaatgaatgagctgatttcagatagtggtcaaaatgcaatcacaggtttcccaagctaaacatttcaaggtaaaatgtagctgcgtcataaggagacttctgtcttctccagaaggcaataccaacctgaaagttccttctgtagcctgaagagtttgtaaatgactttcataataaatagacacttgagttaactttttgtaggatacttgctccattcatacacaacgtaatcaaatatgtggtccatctctgaaaacaagagactgcttgacaaaggagcattgcagtcactttgacaggttccttttaagtggactctctgacaaagtgggtactttctgaaaatttatataactgttgttgataaggaacatttatccaggaattgatacgtttattaggaaaagatatttttataggcttggatgtttttagttctgactttgaatttatataaagtatttttataatgactggtcttccttacctggaaaaacatgcgatgttagttttagaattacaccacaagtatctaaatttggaacttacaaagggtctatcttgtaaatattgttttgcattgtctgttggcaaatttgtgaactgtcatgatacgcttaaggtggaaagtgttcattgcacaatatatttttactgctttctgaatgtagacggaacagtgtggaagcagaaggcttttttaactcatccgtttgccaatcattgcaaacaactgaaatgtggatgtgattgcctcaataaagctcgtccccattgctt

SEQ ID NO: 11911 - DNA, 2131 bp, Homo sapiens
  source 1..2131: mol_type = unassigned DNA
ccgcagcccgcccgagccgcgtcagggcagaggcggggtggggcgcggttaaaaggcgcagcaggtgggagccggggccttcacccgaaacccgacgagagcccgacagccggcggcgcccgagcccgacctgcctgcccagccggagcgaagggcgccgccccgcgcagagcccgcgccagggccgccggccgcagagcagttaaaacgtgcaggcaccagaaggcacttcctgtcggtgaagaagacctgtctccggtgtcacgggcatcctgtgttttgcaaacggggctgacctcccttcctggggagcaggaagggtcagggaaggaaaagaagtacagaagatctggctaaacaatttctgtatggcgaaagaaaaattctaacttgtacgccctcttcatgcatctttaattcaatttgaatattccaggcgacatcctcactgaccgagcaaagattgacattcgtatcatcactgtgcaccattggcttctaggcactccagtggggtaggagaaggaggtctgaaaccctcgcagagggatcttgccctcattctttgggtctgaaacactggcagtcgttggaaacaggactcagggataaaccagcgcaatggattgggggacgctgcacactttcatcgggggtgtcaacaaacactccaccagcatcgggaaggtgtggatcacagtcatctttattttccgagtcatgatcctcgtggtggctgcccaggaagtgtggggtgacgagcaagaggacttcgtctgcaacacactgcaaccgggatgcaaaaatgtgtgctatgaccactttttcccggtgtcccacatccggctgtgggccctccagctgatcttcgtctccaccccagcgctgctggtggccatgcatgtggcctactacaggcacgaaaccactcgcaagttcaggcgaggagagaagaggaatgatttcaaagacatagaggacattaaaaagcagaaggttcggatagaggggtcgctgtggtggacgtacaccagcagcatctttttccgaatcatctttgaagcagcctttatgtatgtgttttacttcctttacaatgggtaccacctgccctgggtgttgaaatgtgggattgacccctgccccaaccttgttgactgctttatttctaggccaacagagaagaccgtgtttaccatttttatgatttctgcgtctgtgatttgcatgctgcttaacgtggcagagttgtgctacctgctgctgaaagtgtgttttaggagatcaaagagagcacagacgcaaaaaaatcaccccaatcatgccctaaaggagagtaagcagaatgaaatgaatgagctgatttcagatagtggtcaaaatgcaatcacaggtttcccaagctaaacatttcaaggtaaaatgtagctgcgtcataaggagacttctgtcttctccagaaggcaataccaacctgaaagttccttctgtagcctgaagagtttgtaaatgactttcataataaatagacacttgagttaactttttgtaggatacttgctccattcatacacaacgtaatcaaatatgtggtccatctctgaaaacaagagactgcttgacaaaggagcattgcagtcactttgacaggttccttttaagtggactctctgacaaagtgggtactttctgaaaatttatataactgttgttgataaggaacatttatccaggaattgatacgtttattaggaaaagatatttttataggcttggatgtttttagttctgactttgaatttatataaagtatttttataatgactggtcttccttacctggaaaaacatgcgatgttagttttagaattacaccacaagtatctaaatttggaacttacaaagggtctatcttgtaaatattgttttgcattgtctgttggcaaatttgtgaactgtcatgatacgcttaaggtggaaagtgttcattgcacaatatatttttactgctttctgaatgtagacggaacagtgtggaagcagaaggcttttttaactcatccgtttgccaatcattgcaaacaactgaaatgtggatgtgattgcctcaataaagctcgtccccattgctt

SEQ ID NO: 11912 - DNA, 1805 bp, Homo sapiens
  source 1..1805: mol_type = unassigned DNA
cgacgagagcccgacagccggcggcgcccgagcccgacctgcctgcccagccggagcgaagggcgccgccccgcgcagagcccgcgccagggccgccggccgcagagcaggcgacatcctcactgaccgagcaaagattgacattcgtatcatcactgtgcaccattggcttctaggcactccagtggggtaggagaaggaggtctgaaaccctcgcagagggatcttgccctcattctttgggtctgaaacactggcagtcgttggaaacaggactcagggataaaccagcgcaatggattgggggacgctgcacactttcatcgggggtgtcaacaaacactccaccagcatcgggaaggtgtggatcacagtcatctttattttccgagtcatgatcctcgtggtggctgcccaggaagtgtggggtgacgagcaagaggacttcgtctgcaacacactgcaaccgggatgcaaaaatgtgtgctatgaccactttttcccggtgtcccacatccggctgtgggccctccagctgatcttcgtctccaccccagcgctgctggtggccatgcatgtggcctactacaggcacgaaaccactcgcaagttcaggcgaggagagaagaggaatgatttcaaagacatagaggacattaaaaagcagaaggttcggatagaggggtcgctgtggtggacgtacaccagcagcatctttttccgaatcatctttgaagcagcctttatgtatgtgttttacttcctttacaatgggtaccacctgccctgggtgttgaaatgtgggattgacccctgccccaaccttgttgactgctttatttctaggccaacagagaagaccgtgtttaccatttttatgatttctgcgtctgtgatttgcatgctgcttaacgtggcagagttgtgctacctgctgctgaaagtgtgttttaggagatcaaagagagcacagacgcaaaaaaatcaccccaatcatgccctaaaggagagtaagcagaatgaaatgaatgagctgatttcagatagtggtcaaaatgcaatcacaggtttcccaagctaaacatttcaaggtaaaatgtagctgcgtcataaggagacttctgtcttctccagaaggcaataccaacctgaaagttccttctgtagcctgaagagtttgtaaatgactttcataataaatagacacttgagttaactttttgtaggatacttgctccattcatacacaacgtaatcaaatatgtggtccatctctgaaaacaagagactgcttgacaaaggagcattgcagtcactttgacaggttccttttaagtggactctctgacaaagtgggtactttctgaaaatttatataactgttgttgataaggaacatttatccaggaattgatacgtttattaggaaaagatatttttataggcttggatgtttttagttctgactttgaatttatataaagtatttttataatgactggtcttccttacctggaaaaacatgcgatgttagttttagaattacaccacaagtatctaaatttggaacttacaaagggtctatcttgtaaatattgttttgcattgtctgttggcaaatttgtgaactgtcatgatacgcttaaggtggaaagtgttcattgcacaatatatttttactgctttctgaatgtagacggaacagtgtggaagcagaaggcttttttaactcatccgtttgccaatcattgcaaacaactgaaatgtggatgtgattgcctcaataaagctcgtccccattgctt

SEQ ID NO: 11913 - DNA, 1927 bp, Homo sapiens
  source 1..1927: mol_type = unassigned DNA
acgagagcccgacagccggcggcgcccgagcccgacctgcctgcccagccggagcgaagggcgccgccccgcgcagagcccgcgccagggccgccggccgcagagcagttaaaacgtgcaggcaccagaaggcacttcctgtcggtgaagaagacctgtctccggtgtcacgggcatcctgtgttttgcaaacggggctgacctcccttcctggggagcaggaagggtcagggcgacatcctcactgaccgagcaaagattgacattcgtatcatcactgtgcaccattggcttctaggcactccagtggggtaggagaaggaggtctgaaaccctcgcagagggatcttgccctcattctttgggtctgaaacactggcagtcgttggaaacaggactcagggataaaccagcgcaatggattgggggacgctgcacactttcatcgggggtgtcaacaaacactccaccagcatcgggaaggtgtggatcacagtcatctttattttccgagtcatgatcctcgtggtggctgcccaggaagtgtggggtgacgagcaagaggacttcgtctgcaacacactgcaaccgggatgcaaaaatgtgtgctatgaccactttttcccggtgtcccacatccggctgtgggccctccagctgatcttcgtctccaccccagcgctgctggtggccatgcatgtggcctactacaggcacgaaaccactcgcaagttcaggcgaggagagaagaggaatgatttcaaagacatagaggacattaaaaagcagaaggttcggatagaggggtcgctgtggtggacgtacaccagcagcatctttttccgaatcatctttgaagcagcctttatgtatgtgttttacttcctttacaatgggtaccacctgccctgggtgttgaaatgtgggattgacccctgccccaaccttgttgactgctttatttctaggccaacagagaagaccgtgtttaccatttttatgatttctgcgtctgtgatttgcatgctgcttaacgtggcagagttgtgctacctgctgctgaaagtgtgttttaggagatcaaagagagcacagacgcaaaaaaatcaccccaatcatgccctaaaggagagtaagcagaatgaaatgaatgagctgatttcagatagtggtcaaaatgcaatcacaggtttcccaagctaaacatttcaaggtaaaatgtagctgcgtcataaggagacttctgtcttctccagaaggcaataccaacctgaaagttccttctgtagcctgaagagtttgtaaatgactttcataataaatagacacttgagttaactttttgtaggatacttgctccattcatacacaacgtaatcaaatatgtggtccatctctgaaaacaagagactgcttgacaaaggagcattgcagtcactttgacaggttccttttaagtggactctctgacaaagtgggtactttctgaaaatttatataactgttgttgataaggaacatttatccaggaattgatacgtttattaggaaaagatatttttataggcttggatgtttttagttctgactttgaatttatataaagtatttttataatgactggtcttccttacctggaaaaacatgcgatgttagttttagaattacaccacaagtatctaaatttggaacttacaaagggtctatcttgtaaatattgttttgcattgtctgttggcaaatttgtgaactgtcatgatacgcttaaggtggaaagtgttcattgcacaatatatttttactgctttctgaatgtagacggaacagtgtggaagcagaaggcttttttaactcatccgtttgccaatcattgcaaacaactgaaatgtggatgtgattgcctcaataaagctcgtccccattgctt

SEQ ID NO: 11914 - DNA, 2173 bp, Homo sapiens
  source 1..2173: mol_type = unassigned DNA
ttcattccgttaagttctacacattgtgttgcagggctgaaaaagcacgagtgtccgcactatgacaaaagaaaagcggcgtctcctcaaaacaccaccatgttcccctatgagtctggtgagccaagacactaagaaactgcaggaaacgagagagttctcggggtgggggtgtccatggatgaagcaccgaacaaactggagcccgcaagagtcttgccttcttttgagcctaagtcatgagttggatgttcctcagagatctcctgagtggagtaaataaatactccactgggactggatggatttggctggctgtcgtgtttgtcttccgtttgctggtctacatggtggcagcagagcacgtgtggaaagatgagcagaaagagtttgagtgcaacagtagacagcccggttgcaaaaatgtgtgttttgatgacttcttccccatttcccaagtcagactttgggccttacaactgataatggtctccacaccttcacttctggtggttttacatgtagcctatcatgagggtagagagaaaaggcacagaaagaaactctatgtcagcccaggtacaatggatgggggcctatggtacgcttatcttatcagcctcattgttaaaactggttttgaaattggcttccttgttttattttataagctatatgatggctttagtgttccctaccttataaagtgtgatttgaagccttgtcccaacactgtggactgcttcatctccaaacccactgagaagacgatcttcatcctcttcttggtcatcacctcatgcttgtgtattgtgttgaatttcattgaactgagttttttggttctcaagtgctttattaagtgctgtctccaaaaatatttaaaaaaacctcaagtcctcagtgtgtgagtgccacagcctcagatatgttgaatgtggtaggagagggacccctcccctactccagaatcttcacacttggccataaacacactccctctacctgaagcaaagctactctgtgacacacaagagggttaaacaaagaaaacctgcatccctcctcagcaaggcctaagctgagttggaagacaaagcacatcagccttagtatcatttgggaggaatttttttacattgtcaatatgctttcagttatgagctctagacagaggtctcattgttttgttgtagggttctccagtatgtggataacattagttgttttagaataggtaattgcaaattagtctgaagaaatctaacaggattcttttaagagcttagatttttcagggaaaaaaaaaaaaaaagaaaccctgtgtcagttttctgttttttctaactatctcattacaattggtgcacaatgaactggaaaatataaaaagtgacactttaggcaaatgtgatggcctccgagctgaaatgaaggaactggcaatctttccaaagtggcagccaaggccccactccctgtcctactcaatctctgcagggaaaaactgtgggataggatagcagccagctggggacacacagaggaacattcaacaggaaggtcccgcctagggaaaaggccacagagcccaggcctcttgccgattcagggatccttggatataagtggattagaggagagggaggaaagctatcatttcagtggtctccaaatcaagtagaaatattactgggaggtatcccacttaagcctgaaccagcagacatccgaaagggtcactctagagtcagaaaggaaagcaggtcccccagaaggcaacacattgataggaagtggaggccacagaaaaagaatgtgcccacttgataattacttaagacttctatttaaccaaaagaacattgaaatactttgtaaatattcatattgttgaacctttcataatcaggaattcactatgtactatactgtaagtcatagttcgcctataatttactagtatatctccctctaggacagatagtaaaatgtgtactatgttgttacagtggtgcaaaaatgttttaaaagtttatcacttgttttgaagactagaactttctttacttttctatattttcttagcaattcacagatatgttctctttggatttagtactttaacatatgtacatttcttcagaataaaaataagggtatttcacaatgc

SEQ ID NO: 11915 - DNA, 571 bp, Homo sapiens
  source 1..571: mol_type = unassigned DNA
aaatcaaatgagtaactgactggatctcttattaatctccacatctgtgtaaagagagtcttgccttcttttgagcctaagtcatgagttggatgttcctcagagatctcctgagtggagtaaataaatactccactgggactggatggatttggctggctgtcgtgtttgtcttccgtttgctggtctacatggtggcagcagagcacgtgtggaaagatgagcagaaagagtttgagtgcaacagtagacagcccggttgcaaaaatgtgtgttttgatgacttcttccccatttcccaagtcagactttgggccttacaactgataatggtctccacaccttcacttctggtggttttacatgtagcctatcatgagggtagagagaaaaggcacagaaagaaactctatgtcagcccaggtacaatggatgggggcctatggtacgcttatcttatcagcctcattgttaaaactggttttgaaattggcttccttgttttattttataagctatatgatggctttagtgttccctaccttataaagtgtgatttgaagccttgtcc

SEQ ID NO: 11916 - DNA, 2281 bp, Homo sapiens
  source 1..2281: mol_type = unassigned DNA
ggggaggagccaagatggctgaataggaacagctccggtctacagctcccagagtgagcaacgcagaagatgggtgatttctgcatttccagtcgaggtaccgggttcatctcactagggagtgccagacactgggcgcagggctgaaaaagcacgagtgtccgcactatgacaaaagaaaagcggcgtctcctcaaaacaccaccatgttcccctatgagtctggtgagccaagacactaagaaactgcaggaaacgagagagttctcggggtgggggtgtccatggatgaagcaccgaacaaactggagcccgcaagagtcttgccttcttttgagcctaagtcatgagttggatgttcctcagagatctcctgagtggagtaaataaatactccactgggactggatggatttggctggctgtcgtgtttgtcttccgtttgctggtctacatggtggcagcagagcacgtgtggaaagatgagcagaaagagtttgagtgcaacagtagacagcccggttgcaaaaatgtgtgttttgatgacttcttccccatttcccaagtcagactttgggccttacaactgataatggtctccacaccttcacttctggtggttttacatgtagcctatcatgagggtagagagaaaaggcacagaaagaaactctatgtcagcccaggtacaatggatgggggcctatggtacgcttatcttatcagcctcattgttaaaactggttttgaaattggcttccttgttttattttataagctatatgatggctttagtgttccctaccttataaagtgtgatttgaagccttgtcccaacactgtggactgcttcatctccaaacccactgagaagacgatcttcatcctcttcttggtcatcacctcatgcttgtgtattgtgttgaatttcattgaactgagttttttggttctcaagtgctttattaagtgctgtctccaaaaatatttaaaaaaacctcaagtcctcagtgtgtgagtgccacagcctcagatatgttgaatgtggtaggagagggacccctcccctactccagaatcttcacacttggccataaacacactccctctacctgaagcaaagctactctgtgacacacaagagggttaaacaaagaaaacctgcatccctcctcagcaaggcctaagctgagttggaagacaaagcacatcagccttagtatcatttgggaggaatttttttacattgtcaatatgctttcagttatgagctctagacagaggtctcattgttttgttgtagggttctccagtatgtggataacattagttgttttagaataggtaattgcaaattagtctgaagaaatctaacaggattcttttaagagcttagatttttcagggaaaaaaaaaaaaaaagaaaccctgtgtcagttttctgttttttctaactatctcattacaattggtgcacaatgaactggaaaatataaaaagtgacactttaggcaaatgtgatggcctccgagctgaaatgaaggaactggcaatctttccaaagtggcagccaaggccccactccctgtcctactcaatctctgcagggaaaaactgtgggataggatagcagccagctggggacacacagaggaacattcaacaggaaggtcccgcctagggaaaaggccacagagcccaggcctcttgccgattcagggatccttggatataagtggattagaggagagggaggaaagctatcatttcagtggtctccaaatcaagtagaaatattactgggaggtatcccacttaagcctgaaccagcagacatccgaaagggtcactctagagtcagaaaggaaagcaggtcccccagaaggcaacacattgataggaagtggaggccacagaaaaagaatgtgcccacttgataattacttaagacttctatttaaccaaaagaacattgaaatactttgtaaatattcatattgttgaacctttcataatcaggaattcactatgtactatactgtaagtcatagttcgcctataatttactagtatatctccctctaggacagatagtaaaatgtgtactatgttgttacagtggtgcaaaaatgttttaaaagtttatcacttgttttgaagactagaactttctttacttttctatattttcttagcaattcacagatatgttctctttggatttagtactttaacatatgtacatttcttcagaataaaaataagggtatttcacaatgct

SEQ ID NO: 11917 - DNA, 2889 bp, Homo sapiens
  source 1..2889: mol_type = unassigned DNA
gctcggccctggcctcgcaggctgccgcgccggagcgccaggtgcccgctgaagtagcaggaacagagccggtgttcggaccctcccctggcccccaacctgcggcggagagcggcgctgagacttctcctgggcgggcgagcgctggaggacctgcaggctgccaccccgccccgcccctcgtcccggcgtccgcgggatccagacccgaaccccggacggcgcccgaggttcgtgccctctctctagaccgcgccaactgccccatcggtcgggacgcgcttggatttctttccccatttcttctcttttaagtacaataaaaggaaagggggattcgaggattttttaaaaaattgcttctttaattgggaggcaattcactcccattctggaagtgcggcccggggaggggccaggagcgggaacgtgcccggtgctgcccagtctttgtctgctgcctccggatgcacagcgatgggggaatggaccatcttggagaggctgctagaagccgcggtgcagcagcactccactatgatcgggaggatcctgttgactgtggtggtgatcttccggatcctcattgtggccattgtgggggagacggtgtacgatgatgagcagaccatgtttgtgtgcaacaccctgcagcccggctgtaaccaggcctgctatgaccgcgccttccccatctcccacatacgttactgggtcttccagatcataatggtgtgtacccccagtctttgcttcatcacctactctgtgcaccagtccgccaagcagcgagaacgccgctactctacagtcttcctagccctggacagagacccccctgagtccataggaggtcctggaggaactgggggtgggggcagtggtgggggcaaacgagaagataagaagttgcaaaatgctattgtgaatggggtgctgcagaacacagagaacaccagtaaggagacagagccagattgtttagaggttaaggagctgactccacacccatcaggtctacgcactgcatcaaaatccaagctcagaaggcaggaaggcatctcccgcttctacattatccaagtggtgttccgaaatgccctggaaattgggttcctggttggccaatattttctctatggctttagtgtcccagggttgtatgagtgtaaccgctacccctgcatcaaggaggtggaatgttatgtgtcccggccaactgagaagactgtctttctagtgttcatgtttgctgtaagtggcatctgtgttgtgctcaacctggctgaactcaaccacctgggatggcgcaagatcaagctggctgtgcgaggggctcaggccaagagaaagtcaatctatgagattcgtaacaaggacctgccaagggtcagtgttcccaattttggcaggactcagtccagtgactctgcctatgtgtgagagggcaggtttcatgaaggtctgggggatggcaaggagccccaaggcagatgactgctcagacgtggctgtatccaccctcatttatgtgaccctcaccattaagatgtaggataagactggataaaagaagattttgcaccaatgggaaaggaggaaaagtggacccattttcacatatcacctaattggttctacagagacgattgggtagagtgatgaaatggatcaattagacttctttggtccctttctgtttatggcctagcctgatcctgataacactgaacttgcacagctaccaagtaggacttagccctgctgagctctttattctggtgaatggtgtgagttgagtacttcattgatataaaatttgtgacctatctcaacccatccctttatcctgagccatgggacaaacatccttgaggcactcttcatgtatctcccccaccagcatgcccctttccctcaatccaaaatagcatgccagctttttttttttttttttttttttttccagaatctggccttacattagacctaatatgttttatttgcaaacttagagggaattacatggggtgcttattggagaacggccatggcagaggttttcattagagccccatctgactggcccttagtcgtgatgaaaaccttaggaatgtctcaatatttccagttttctaactcaaactgcactggtgctgtttactagggatgggggatgggtgggagggagggaattgcaatatgcaactacaacacttttgtgagattgttgttgcacagttaggcacacggttacgagcttcaggatatttctgccttccagcttgtggactttggttaacattaaaaagattttttttggctaatatcaagagtgtctagctgagccacagcatttgtaactggtgtatctcactcattttcttacatagttttgttgtgcaacacagctgcacggtcattttgccatgatttgaatttacctgtgtgcttacaccagagaccttaatcatcccatgtcaatcctgatttattattttttcagttactctttgaaacacacacacatatacagacacacatacaaaattactggcttaaaagacctgcaactaaacactattggctaacgtgtgtttacggtgacttatttgagacatataccaaaggttcaaaaacctattgcattggactgtcaatatgttttcttctttttgctcttatttatttaagtgccatactgtacctttcatatccactgtgtatttagttaaaatattggccaagagaaacatctgggtaatgtgcttttatgaagccctttgttccctttgaattatcattatcatttttgatttagatatggacatggtgtaacacacaactaaggatttgtttaaaataaagttcttgcctttttttgtaaaa

SEQ ID NO: 11918 - DNA, 891 bp, Homo sapiens
  source 1..891: mol_type = unassigned DNA
atgggggagtgggcgttcctgggctcgctgctggacgccgtgcagctgcagtcgccgctcgtgggccgcctctggctggtggtcatgctgatcttccgcatcctggtgctggccacggtgggcggcgccgtgttcgaggacgagcaagaggagttcgtgtgcaacacgctgcagccgggctgtcgccagacctgctacgaccgcgccttcccggtctcccactaccgcttctggctcttccacatcctgctgctctcggcgcccccggtgctgttcgtcgtctactccatgcaccgggcaggcaaggaggcgggcggcgctgaggcggcggcgcagtgcgcccccggactgcccgaggcccagtgcgcgccgtgcgccctgcgcgcccgccgcgcgcgccgctgctacctgctgagcgtggcgctgcgcctgctggccgagctgaccttcctgggcggccaggcgctgctctacggcttccgcgtggccccgcacttcgcgtgcgccggtccgccctgcccgcacacggtcgactgcttcgtgagccggcccaccgagaagaccgtcttcgtgctcttctatttcgcggtggggctgctgtcggcgctgctcagcgtagccgagctgggccacctgctctggaagggccgcccgcgcgccggggagcgtgacaaccgctgcaaccgtgcacacgaagaggcgcagaagctgctcccgccgccgccgccgccaccacctattgttgtcacttgggaagaaaacagacaccttcaaggagagggctcccctggtagcccccaccccaagacagagctggatgcccctcgcttccgtagggaaagcacttctcctgcaggatggcattgctctctccccttccatggcacgtag

SEQ ID NO: 11919 - DNA, 1580 bp, Homo sapiens
  source 1..1580: mol_type = unassigned DNA
agaaaaacccacctcctactcctggctcagacctttgctttcttatctccagctcacacctttaagtcttatgtagttaaaggacatttatccgcctccttggagaacacagccctccagtgtctcctgcagcctggagcctgggacattctggaagcatggaaggcgtggacttgctagggtttctcatcatcacattaaactgcaacgtgaccatggtgggaaagctctggttcgtcctcacgatgctgctgcggatgctggtgattgtcttggcggggcgacccgtctaccaggacgagcaggagaggtttgtctgcaacacgctgcagccgggatgcgccaatgtttgctacgacgtcttctcccccgtgtctcacctgcggttctggctgatccagggcgtgtgcgtcctcctcccctccgccgtcttcagcgtctatgtcctgcaccgaggagccacgctcgccgcgctgggcccccgccgctgccccgacccccgggagccggcctccgggcagagacgctgcccgcggccattcggggagcgcggcggcctccaggtgcccgacttttcggccggctacatcatccacctcctcctccggaccctgctggaggcagccttcggggccttgcactactttctctttggattcctggccccgaagaagttcccttgcacgcgccctccgtgcacgggcgtggtggactgctacgtgtcgcggcccacagagaagtccctgctgatgctgttcctctgggcggtcagcgcgctgtcttttctgctgggcctcgccgacctggtctgcagcctgcggcggcggatgcgcaggaggccgggaccccccacaagcccctccatccggaagcagagcggagcctcaggccacgcggagggacgccggactgacgaggagggtgggcgggaggaagagggggcaccggcgcccccgggtgcacgcgccggaggggagggggctggcagccccaggcgtacatccagggtgtcagggcacacgaagattccggatgaggatgagagtgaggtgacatcctccgccagcgaaaagctgggcagacagccccggggcaggccccaccgagaggccgcccaggaccccaggggctcaggatccgaggagcagccctcagcagcccccagccgcctggccgcgcccccttcctgcagcagcctgcagccccctgacccgcctgccagctccagtggtgctccccacctgagagccaggaagtctgagtgggtgtgaaaaaaacagcacctggcggtgccccggggctcacgcctgtaatcccaacactttgggaggcccaggcaggaggatcgtttgagaatatatctccttgcccaagagtttgagaccagcctggacaacataatgagaccctcgtctctacaaaatatctaaaaattagctgggcacagtggctccctcctgtagtcccagctacttgggaggctgagatgggaggaccatttgagcctgggagatcgaggctgcagtgagccaagatcacggcactgcgctgcagcctgggcaacacagtgagaccctgtc

SEQ ID NO: 11920 - DNA, 7644 bp, Homo sapiens
  source 1..7644: mol_type = unassigned DNA
ggcagcggcgggagcggcttctgcctcggctggagactgaggcgaaggcggcagcggcggaggaggtggaggagaggcgagggtgaaggcgatggcgacgcggggcacatgaggccgcgaccggcgggacgggccgaggcccggcggaggaggcggctccgggggaacccgccgccggagggaatctggaaaaattgcaatcaaaacatcatttctctaagaaaattttgggtaaccgaagttctggacaacagggcataccaattcaatcaccatgagttggagcttcctgactcgcctgctagaggagattcacaaccattccacatttgtggggaagatctggctcactgttctgattgtcttccggatcgtccttacagctgtaggaggagaatccatctattacgatgagcaaagcaaatttgtgtgcaacacagaacagccgggctgtgagaatgtctgttatgatgcgtttgcacctctctcccatgtacgcttctgggtgttccagatcatcctggtggcaactccctctgtgatgtacctgggctatgctatccacaagattgccaaaatggagcacggtgaagcagacaagaaggcagctcggagcaagccctatgcaatgcgctggaaacaacaccgggctctggaagaaacggaggaggacaacgaagaggatcctatgatgtatccagagatggagttagaaagtgataaggaaaataaagagcagagccaacccaaacctaagcatgatggccgacgacggattcgggaagatgggctcatgaaaatctatgtgctgcagttgctggcaaggaccgtgtttgaggtgggttttctgatagggcagtattttctgtatggcttccaagtccacccgttttatgtgtgcagcagacttccttgtcctcataagatagactgctttatttctagacccactgaaaagaccatcttccttctgataatgtatggtgttacaggcctttgcctcttgcttaacatttgggagatgcttcatttagggtttgggaccattcgagactcactaaacagtaaaaggagggaacttgaggatccgggtgcttataattatcctttcacttggaatacaccatctgctccccctggctataacattgctgtcaaaccagatcaaatccagtacaccgaactgtccaatgctaagatcgcctacaagcaaaacaaggccaacacagcccaggaacagcagtatggcagccatgaggagaacctcccagctgacctggaggctctgcagcgggagatcaggatggctcaggaacgcttggatctggcagttcaggcctacagtcaccaaaacaaccctcatggtccccgggagaagaaggccaaagtggggtccaaagctgggtccaacaaaagcactgccagtagcaaatcaggggatgggaagacctccgtctggatttaatcctggcgggcttaaaacctgtgcttttcatagtttatggtaagcagcagctcactgaataatgacttccattgagtaaacatttggctctggttatcttcagggatgctgttggctcatgatccaagctcaggggactctggaggcggggctgggctgagggagagaaagggaaacacagtgttcccaggcacatgttcttagcaataatacagttgcagaactttacatttgtgtcttccagatctggagaagaacagacatatttaaatcattcttgttgaacagtttttgtatgtacagtattatggtacttttttttttttagtatgagaactttttttgtatttgtacattgaactgctgtagttatacttttatattaaaggggaaaaagtccttataaataatgcctattaggctagtgctattactttgttcagcaaattctaccctggctttagagtttttaatagatgctacacctaataaaagtgcctctcatattgcaggaacgatttcagatgtgtaaggagactgaagaggagataccagtttttagtcttggaaagcaagttcacagtagaaggaggttgagatctttcttttatgtgagaaatctttgaatctcattcatgcgatcagagttgtagccaatttttgaaaaccttattttcaaaggaaataaatgattcactgtaggattcctttaaatatcaagcatcaccagtatatgctttgatggtatatgtatataacttaaagttctttcaaaagcctgatacagaaacgtgtccccagtttggtagcaatgtggaaaacctggctagagatgatatggagctgtccctcagaaagcaaagccatgcctggaatccctaataggctgcttagttgtgaacctgtttgatttgccttaagcctctatccagaaacctgcccgcttccgtctggttaagaagccagtggtggatattttctttgttaacattagaaatgcaaacattcccttgtcaaccaagaatactcaaagctacttgtattggaaatggcagaaggcctaaatccaaatttcttattttttataatttaccatagaagttttgtgattaaattcttacttctgccagtggaggtttatgcctgaaaggtcatggggtcctgtctgtaaatagacctaaagagaagtgcagtatttattctttgtaggcataatgtgtttgtcactgacaagcattcatgttcatcccactagtcttttattgcagtcttttattgtcattttcagccttatgttggagagctttgctttctcatcatgttcacattgtcttaagttttgtgagcttctgagaaagagcttggtaaaggtttaaaggggactttgttccaccagggagcattttatttgggcgtctcacccttttctaatgaaagctgttgtaagccacctctgacttggaaattctgaaagtatgaatattttttatatcttaattgtaaaatgccagttctccattatttagatgaatagtagaacactgcaccctttgtgcagtgtttttgtttctctactgcattcctacccccaccaaaaaaaagaaacttaaggaaatttttttttgagacagggtctccctctttcacccaggctggagtgcagcagcatgatctcagctcactgcagcctctgcctcccaggctcaagcaatcattccacctcagcctcttgattagctgggactacaggcatgtgccaccatactcggctaattctgttttaaaaattttttttgtagagatgaggtctcactatgttacccaggctggtctcgaacttttgggttcaagtgatcctcccgcctcagcctctcaaagtgttagtattataggtgtgagccaccatgcccagcctagaaaatttaaccttatcttttagccattcatttacttttatttgcttttttaaaaaaaaatctttaaattttagcctagagaagcacctcaggaactctaaacatcttaggcaaaaattaaactcaggtgagactgaaggagaaatttcagaaatacacatgtacctcatgggtaattaatagacatgcacagtttccttcaaatcaaatgtttaataaggaaattcatataattccaagaaaacaggcaaaatttggaatacataagcctagctaagataaagaactaccagttaattcttaacatcactggagcttccagcaggttttttaattgaaggacaaaaagtgtccatacatttgtgttatctcttcagagcctgagggagaagagagtggctttgcccagtggaaaggctggggatttgagaatgatacagggggaaggagtcaagcagaaatgccaggaagaaccaggcaaagacatttggcgccagaagcatccacttaatttctgtgaagagtgcccctggtgtttcatcttggcctgttttgatgagaatgttatcttttgtgtctggataacgcgtcagcttcttaaagtacatataaagatattctgtcacctccccacatgcacacacttttaaaatctatttttattctcttgctaaagttgtaattatgtcaagaattttccagctctaactgccttcttagtacatgtctttctgcctttgaagcatatgagtttgccaaagtcattctcccctaatgacatattgtggacttacattaagaaaatgggccaggcgcggtggctcacacctgtaatcccagcactttaggaggcccaggcgggtggattacctgaggtcaggagttcaagaccagactggtcaacatggtgaaactccatctctactaaaaatacagaaattagccaggagtgctgggtggacgcctgcaatcccagctacttgggaggttgaggcaggagaattgcttgaacccaggaggcagaggttgcagtgagctgagatcataccattgcactccagcctgcaagacagagtgaaactcttgtctcaaaaaaaaaaaaagaaaaaaagaaagtgagcctgttgatgtctagctaacccattggtggagtctgcattgaatctgtaagaatattgttctggatcatgcaggtgggatttgtataaaaagcctgtccaacatttagttctcactcgcatcagaatcatactgttttgaattgccatataagacatgctccatcatgacacttgcttctcctccaaatacaagttgagtgcttagtccttcacctgctagaatcaggatacaatcaacatgattatgttccttaacacacttggatttatgcagatgtggtgtgtcctttgctcttttttttcttaagacagagtcttgctcttgtcgctcaggctggagtgcagtggtgtgatttcggctcactgcaacctccgcctcctgggttcaagcgattctcctgcctcagcctcccgagtagctgggattacaggcaccaccaccataccaggctgattttttttgtatttttaatatagacagggcttcatcatgttggccaggctggcaggctggtctcgaactcctcacctcgtgatccgcccacctcagcttcccaaagtgctgtgattacaggcgtgagccaccgcgcctggcctgctcttaaaacccgttattcagaagatttgtaaaagaaataggctttttttttttttttggttaattcaaacgaggggaaaattagatagcattttcccctaaagaaatgttaatgttcattttgtggctttgttttcaagtttcaggagccatgtacatctcagaagtgttacgaagtgattagaaaaggcctctggtaaaagaccttcaaggaccaaccattattattggtcacttgtttgaacttggcgcttaaaaaaaaagttggactgtgatgctttggtgctctttatcacagacatcagtgatggtctgaaacactctctagcagtttatacgaagaatggacttacatgttatcagttacactcatgatttactcgttcagcttctacaagtccatactttatgctgtctcatttaagagacagtccacttctgaaaataaaatcgatagttgatgatacatttttggctagccagctttctgtaaaaggcaagtatgttagacatgcacagtttccttcaaatcaaatgtttaataaggtacttcaagaaacgcctttttaaaaatcaaaggttttggccaggcatggtggctcacgcctgtaatcccagcactttgggaggccaaggtgggcgaatcacaaggtcaggagtttgagaccagcctggccaacatggtgaaaccccgtctctactaaaaataccaaaaattagccgggcgtggtggtgggtacctgtaatcccagctactcaggaggctgagatgagaatcacttgatcccaggaggtagaggttgcagtgagccgagattgcgccattgcacttcagcctgggcaacgagtgaaactctcaaaaaaaaattcatagtaataataaagtccctgcatgcagtttggaaataaaatttaaactcatttatgtgtaataaatatgtaataattcacagtcaccatcaaatgttggaatcattgaattgcatacttgtactcattccggccacatcatgaagtgtttaaagatttgtatttgctgttgtccctatgtagttctattgatgtttggttttgttttttggggtttgttttgagcccaggctagagtgcaatggcacaatctcaactcactacagcctggacctccttggctcaagcagtcctcccacttcagcctcccaagtagctggtctgcaagtgctcaccaccacacctggctaatttttgtattttttgtagagacagagctctcactatgttgcctagactggtctcaaactcctgggcccaagcaatcctcccatcacagcctccgaaggtgctgggattacaggcataagccactgtgcccagcctgtttttaataatgatattaagtgggtttggttcatgtgttattaatcagtgttaataatcgtacttttttttttttttaaaagaaaccatggtattctaaaatcaggagtccaaataaaagaaagttctcggctgtgcatggtggctaacacctgtaatcccagcactttgggaggctgaggtgggtggatcactagaggtcaggagtttgaaacaagcctggccaacatggtaaaaccccctctctactaaaaatacaaaaattagccgggcatggtggtgcacacctgtaatcccagctactcgggatgttgaggcatgagatttccttgaacctggaaggcagaggttgctgtgagccgagatcgcgccactgcactccagcctgggtgacagagtaagactgtcgccaaaaaagaggaaaaaagttatccagtgcagtttctacagagataaaagaagtaatagttctggctgggtgtggtggcttatgcctgtaatcccaacactttgggaggccaaggcaggtggatcacatgaggtcaggagttcgagaccagcctggccaacatggcaaaactgtctctactaaaaatataaaaattaggtatggtggcacgtgcctgtacttacagctacttgggaggctgaggcatgagatgacaatctcttgaacccaggaggcggaggttgcagtgagctgagattgcaccactgcactccagcttgggtgatggagtgagactcaaataaaaaaggtactagttctgcatttcagagttggcttgttgaaccaggctatatgcttccaagatttaaatgtttttctgtattatactctcaattgtgttttaaaaaaatctcttacagaaatctctacctcaggcactaagtgttatgacatgggtagcatattgatattgaaaacttagctaggacttccagccttttaagataatttaaatgtaaaattaaatggttaaccagcaatctaatgtcatgtggtgtgcagtttggatattgcatgaacagctaaggaatcacctgttctagtgccaaagatcactcattgctaattttgttctgtacagcttatgtaatattttcatggtggagacggactctgtgtgctcagggccttgtctctaggaagattttgtcaattccaaatacagttttgaagattca

SEQ ID NO: 11921 - DNA, 7640 bp, Homo sapiens
  source 1..7640: mol_type = unassigned DNA
actgctaagagccccgactctagctagatccacgcagggcccgccagatcctcgaggaattgtagagcagaacctgggaggagacattagcatcccgtgctacaatggaccaaggcctcggcggagcgcgcagaagacaactctgggcccgctaaaccaacccaggatacccagagggaatctggaaaaattgcaatcaaaacatcatttctctaagaaaattttgggtaaccgaagttctggacaacagggcataccaattcaatcaccatgagttggagcttcctgactcgcctgctagaggagattcacaaccattccacatttgtggggaagatctggctcactgttctgattgtcttccggatcgtccttacagctgtaggaggagaatccatctattacgatgagcaaagcaaatttgtgtgcaacacagaacagccgggctgtgagaatgtctgttatgatgcgtttgcacctctctcccatgtacgcttctgggtgttccagatcatcctggtggcaactccctctgtgatgtacctgggctatgctatccacaagattgccaaaatggagcacggtgaagcagacaagaaggcagctcggagcaagccctatgcaatgcgctggaaacaacaccgggctctggaagaaacggaggaggacaacgaagaggatcctatgatgtatccagagatggagttagaaagtgataaggaaaataaagagcagagccaacccaaacctaagcatgatggccgacgacggattcgggaagatgggctcatgaaaatctatgtgctgcagttgctggcaaggaccgtgtttgaggtgggttttctgatagggcagtattttctgtatggcttccaagtccacccgttttatgtgtgcagcagacttccttgtcctcataagatagactgctttatttctagacccactgaaaagaccatcttccttctgataatgtatggtgttacaggcctttgcctcttgcttaacatttgggagatgcttcatttagggtttgggaccattcgagactcactaaacagtaaaaggagggaacttgaggatccgggtgcttataattatcctttcacttggaatacaccatctgctccccctggctataacattgctgtcaaaccagatcaaatccagtacaccgaactgtccaatgctaagatcgcctacaagcaaaacaaggccaacacagcccaggaacagcagtatggcagccatgaggagaacctcccagctgacctggaggctctgcagcgggagatcaggatggctcaggaacgcttggatctggcagttcaggcctacagtcaccaaaacaaccctcatggtccccgggagaagaaggccaaagtggggtccaaagctgggtccaacaaaagcactgccagtagcaaatcaggggatgggaagacctccgtctggatttaatcctggcgggcttaaaacctgtgcttttcatagtttatggtaagcagcagctcactgaataatgacttccattgagtaaacatttggctctggttatcttcagggatgctgttggctcatgatccaagctcaggggactctggaggcggggctgggctgagggagagaaagggaaacacagtgttcccaggcacatgttcttagcaataatacagttgcagaactttacatttgtgtcttccagatctggagaagaacagacatatttaaatcattcttgttgaacagtttttgtatgtacagtattatggtacttttttttttttagtatgagaactttttttgtatttgtacattgaactgctgtagttatacttttatattaaaggggaaaaagtccttataaataatgcctattaggctagtgctattactttgttcagcaaattctaccctggctttagagtttttaatagatgctacacctaataaaagtgcctctcatattgcaggaacgatttcagatgtgtaaggagactgaagaggagataccagtttttagtcttggaaagcaagttcacagtagaaggaggttgagatctttcttttatgtgagaaatctttgaatctcattcatgcgatcagagttgtagccaatttttgaaaaccttattttcaaaggaaataaatgattcactgtaggattcctttaaatatcaagcatcaccagtatatgctttgatggtatatgtatataacttaaagttctttcaaaagcctgatacagaaacgtgtccccagtttggtagcaatgtggaaaacctggctagagatgatatggagctgtccctcagaaagcaaagccatgcctggaatccctaataggctgcttagttgtgaacctgtttgatttgccttaagcctctatccagaaacctgcccgcttccgtctggttaagaagccagtggtggatattttctttgttaacattagaaatgcaaacattcccttgtcaaccaagaatactcaaagctacttgtattggaaatggcagaaggcctaaatccaaatttcttattttttataatttaccatagaagttttgtgattaaattcttacttctgccagtggaggtttatgcctgaaaggtcatggggtcctgtctgtaaatagacctaaagagaagtgcagtatttattctttgtaggcataatgtgtttgtcactgacaagcattcatgttcatcccactagtcttttattgcagtcttttattgtcattttcagccttatgttggagagctttgctttctcatcatgttcacattgtcttaagttttgtgagcttctgagaaagagcttggtaaaggtttaaaggggactttgttccaccagggagcattttatttgggcgtctcacccttttctaatgaaagctgttgtaagccacctctgacttggaaattctgaaagtatgaatattttttatatcttaattgtaaaatgccagttctccattatttagatgaatagtagaacactgcaccctttgtgcagtgtttttgtttctctactgcattcctacccccaccaaaaaaaagaaacttaaggaaatttttttttgagacagggtctccctctttcacccaggctggagtgcagcagcatgatctcagctcactgcagcctctgcctcccaggctcaagcaatcattccacctcagcctcttgattagctgggactacaggcatgtgccaccatactcggctaattctgttttaaaaattttttttgtagagatgaggtctcactatgttacccaggctggtctcgaacttttgggttcaagtgatcctcccgcctcagcctctcaaagtgttagtattataggtgtgagccaccatgcccagcctagaaaatttaaccttatcttttagccattcatttacttttatttgcttttttaaaaaaaaatctttaaattttagcctagagaagcacctcaggaactctaaacatcttaggcaaaaattaaactcaggtgagactgaaggagaaatttcagaaatacacatgtacctcatgggtaattaatagacatgcacagtttccttcaaatcaaatgtttaataaggaaattcatataattccaagaaaacaggcaaaatttggaatacataagcctagctaagataaagaactaccagttaattcttaacatcactggagcttccagcaggttttttaattgaaggacaaaaagtgtccatacatttgtgttatctcttcagagcctgagggagaagagagtggctttgcccagtggaaaggctggggatttgagaatgatacagggggaaggagtcaagcagaaatgccaggaagaaccaggcaaagacatttggcgccagaagcatccacttaatttctgtgaagagtgcccctggtgtttcatcttggcctgttttgatgagaatgttatcttttgtgtctggataacgcgtcagcttcttaaagtacatataaagatattctgtcacctccccacatgcacacacttttaaaatctatttttattctcttgctaaagttgtaattatgtcaagaattttccagctctaactgccttcttagtacatgtctttctgcctttgaagcatatgagtttgccaaagtcattctcccctaatgacatattgtggacttacattaagaaaatgggccaggcgcggtggctcacacctgtaatcccagcactttaggaggcccaggcgggtggattacctgaggtcaggagttcaagaccagactggtcaacatggtgaaactccatctctactaaaaatacagaaattagccaggagtgctgggtggacgcctgcaatcccagctacttgggaggttgaggcaggagaattgcttgaacccaggaggcagaggttgcagtgagctgagatcataccattgcactccagcctgcaagacagagtgaaactcttgtctcaaaaaaaaaaaaagaaaaaaagaaagtgagcctgttgatgtctagctaacccattggtggagtctgcattgaatctgtaagaatattgttctggatcatgcaggtgggatttgtataaaaagcctgtccaacatttagttctcactcgcatcagaatcatactgttttgaattgccatataagacatgctccatcatgacacttgcttctcctccaaatacaagttgagtgcttagtccttcacctgctagaatcaggatacaatcaacatgattatgttccttaacacacttggatttatgcagatgtggtgtgtcctttgctcttttttttcttaagacagagtcttgctcttgtcgctcaggctggagtgcagtggtgtgatttcggctcactgcaacctccgcctcctgggttcaagcgattctcctgcctcagcctcccgagtagctgggattacaggcaccaccaccataccaggctgattttttttgtatttttaatatagacagggcttcatcatgttggccaggctggcaggctggtctcgaactcctcacctcgtgatccgcccacctcagcttcccaaagtgctgtgattacaggcgtgagccaccgcgcctggcctgctcttaaaacccgttattcagaagatttgtaaaagaaataggctttttttttttttttggttaattcaaacgaggggaaaattagatagcattttcccctaaagaaatgttaatgttcattttgtggctttgttttcaagtttcaggagccatgtacatctcagaagtgttacgaagtgattagaaaaggcctctggtaaaagaccttcaaggaccaaccattattattggtcacttgtttgaacttggcgcttaaaaaaaaagttggactgtgatgctttggtgctctttatcacagacatcagtgatggtctgaaacactctctagcagtttatacgaagaatggacttacatgttatcagttacactcatgatttactcgttcagcttctacaagtccatactttatgctgtctcatttaagagacagtccacttctgaaaataaaatcgatagttgatgatacatttttggctagccagctttctgtaaaaggcaagtatgttagacatgcacagtttccttcaaatcaaatgtttaataaggtacttcaagaaacgcctttttaaaaatcaaaggttttggccaggcatggtggctcacgcctgtaatcccagcactttgggaggccaaggtgggcgaatcacaaggtcaggagtttgagaccagcctggccaacatggtgaaaccccgtctctactaaaaataccaaaaattagccgggcgtggtggtgggtacctgtaatcccagctactcaggaggctgagatgagaatcacttgatcccaggaggtagaggttgcagtgagccgagattgcgccattgcacttcagcctgggcaacgagtgaaactctcaaaaaaaaattcatagtaataataaagtccctgcatgcagtttggaaataaaatttaaactcatttatgtgtaataaatatgtaataattcacagtcaccatcaaatgttggaatcattgaattgcatacttgtactcattccggccacatcatgaagtgtttaaagatttgtatttgctgttgtccctatgtagttctattgatgtttggttttgttttttggggtttgttttgagcccaggctagagtgcaatggcacaatctcaactcactacagcctggacctccttggctcaagcagtcctcccacttcagcctcccaagtagctggtctgcaagtgctcaccaccacacctggctaatttttgtattttttgtagagacagagctctcactatgttgcctagactggtctcaaactcctgggcccaagcaatcctcccatcacagcctccgaaggtgctgggattacaggcataagccactgtgcccagcctgtttttaataatgatattaagtgggtttggttcatgtgttattaatcagtgttaataatcgtacttttttttttttttaaaagaaaccatggtattctaaaatcaggagtccaaataaaagaaagttctcggctgtgcatggtggctaacacctgtaatcccagcactttgggaggctgaggtgggtggatcactagaggtcaggagtttgaaacaagcctggccaacatggtaaaaccccctctctactaaaaatacaaaaattagccgggcatggtggtgcacacctgtaatcccagctactcgggatgttgaggcatgagatttccttgaacctggaaggcagaggttgctgtgagccgagatcgcgccactgcactccagcctgggtgacagagtaagactgtcgccaaaaaagaggaaaaaagttatccagtgcagtttctacagagataaaagaagtaatagttctggctgggtgtggtggcttatgcctgtaatcccaacactttgggaggccaaggcaggtggatcacatgaggtcaggagttcgagaccagcctggccaacatggcaaaactgtctctactaaaaatataaaaattaggtatggtggcacgtgcctgtacttacagctacttgggaggctgaggcatgagatgacaatctcttgaacccaggaggcggaggttgcagtgagctgagattgcaccactgcactccagcttgggtgatggagtgagactcaaataaaaaaggtactagttctgcatttcagagttggcttgttgaaccaggctatatgcttccaagatttaaatgtttttctgtattatactctcaattgtgttttaaaaaaatctcttacagaaatctctacctcaggcactaagtgttatgacatgggtagcatattgatattgaaaacttagctaggacttccagccttttaagataatttaaatgtaaaattaaatggttaaccagcaatctaatgtcatgtggtgtgcagtttggatattgcatgaacagctaaggaatcacctgttctagtgccaaagatcactcattgctaattttgttctgtacagcttatgtaatattttcatggtggagacggactctgtgtgctcagggccttgtctctaggaagattttgtcaattccaaatacagttttgaagattca

SEQ ID NO: 11922 - DNA, 2243 bp, Homo sapiens
  source 1..2243: mol_type = unassigned DNA
ggggaacaatggggcccttgagggcccctcctccagcccccattgtgcttggtggtgagaggtggccctggctcggccacacaccctcggggaggaccagcatccaagcaggtggaagggctctgagggagactggaattttctggcctggagaaggacccgcccgcccgcccctatgaccaacatgagctggagcttcctgacgcggctgctggaggagatccacaaccactccaccttcgtgggcaaggtgtggctcacggtgctggtggtcttccgcatcgtgctgacggctgtgggcggcgaggccatctactcggacgagcaggccaagttcacttgcaacacgcggcagccaggctgcgacaacgtctgctatgacgccttcgcgcccctgtcgcacgtgcgcttctgggtcttccagattgtggtcatctccacgccctcggtcatgtacctgggctacgccgtgcaccgcctggcccgtgcgtctgagcaggagcggcgccgcgccctccgccgccgcccggggccacgccgcgcgccccgagcgcacctgccgcccccgcacgccggctggcctgagcccgccgacctgggcgaggaggagcccatgctgggcctgggcgaggaggaggaggaggaggagacgggggcagccgagggcgccggcgaggaagcggaggaggcaggcgcggaggaggcgtgcactaaggcggtcggcgctgacggcaaggcggcagggaccccgggcccgaccgggcaacacgatgggcggaggcgcatccagcgggagggcctgatgcgcgtgtacgtggcccagctggtggccagggcagctttcgaggtggccttcctggtgggccagtacctgctgtacggcttcgaggtgcgaccgttctttccctgcagccgccagccctgcccgcacgtggtggactgcttcgtgtcgcgccctactgaaaagacggtcttcctgctggttatgtacgtggtcagctgcctgtgcctgctgctcaacctctgtgagatggcccacctgggcttgggcagcgcgcaggacgcggtgcgcggccgccgcggccccccggcctccgcccccgcccccgcgccgcggcccccgccctgcgccttccctgcggcggccgctggcttggcctgcccgcccgactacagcctggtggtgcgggcggccgagcgcgctcgggcgcatgaccagaacctggcaaacctggccctgcaggcgctgcgcgacggggcagcggctggggaccgcgaccgggacagttcgccgtgcgtcggcctccctgcggcctcccgggggccccccagagcaggcgcccccgcgtcccggacgggcagtgctacctctgcgggcactgtcggggagcagggccggcccggcacccacgagcggccaggagccaagcccagggctggctccgagaagggcagtgccagcagcagggacgggaagaccaccgtgtggatctgagggcgctggcttgcgagctgggccagggaggaggagggttggggggctccggtggaaacctgcgaccccttctcctcagccttctccttagccggtggcctcaggcagactctgcccagaggggcagccaggctgctcagggaaggggctgaaagcggcagaggagtgccctggcttggtcaccactggggccaaggtggggtggagagaggcctaggagccagaaagggccctctgctgtggtctgaaccccagggggagtggggcattgactccacccctgtcctgagctggaataggtcctctgggatgccagctctcccctttgtgcttccctgcagcaacccatggagggcccagggtgcctggtatgggcatcagttggtgggggtgcgggggtgcgtgtccccattccctgcaacagcaaatggggctccttcttcagccctccccttcccagccccaaactgagacagactgggagctgggagcctggggtggacaggaccataccctctttgagcttctgcgatgccggccttccgttcctctgggaggcttgaagttctgcaaagatgttgatatgccttgcagcttggacccaatgggtggtggtcagggcctgggggcttggccatgctgggggaatggggctctgggttcctgcctgtggcctgtctgtcctcctccctaattcagacccagcctcaagaggaaagggagtaaaataaaactaacttgtttataa

SEQ ID NO: 11923 - DNA, 1116 bp, Homo sapiens
  source 1..1116: mol_type = unassigned DNA
atgtgtggcaggttcctgcggcggctgctggcggaggagagccggcgctccacccccgtggggcgcctcttgcttcccgtgctcctgggattccgccttgtgctgctggctgccagtgggcctggagtctatggtgatgagcagagtgaattcgtgtgtcacacccagcagccgggctgcaaggctgcctgcttcgatgccttccaccccctctccccgctgcgtttctgggtcttccaggtcatcttggtggctgtacccagcgccctctatatgggtttcactctgtatcacgtgatctggcactgggaattatcaggaaaggggaaggaggaggagaccctgatccagggacgggagggcaacacagatgtcccaggggctggaagcctcaggctgctctgggcttatgtggctcagctgggggctcggcttgtcctggagggggcagccctggggttgcagtaccacctgtatgggttccagatgcccagctcctttgcatgtcgccgagaaccttgccttggtagtataacctgcaatctgtcccgcccctctgagaagaccattttcctaaagaccatgtttggagtcagcggtttctgtctcttgtttacttttttggagcttgtgcttctgggtttggggagatggtggaggacctggaagcacaaatcttcctcttctaaatacttcctaacttcagagagcaccagaagacacaagaaagcaaccgatagcctcccagtggtggaaaccaaagagcaatttcaagaagcagttccaggaagaagcttagcccaggaaaaacaaagaccagttggacccagagatgcctgagttggagatgaactttggccaactttcctcatcaccatacttaaaatcctgtccaaggaggagcttattcaccattttctatacatgtgacatatgtagcagcataaccgacaactgggactgcgctgccttgactccacctctacatacaatgactcagctaaccagactaataaaagccatgtttgcaccattgctcagggaggcattgctttggggaattattcccagtgtcctccttacttatcgcaagtaataaaatccccctgggaaatc

SEQ ID NO: 11924 - DNA, 2164 bp, Homo sapiens
  source 1..2164: mol_type = unassigned DNA
ataaagcagcctgtcctggcaagggatggtcatcctctcaacctacagacccagtgagccctaggccctcaccccagacccagctgctggataggacccagccccgctcccagagacaatgaccatgtttgaaaatgtcacccgggccctggccagacagctaaaccctcgaggggacctgacaccacttgacagcctcatcgacttcaagcgcttccatcccttctgcctggtgctgaggaagaggaagagcacgctcttctggggggcccggtacgtccgcaccgactacacgctgctggatgtgcttgagcccggcagctcaccttcagacccaacagacactgggaattttggctttaagaatatgctggacacccgagtggagggagatgtggatgtaccaaagacggtgaaggtgaagggaacggcagggctctcgcagaacagcactctggaggtccagacactcagtgtggctcccaaggccctggagaccgtgcaggagaggaagctggcagcagaccacccattcctgaaggagatgcaagatcaaggggagaacctgtatgtggtgatggaggtggtggagacggtgcaggaggtcacactggagcgagccggcaaggcagaggcctgcttctccctccccttcttcgccccattggggctacagggatccataaatcacaaggaggctgtaaccatccccaagggctgcgtcctggcctttcgagtgagacagctgatggtcaaaggcaaagatgagtgggatattccacatatctgcaatgataacatgcaaaccttccctcctggagaaaagtcaggagaggagaaggtcatccttatccaggcatctgatgttggggacgtacacgaaggcttcaggacactaaaagaagaagttcagagagagacccaacaagtggagaagctgagccgagtagggcaaagctccctgctcagctccctcagcaaacttctagggaagaaaaaggagctacaagaccttgagctcgcacttgaaggggctctagacaagggacatgaagtgaccctggaggcactcccaaaagatgtcctgctatcaaaggaggccgtgggcgccatcctctatttcgttggagccctaacagagctaagtgaagcccaacagaagctgctggtgaaatccatggagaaaaagatcctacccgtgcagctaaagctggtggagagcacgatggaacagaacttcctgctggataaagagggtgttttccccctgcaacctgagctgctctcctcccttggggacgaggagctgaccctcacggaggctctagtcgggctgagtggcctggaagtgcagagatcgggcccccaatatatgtgggacccagacaccctccctcgcctctgtgctctttatgcaggcctctctctccttcagcagcttaccaaggcctcctaatttgccttttacgtctgcttcatgactccctaatgccttcccaacctcgtggtgctgtgtccttaccacctaagggcatttcagagccatcagctgaagacatctgaaatctcagctggtcacccatgataaccaacttccacctgcccaaccatatatcaccccctacccctccagctccgcaacccactaagcccatctgctgatgcttaaattttctttacttttcttttctttttttttttttttttgagatggaggctcactctgtcacccaggctggagtgcagtggcttgatcttggctcactgcaacctccgcctcccaggttcaagcaattctcctgcctcagcctctcgagcagctggaattacaggcacgtgccacgacacccagctaatttttgtatttttagtagagacggggtttcaccatgttgcccaggttggtctcgaactcctggcctcaagtgatctgcccgcctcggcctcccaaagtgctgggattacaggcgtgagccaccgtgcccggcctgtgcttaaatattctaggagtagaagcactcagacttttaaaactatgagccgtttcagcaaaactgagaaaaaaagaagattaattaatttcctatcctaatccctcctacttatacttccccaaaaaacaagctttactggaattaatggaaaatattatgtcaatcttagg

SEQ ID NO: 11925 - DNA, 1500 bp, Homo sapiens
  source 1..1500: mol_type = unassigned DNA
atctgtggggattctcacaacttccatttctggtgaacagctgaggtcagagaggagttggtccaggcgcaatgttcagcgtatttgaggaaatcacaagaattgtagttaaggagatggatgctggaggggatatgattgccgttagaagccttgttgatgctgatagattccgctgcttccatctggtgggggagaagagaactttctttggatgccggcactacacaacaggcctcaccctgatggacattctggacacagatggggacaagtggttagatgaactggattctgggctccaaggtcaaaaggctgagtttcaaattctggataatgtagactcaacgggagagttgatagtgagattacccaaagaaataacaatttcaggcagtttccagggcttccaccatcagaaaatcaagatatcggagaaccggatatcccagcagtatctggctacccttgaaaacaggaagctgaagagggaactacccttttcattccgatcaattaatacgagagaaaacctgtatctggtgacagaaactctggagacggtaaaggaggaaaccctgaaaagcgaccggcaatataaattttggagccagatctctcagggccatctcagctataaacacaagggccaaagggaagtgaccatccccccaaatcgggtcctgagctatcgagtaaagcagcttgtcttccccaacaaggagacgatgaagaaggatggtgcttcatcctgtttaggaaagtctttgggttcggaggattccagaaacatgaaggagaagttggaggacatggagagtgtcctcaaggacctgacagaggagaagagaaaagatgtgctaaactccctcgctaagtgcctcggcaaggaggatattcggcaggatctagagcaaagagtatctgaggtcctgatttccggggagctacacatggaggacccagacaagcctctcctaagcagcctttttaatgctgctggggtcttggtagaagcgcgtgcaaaagccattctggacttcctggatgccctgctagagctgtctgaagagcagcagtttgtggctgaggccctggagaaggggacccttcctctgttgaaggaccaggtgaaatctgtcatggagcagaactgggatgagctggccagcagtcctcctgacatggactatgaccctgaggcacgaattctctgtgcgctgtatgttgttgtctctatcctgctggagctggctgaggggcctacctctgtctcttcctaactacaaaagccctttctccccacaagcctctgggttttccctttaccagtctgtcctcactgccatcgccactaccatcctgtcaccagtgggacctctttaaaacaagcagccaaccattctttgatgtatcccattcgctccatgttaacatccaaaaccagcctggatttcatacatggacttctgattaaaagtggcaggttgtgcatgttaa

SEQ ID NO: 11926 - DNA, 1476 bp, Homo sapiens
  source 1..1476: mol_type = unassigned DNA
gtttctgagttggtccaggcgcaatgttcagcgtatttgaggaaatcacaagaattgtagttaaggagatggatgctggaggggatatgattgccgttagaagccttgttgatgctgatagattccgctgcttccatctggtgggggagaagagaactttctttggatgccggcactacacaacaggcctcaccctgatggacattctggacacagatggggacaagtggttagatgaactggattctgggctccaaggtcaaaaggctgagtttcaaattctggataatgtagactcaacgggagagttgatagtgagattacccaaagaaataacaatttcaggcagtttccagggcttccaccatcagaaaatcaagatatcggagaaccggatatcccagcagtatctggctacccttgaaaacaggaagctgaagagggaactacccttttcattccgatcaattaatacgagagaaaacctgtatctggtgacagaaactctggagacggtaaaggaggaaaccctgaaaagcgaccggcaatataaattttggagccagatctctcagggccatctcagctataaacacaagggccaaagggaagtgaccatccccccaaatcgggtcctgagctatcgagtaaagcagcttgtcttccccaacaaggagacgatgagtgctggtttagatattcatttcaggggcaaaacaaaatcctttccagaaggaaagtctttgggttcggaggattccagaaacatgaaggagaagttggaggacatggagagtgtcctcaaggacctgacagaggagaagagaaaagatgtgctaaactccctcgctaagtgcctcggcaaggaggatattcggcaggatctagagcaaagagtatctgaggtcctgatttccggggagctacacatggaggacccagacaagcctctcctaagcagcctttttaatgctgctggggtcttggtagaagcgcgtgcaaaagccattctggacttcctggatgccctgctagagctgtctgaagagcagcagtttgtggctgaggccctggagaaggggacccttcctctgttgaaggaccaggtgaaatctgtcatggagcagaactgggatgagctggccagcagtcctcctgacatggactatgaccctgaggcacgaattctctgtgcgctgtatgttgttgtctctatcctgctggagctggctgaggggcctacctctgtctcttcctaactacaaaagccctttctccccacaagcctctgggttttccctttaccagtctgtcctcactgccatcgccactaccatcctgtcaccagtgggacctctttaaaacaagcagccaaccattctttgatgtatcccattcgctccatgttaacatccaaaaccagcctggatttcatacatggacttctgattaaaagtggcaggttgtgcatgttaa

SEQ ID NO: 11927 - DNA, 1626 bp, Homo sapiens
  source 1..1626: mol_type = unassigned DNA
gtggaatgtcatcagttaaggctattttcatttcttttgtggatcttcagttgcttcaggccatctggatgtatacatgcaggtcacagggaatatgatggcttagcttgggttcagaggcctgacacctcaggctgccaaatgtggaagatttaaatacttgaaccaataccctcctcccaaaaactgaaattggcttctgtttctgagttggtccaggcgcaatgttcagcgtatttgaggaaatcacaagaattgtagttaaggagatggatgctggaggggatatgattgccgttagaagccttgttgatgctgatagattccgctgcttccatctggtgggggagaagagaactttctttggatgccggcactacacaacaggcctcaccctgatggacattctggacacagatggggacaagtggttagatgaactggattctgggctccaaggtcaaaaggctgagtttcaaattctggataatgtagactcaacgggagagttgatagtgagattacccaaagaaataacaatttcaggcagtttccagggcttccaccatcagaaaatcaagatatcggagaaccggatatcccagcagtatctggctacccttgaaaacaggaagctgaagagggaactacccttttcattccgatcaattaatacgagagaaaacctgtatctggtgacagaaactctggagacggtaaaggaggaaaccctgaaaagcgaccggcaatataaattttggagccagatctctcagggccatctcagctataaacacaagggccaaagggaagtgaccatccccccaaatcgggtcctgagctatcgagtaaagcagcttgtcttccccaacaaggagacgatgagaaagtctttgggttcggaggattccagaaacatgaaggagaagttggaggacatggagagtgtcctcaaggacctgacagaggagaagagaaaagatgtgctaaactccctcgctaagtgcctcggcaaggaggatattcggcaggatctagagcaaagagtatctgaggtcctgatttccggggagctacacatggaggacccagacaagcctctcctaagcagcctttttaatgctgctggggtcttggtagaagcgcgtgcaaaagccattctggacttcctggatgccctgctagagctgtctgaagagcagcagtttgtggctgaggccctggagaaggggacccttcctctgttgaaggaccaggtgaaatctgtcatggagcagaactgggatgagctggccagcagtcctcctgacatggactatgaccctgaggcacgaattctctgtgcgctgtatgttgttgtctctatcctgctggagctggctgaggggcctacctctgtctcttcctaactacaaaagccctttctccccacaagcctctgggttttccctttaccagtctgtcctcactgccatcgccactaccatcctgtcaccagtgggacctctttaaaacaagcagccaaccattctttgatgtatcccattcgctccatgttaacatccaaaaccagcctggatttcatacatggacttctgattaaaagtggcaggttgtgcatgttaa

SEQ ID NO: 11928 - DNA, 1582 bp, Homo sapiens
  source 1..1582: mol_type = unassigned DNA
acaactttcagtttcattattttagcttcctgagattcagaggccaggaactgtgcagagatctgtggggattctcacaacttccatttctggtgaacagctgaggtcagagaggagttggtccaggcgcaatgttcagcgtatttgaggaaatcacaagaattgtagttaaggagatggatgctggaggggatatgattgccgttagaagccttgttgatgctgatagattccgctgcttccatctggtgggggagaagagaactttctttggatgccggcactacacaacaggcctcaccctgatggacattctggacacagatggggacaagtggttagatgaactggattctgggctccaaggtcaaaaggctgagtttcaaattctggataatgtagactcaacgggagagttgatagtgagattacccaaagaaataacaatttcaggcagtttccagggcttccaccatcagaaaatcaagatatcggagaaccggatatcccagcagtatctggctacccttgaaaacaggaagctgaagagggaactacccttttcattccgatcaattaatacgagagaaaacctgtatctggtgacagaaactctggagacggtaaaggaggaaaccctgaaaagcgaccggcaatataaattttggagccagatctctcagggccatctcagctataaacacaagggccaaagggaagtgaccatccccccaaatcgggtcctgagctatcgagtaaagcagcttgtcttccccaacaaggagacgatgagtgctggtttagatattcatttcaggggcaaaacaaaatcctttccagaaggaaagtctttgggttcggaggattccagaaacatgaaggagaagttggaggacatggagagtgtcctcaaggacctgacagaggagaagagaaaagatgtgctaaactccctcgctaagtgcctcggcaaggaggatattcggcaggatctagagcaaagagtatctgaggtcctgatttccggggagctacacatggaggacccagacaagcctctcctaagcagcctttttaatgctgctggggtcttggtagaagcgcgtgcaaaagccattctggacttcctggatgccctgctagagctgtctgaagagcagcagtttgtggctgaggccctggagaaggggacccttcctctgttgaaggaccaggtgaaatctgtcatggagcagaactgggatgagctggccagcagtcctcctgacatggactatgaccctgaggcacgaattctctgtgcgctgtatgttgttgtctctatcctgctggagctggctgaggggcctacctctgtctcttcctaactacaaaagccctttctccccacaagcctctgggttttccctttaccagtctgtcctcactgccatcgccactaccatcctgtcaccagtgggacctctttaaaacaagcagccaaccattctttgatgtatcccattcgctccatgttaacatccaaaaccagcctggatttcatacatggacttctgattaaaagtggcaggttgtgcatgtt

SEQ ID NO: 11929 - DNA, 1597 bp, Homo sapiens
  source 1..1597: mol_type = unassigned DNA
acaactttcagtttcattattttagcttcctgagattcagaggccaggaactgtgcagagatctgtggggattctcacaacttccatttctggtgaacagctgaggtcagagaggagttggtccaggcgcaatgttcagcgtatttgaggaaatcacaagaattgtagttaaggagatggatgctggaggggatatgattgccgttagaagccttgttgatgctgatagattccgctgcttccatctggtgggggagaagagaactttctttggatgccggcactacacaacaggcctcaccctgatggacattctggacacagatggggacaagtggttagatgaactggattctgggctccaaggtcaaaaggctgagtttcaaattctggataatgtagactcaacgggagagttgatagtgagattacccaaagaaataacaatttcaggcagtttccagggcttccaccatcagaaaatcaagatatcggagaaccggatatcccagcagtatctggctacccttgaaaacaggaagctgaagagggaactacccttttcattccgatcaattaatacgagagaaaacctgtatctggtgacagaaactctggagacggtaaaggaggaaaccctgaaaagcgaccggcaatataaattttggagccagatctctcagggccatctcagctataaacacaagggccaaagggaagtgaccatccccccaaatcgggtcctgagctatcgagtaaagcagcttgtcttccccaacaaggagacgatgaatattcatttcaggggcaaaacaaaatcctttccagaagagaaggatggtgcttcatcctgtttaggaaagtctttgggttcggaggattccagaaacatgaaggagaagttggaggacatggagagtgtcctcaaggacctgacagaggagaagagaaaagatgtgctaaactccctcgctaagtgcctcggcaaggaggatattcggcaggatctagagcaaagagtatctgaggtcctgatttccggggagctacacatggaggacccagacaagcctctcctaagcagcctttttaatgctgctggggtcttggtagaagcgcgtgcaaaagccattctggacttcctggatgccctgctagagctgtctgaagagcagcagtttgtggctgaggccctggagaaggggacccttcctctgttgaaggaccaggtgaaatctgtcatggagcagaactgggatgagctggccagcagtcctcctgacatggactatgaccctgaggcacgaattctctgtgcgctgtatgttgttgtctctatcctgctggagctggctgaggggcctacctctgtctcttcctaactacaaaagccctttctccccacaagcctctgggttttccctttaccagtctgtcctcactgccatcgccactaccatcctgtcaccagtgggacctctttaaaacaagcagccaaccattctttgatgtatcccattcgctccatgttaacatccaaaaccagcctggatttcatacatggacttctgattaaaagtggcaggttgtgcatgtt

SEQ ID NO: 11930 - DNA, 1263 bp, Homo sapiens
  source 1..1263: mol_type = unassigned DNA
ggttagatgaactggattctgggctccaaggtcaaaaggctgagtttcaaattctggataatgtagactcaacgggagagttgatagtgagattacccaaagaaataacaatttcaggcagtttccagggcttccaccatcagaaaatcaagatatcggagaaccggatatcccagcagtatctggctacccttgaaaacaggaagctgaagagggaactacccttttcattccgatcaattaatacgagagaaaacctgtatctggtgacagaaactctggagacggtaaaggaggaaaccctgaaaagcgaccggcaatataaattttggagccagatctctcagggccatctcagctataaacacaagggccaaagggaagtgaccatccccccaaatcgggtcctgagctatcgagtaaagcagcttgtcttccccaacaaggagacgatgaatattcatttcaggggcaaaacaaaatcctttccagaagagaaggatggtgcttcatcctgtttaggaaagtctttgggttcggaggattccagaaacatgaaggagaagttggaggacatggagagtgtcctcaaggacctgacagaggagaagagaaaagatgtgctaaactccctcgctaagtgcctcggcaaggaggatattcggcaggatctagagcaaagagtatctgaggtcctgatttccggggagctacacatggaggacccagacaagcctctcctaagcagcctttttaatgctgctggggtcttggtagaagcgcgtgcaaaagccattctggacttcctggatgccctgctagagctgtctgaagagcagcagtttgtggctgaggccctggagaaggggacccttcctctgttgaaggaccaggtgaaatctgtcatggagcagaactgggatgagctggccagcagtcctcctgacatggactatgaccctgaggcacgaattctctgtgcgctgtatgttgttgtctctatcctgctggagctggctgaggggcctacctctgtctcttcctaactacaaaagccctttctccccacaagcctctgggttttccctttaccagtctgtcctcactgccatcgccactaccatcctgtcaccagtgggacctctttaaaacaagcagccaaccattctttgatgtatcccattcgctccatgttaacatccaaaaccagcctggatttcatacatggacttctgattaaaagtggcaggttgtgcatgttaa

SEQ ID NO: 11931 - DNA, 1546 bp, Homo sapiens
  source 1..1546: mol_type = unassigned DNA
attattttagcttcctgagattcagaggccaggaactgtgcagagatctgtggggattctcacaacttccatttctggtgaacagctgaggtcagagaggaggcgcaatgttcagcgtatttgaggaaatcacaagaattgtagttaaggagatggatgctggaggggatatgattgccgttagaagccttgttgatgctgatagattccgctgcttccatctggtgggggagaagagaactttctttggatgccggcactacacaacaggcctcaccctgatggacattctggacacagatggggacaagtggttagatgaactggattctgggctccaaggtcaaaaggctgagtttcaaattctggataatgtagactcaacgggagagttgatagtgagattacccaaagaaataacaatttcaggcagtttccagggcttccaccatcagaaaatcaagatatcggagaaccggatatcccagcagtatctggctacccttgaaaacaggaagctgaagagggaactacccttttcattccgatcaattaatacgagagaaaacctgtatctggtgacagaaactctggagacggtaaaggaggaaaccctgaaaagcgaccggcaatataaattttggagccagatctctcagggccatctcagctataaacacaagggccaaagggaagtgaccatccccccaaatcgggtcctgagctatcgagtaaagcagcttgtcttccccaacaaggagacgatgaatattcatttcaggggcaaaacaaaatcctttccagaaggaaagtctttgggttcggaggattccagaaacatgaaggagaagttggaggacatggagagtgtcctcaaggacctgacagaggagaagagaaaagatgtgctaaactccctcgctaagtgcctcggcaaggaggatattcggcaggatctagagcaaagagtatctgaggtcctgatttccggggagctacacatggaggacccagacaagcctctcctaagcagcctttttaatgctgctggggtcttggtagaagcgcgtgcaaaagccattctggacttcctggatgccctgctagagctgtctgaagagcagcagtttgtggctgaggccctggagaaggggacccttcctctgttgaaggaccaggtgaaatctgtcatggagcagaactgggatgagctggccagcagtcctcctgacatggactatgaccctgaggcacgaattctctgtgcgctgtatgttgttgtctctatcctgctggagctggctgaggggcctacctctgtctcttcctaactacaaaagccctttctccccacaagcctctgggttttccctttaccagtctgtcctcactgccatcgccactaccatcctgtcaccagtgggacctctttaaaacaagcagccaaccattctttgatgtatcccattcgctccatgttaacatccaaaaccagcctggatttcatacatggacttctgattaaaagtggcaggttgtgcatgtt

SEQ ID NO: 11932 - DNA, 2714 bp, Homo sapiens
  source 1..2714: mol_type = unassigned DNA
ccacatgtaggcagttcagaggtgcttcccagggccctggcgctagtgcctgtccctcctgctgaagttgcctttcctggtgtccagtgattgaattctaaattcagcacatataccagaggaatacgagccaaagaagttgttccagctagagttgctgggaatccatgaatcaaagacttgctcagctagttctgtatgtgaaaggaaatgggtgtgactctgaggaagcctttttaattctgattcaggagatacataattagatgccacttgattttgttccacagactttttgctgaggacttgagagctaaggttctgtgatccagaactagttccagacttactcttctggaaatgaacagggccctcctgtgcttatttttccaggatactgcattggaaattgagtcagggacccattggtgagaagagaacagtgaacagaatcacattgatctggtcctggagtttgtctgacaatttctacttgaccgcaggaggtctgaagattggaaggggccctactcaattgtgctatttttctctcttttttttttttttgagacggagttgcccaggctggagtgcagcggcatggtctcagctcactgcaacctctgcctcccgggttcaagcagttctctgcctcagcctcccaagtagctgggattacaggtgcctgccaccattcctggctaatttttgtattttcagtagagacagggtttcaccatcttggcctggctgatcttgaactcctgacctcgtgatccaccggcctcagcctcccaaagtgctgggattacagacgtgagccaccgtgcccggccaatcctgctatttctctacaggacaaagggatatataatctgcaacatgccctccatgttggaacgcattagcaaaaatttggtcaaagagattggaagcaaagacctgacacctgtcaaatacctattgagtgccaccaaattacgtcagtttgttatattacgaaagaagaaggattctcgttcatcattttgggaacaatctgactatgttccagttgaattctccctcaatgacatcctggagccaagttcttcagtcctagaaactgttgtgacaggaccgttccacttcagtgacattatgatccagaagcataaggctgacatgggtgtgaatgttggtatagaagtgagtgtgtcaggggaggcctctgtggaccatggatgctccctcgagtttcaaattgttaccatcccatcaccaaacctggaagactttcaaaaaaggaaactgttggatccagagccatcatttctgaaggagtgccggaggagaggggacaacctgtacgtggtgacagaggctgttgaactgatcaacaatactgtgctgtacgatagcagtagtgtgaatattttagggaaaattgctctttggattacctatggcaagggtcaaggccaaggagagagtctcagagtgaagaagaaggcgctgactcttcagaaaggcatggtgatggcttataagagaaagcagctggttatcaaggagaaagccattctcatctcagatgatgatgaacagagaacctttcaagatgagtacgaaatttccgaaatggtaggctactgtgctgcgaggagtgaggggttgctaccatcatttcataccatctctccaaccctcttcaatgcctcatccaatgatatgaagttaaaaccagagctatttctgacacagcaatttttgagcgggcatttgccaaaatacgaacaagttcacatcctcccagtaggaagaatagaggaacccttctggcaaaatttcaagcatctacaagaggaggttttccagaaaataaagacactggctcagctctcaaaggatgttcaggatgtcatgttctacagtatcctggccatgctcagagacagaggggctctacaggacctgatgaacatgctggaattggacagctcaggtcatttggatggccctggtggtgccatcctaaagaaacttcaacaggattcaaaccatgcatggtttaacccaaaggaccccattctttatctccttgaagccataatggtgctgagtgacttccaacacgatttgctggcctgttccatggagaagaggatcctgcttcagcaacaggagctggtaaggagcatcctggagccaaacttcagatacccctggagcattcccttcaccctcaaacctgagctcctcgccccactccagagtgagggtttggccatcacctatggcctgctggaggagtgtggccttaggatggagctggataaccccaggtcaacctgggatgtagaagcaaagatgcccctgtctgccctctatgggactctctcgttgctgcagcagctggctgaggcctaagccctccctgatgggcagtcagtccagagatgctggccctcgcccagtctatgctgtgagtgtccttatgggtgcaagagatagggctgtgcctctctgcgtttccaggtggagtagagacagtaatgggtagagactttaggaaatgttttggggtggtggaatactctatatattgacaagagtttatatattgacaagagtttatatatttgtcaaaactcctcaaatagtatgttaaagacgtaagcgtttcactatgtataaattttacttcaaaataataaaaacaaatactgactcta

SEQ ID NO: 11933 - DNA, 716 bp, Homo sapiens
  source 1..716: mol_type = unassigned DNA
agcaggctcagaaggtccagaaatcaggggaaggagacccctatctgtccttcttctggaagagctggaaaggaagtctgctcaggaaataaccttggaagatggtggccacgaagacctttgctctgctgctgctgtccctgttcctggcagtgggactaggagagaagaaagagggtcacttcagcgctctcccctccctgcctgttggatctcatgctaaggtgagcagccctcaacctcgaggccccaggtacgcggaagggactttcatcagtgactacagtattgccatggacaagattcaccaacaagactttgtgaactggctgctggcccaaaaggggaagaagaatgactggaaacacaacatcacccagagggaggctcgggcgctggagctggccagtcaagctaataggaaggaggaggaggcagtggagccacagagctccccagccaagaaccccagcgatgaagatttgctgcgggacttgctgattcaagagctgttggcctgcttgctggatcagacaaacctctgcaggctcaggtctcggtgactctgaccacacccagctcaggactggattctgcccttcacttagcacctgcctcagccccactccagaatagccaagagaacccaaaccaataaagtttatgctaagtcgagcccattgtgaaaatttattaaaatgactactgagcactaa

SEQ ID NO: 11934 - DNA, 2011 bp, Homo sapiens
  source 1..2011: mol_type = unassigned DNA
ggcagcggtggcaggggctgcaggagcaagtgaccaggagcaggactggggacaggcctgatcgcccctgcacgaaccagacccttcgccgccctcacgatgactacctctccgatcctgcagctgctgctgcggctctcactgtgcgggctgctgctccagagggcggagacaggctctaaggggcagacggcgggggagctgtaccagcgctgggaacggtaccgcagggagtgccaggagaccttggcagccgcggaaccgccttcaggcctcgcctgtaacgggtccttcgatatgtacgtctgctgggactatgctgcacccaatgccactgcccgtgcgtcctgcccctggtacctgccctggcaccaccatgtggctgcaggtttcgtcctccgccagtgtggcagtgatggccaatggggactttggagagaccatacacaatgtgagaacccagagaagaatgaggcctttctggaccaaaggctcatcttggagcggttgcaggtcatgtacactgtcggctactccctgtctctcgccacactgctgctagccctgctcatcttgagtttgttcaggcggctacattgcactagaaactatatccacatcaacctgttcacgtctttcatgctgcgagctgcggccattctcagccgagaccgtctgctacctcgacctggcccctaccttggggaccaggcccttgcgctgtggaaccaggccctcgctgcctgccgcacggcccagatcgtgacccagtactgcgtgggtgccaactacacgtggctgctggtggagggcgtctacctgcacagtctcctggtgctcgtgggaggctccgaggagggccacttccgctactacctgctcctcggctggggggcccccgcgcttttcgtcattccctgggtgatcgtcaggtacctgtacgagaacacgcagtgctgggagcgcaacgaagtcaaggccatttggtggattatacggacccccatcctcatgaccatcttgattaatttcctcatttttatccgcattcttggcattctcctgtccaagctgaggacacggcaaatgcgctgccgggattaccggctgaggctggctcgctccacgctgacgctggtgcccctgctgggtgtccacgaggtggtgtttgctcccgtgacagaggaacaggcccggggcgccctgcgcttcgccaagctcggctttgagatcttcctcagctccttccagggcttcctggtcagcgtcctctactgcttcatcaacaaggaggtgcagtcggagatccgccgtggctggcaccactgccgcctgcgccgcagcctgggcgaggagcaacgccagctcccggagcgcgccttccgggccctgccctccggctccggcccgggcgaggtccccaccagccgcggcttgtcctcggggaccctcccagggcctgggaatgaggccagccgggagttggaaagttactgctagggggcgggatccccgtgtctgttcagttagcatggatttattgagtgccaactgcgtgccaggcccagtacggaggacgctggggaaatggtgaaggaaacagaaaaaaggtccctgcccttctggagatgacaactgagtggggaaaacagaccgtgaacacaaaacatcaagttccacacacgctatggaatggttatgaagggaagcgagaagggggcctagggtggtctgggaggcgtctccaaggaggtgacacttaagccatccccgaaagaggtgaaagagatcactttggggagagctggagaacaggattctaggcggaagcgatagcataggcaaaggcccttgggcaggaaggcgctcagccttggctggagtagaattaagtcagagccaacaggtggggagagacagagaagtgggcaggggcacccaagttgggatttcatttcaggtgcattggagattcttaggagtgtctcttgggggtaatattttatttttt

SEQ ID NO: 11935 - DNA, 1432 bp, Homo sapiens
  source 1..1432: mol_type = unassigned DNA
ggggctgcaggagcaagtgaccaggagcaggactggggacaggcctgatcgcccctgcacgaaccagacccttcgccgccctcacgatgactacctctccgatcctgcagctgctgctgcggctctcactgtgcgggctgctgctccagagggcggagacaggctctaaggggcagacggcgggggagctgtaccagcgctgggaacggtaccgcagggagtgccaggagaccttggcagccgcggaaccgccttcagtggctgcaggtttcgtcctccgccagtgtggcagtgatggccaatggggactttggagagaccatacacaatgtgagaacccagagaagaatgaggcctttctggaccaaaggctcatcttggagcggttgcaggtcatgtacactgtcggctactccctgtctctcgccacactgctgctagccctgctcatcttgagtttgttcaggcggctacattgcactagaaactatatccacatcaacctgttcacgtctttcatgctgcgagctgcggccattctcagccgagaccgtctgctacctcgacctggcccctaccttggggaccaggcccttgcgctgtggaaccaggccctcgctgcctgccgcacggcccagatcgtgacccagtactgcgtgggtgccaactacacgtggctgctggtggagggcgtctacctgcacagtctcctggtgctcgtgggaggctccgaggagggccacttccgctactacctgctcctcggctggggggcccccgcgcttttcgtcattccctgggtgatcgtcaggtacctgtacgagaacacgcagtgctgggagcgcaacgaagtcaaggccatttggtggattatacggacccccatcctcatgaccatcttgattaatttcctcatttttatccgcattcttggcattctcctgtccaagctgaggacacggcaaatgcgctgccgggattaccggctgaggctggctcgctccacgctgacgctggtgcccctgctgggtgtccacgaggtggtgtttgctcccgtgacagaggaacaggcccggggcgccctgcgcttcgccaagctcggctttgagatcttcctcagctccttccagggcttcctggtcagcgtcctctactgcttcatcaacaaggaggtgcagtcggagatccgccgtggctggcaccactgccgcctgcgccgcagcctgggcgaggagcaacgccagctcccggagcgcgccttccgggccctgccctccggctccggcccgggcgaggtccccaccagccgcggcttgtcctcggggaccctcccagggcctgggaatgaggccagccgggagttggaaagttactgctagggggcgggatccccgtgtctgttcagttagcatggatttattgagtgccaact

SEQ ID NO: 11936 - DNA, 3289 bp, Homo sapiens
  source 1..3289: mol_type = unassigned DNA
ggcagcggtggcaggggctgcaggagcaagtgaccaggagcaggactggggacaggcctgatcgcccctgcacgaaccagacccttcgccgccctcacgatgactacctctccgatcctgcagctgctgctgcggctctcactgtgcgggctgctgctccagagggcggagacaggctctaaggggcagacggcgggggagctgtaccagcgctgggaacggtaccgcagggagtgccaggagaccttggcagccgcggaaccgccttcaggcctcgcctgtaacgggtccttcgatatgtacgtctgctgggactatgctgcacccaatgccactgcccgtgcgtcctgcccctggtacctgccctggcaccaccatgtggctgcaggtttcgtcctccgccagtgtggcagtgatggccaatggggactttggagagaccatacacaatgtgagaacccagagaagaatgaggcctttctggaccaaaggctcatcttggagcggttgcaggtcatgtacactgtcggctactccctgtctctcgccacactgctgctagccctgctcatcttgagtttgttcaggcggctacattgcactagaaactatatccacatcaacctgttcacgtctttcatgctgcgagctgcggccattctcagccgagaccgtctgctacctcgacctggcccctaccttggggaccaggcccttgcgctgtggaaccaggccctcgctgcctgccgcacggcccagatcgtgacccagtactgcgtgggtgccaactacacgtggctgctggtggagggcgtctacctgcacagtctcctggtgctcgtgggaggctccgaggagggccacttccgctactacctgctcctcggctggggggcccccgcgcttttcgtcattccctgggtgatcgtcaggtacctgtacgagaacacgcagtgctgggagcgcaacgaagtcaaggccatttggtggattatacggacccccatcctcatgaccatcttgattaatttcctcatttttatccgcattcttggcattctcctgtccaagctgaggacacggcaaatgcgctgccgggattaccggctgaggctggctcgctccacgctgacgctggtgcccctgctgggtgtccacgaggtggtgtttgctcccgtgacagaggaacaggcccggggcgccctgcgcttcgccaagctcggctttgagatcttcctcagctccttccagggcttcctggtcagcgtcctctactgcttcatcaacaaggaggtgcagtcggagatccgccgtggctggcaccactgccgcctgcgccgcagcctgggcgaggagcaacgccagctcccggagcgcgccttccgggccctgccctccggctccggcccgggcgaggtccccaccagccgcggcttgtcctcggggaccctcccagggcctgggaatgaggccagccgggagttggaaagttactgctagggggcgggatccccgtgtctgttcagttagcatggatttattgagtgccaactgcgtgccaggcccagtacggaggacgctggggaaatggtgaaggaaacagaaaaaaggtccctgcccttctggagatgacaactgagtggggaaaacagaccgtgaacacaaaacatcaagttccacacacgctatggaatggttatgaagggaagcgagaagggggcctagggtggtctgggaggcgtctccaaggaggtgacacttaagccatccccgaaagaggtgaaagagatcactttggggagagctggagaacaggattctaggcggaagcgatagcataggcaaaggcccttgggcaggaaggcgctcagccttggctggagtagaattaagtcagagccaacaggtggggagagacagagaagtgggcaggggcacccaagttgggatttcatttcaggtgcattggagattcttaggagtgtctcttgggggtaatattttattttttaaaaaatgaggatgtcactcttacccaggttggtcttgaactcctgggctcaagcaatcctcccaccacgggtctctcaaagtgctgggattacaggcgtgagccaccgcacccggcttttttttttttttttaaacggagtctcactctgtcacccaggctggagtgcagtggtgcaatttcagctcactgcaccctccacctcccgagttcaagcctcccgggtagctgggattacaggcaccgccaccatgcctggctaatttttgcattttcagtagagatagggtttctccatgttggccaggctggtctcgaactcctgacctcaagtgatccacccacctcagcctcccaaagtgctgggattacaggcataagccaccatgcccggcccaaatgggctaatgttttaaacagatccttcttgtctgccctgtaggaggacaaattatcaggggcaggggtggaagctggagcccagaaaggaggggactgcaggtgggaagtgatggtggctggaccaggatggaggccactgaggggtatgaagcagtcggatttgaagctgtttaaaaggtggaggtgagaggatttcatgaaggagcacatgaggacacagcagcagagaggactccttggctttggatggtggagagactaaagatagagagattgggttcgggtagggggagaaccacgtgtgctctttggaaaggttaggctggcagtgtttgtaggacatgacaggacactgagtgtaagggtctggagctctcaggagaggggcgagctggagatagtaatgtgagaggcactgggtcctgagagggtgatttggtgtggaccggagcacaggtgaggcaaggcaggcctcgcagctgaaactttatatccagagcagccagggccactgctggctgcggagtgaggacgcatatccccactgtccttagatgggtggcccctggaacctgggagaatgagggggcatgctgacagtctcattgtggctggaccacctgtacatacacccacaagaccctcacccctaaatcctccccctacacatatgcacacttaagttaccgtatgggtgttgtcgagcattttccctggggtctgtggctccctggaccgacatgccccaaagctgaactcagccttttcaagcttgcggccctgctgcccaattcccctacaccctgccttgtgggttctcgcggggtgggggccttagggcaaggctcttgtaaataaagtataagaaacagttgc

SEQ ID NO: 11937 - DNA, 1518 bp, Homo sapiens
  source 1..1518: mol_type = unassigned DNA
ttgcaaatcgcggtacctgtggatgagagacatagacgagagagtgagatggcctggtttgccctctacctcctgagccttctctgggctacagctgggactagtacccagacccagagttcatgctccgttccctcagcacaggagcccttggtcaatggaatacaagtactcatggagaactcggtgacttcatcagcctacccaaaccccagcatcctgattgccatgaatctggccggagcctacaacttgaaggcccagaagctcctgacttaccagctcatgtccagcgacaacaacgatctaaccattgggcagctcggcctcaccatcatggccctcacctcctcctgccgagaccctggggataaagtatccattctacaaagacaaatggagaactgggcaccttccagccccaacgctgaagcatcagccttctatgggcccagtctagcgatcttggcactgtgccagaagaactctgaggcgaccttgccgatagccgtccgctttgccaagaccctgctggccaactcctctcccttcaatgtagacacaggagcaatggcaaccttggctctgacctgtatgtacaacaagatccctgtaggttcagaggaaggttacagatccctgtttggtcaggtactaaaggatattgtggagaaaatcagcatgaagatcaaagataatggcatcattggagacatctacagtactggcctcgccatgcaggctctctctgtaacacctgagccatctaaaaaggaatggaactgcaagaagactacggatatgatactcaatgagattaagcaggggaaattccacaaccccatgtccattgctcaaatcctcccttccctgaaaggcaagacatacctagatgtgccccaggtcacttgtagtcctgatcatgaggtacaaccaactctacccagcaaccctggccctggccccacctctgcatctaacatcactgtcatatacaccataaataaccagctgaggggggttgagctgctcttcaacgagaccatcaatgttagtgtgaaaagtgggtcagtgttacttgttgtcctagaggaagcacagcgcaaaaatcctatgttcaaatttgaaaccacaatgacatcttggggccttgtcgtctcttctatcaacaatatcgcggaaaatgttaatcacaagacatactggcagtttcttagtggtgtaacacctttgaatgaaggggttgctgactacatacccttcaaccacgagcacatcacagccaatttcacacagtactaacgaagaggtgggttcagcttctatcaaacatctccaaaggatgggtgaaattttttccacttcattttaaatctatgcaaaaaagcgaatgcctgtgatgctaccatattcctggtaaaaacatggagaaccactatgtagaataaaaatgcaaagttcactggagtctcaacatctatgactcatgaaaataaaattttcatcttctcaacacaa

SEQ ID NO: 11938 - DNA, 1623 bp, Homo sapiens
  source 1..1623: mol_type = unassigned DNA
gcaaatcgcggtacctgtggatgagagacatagacgagagagtgagatggcctggtttgccctctacctcctgagccttctctgggctacagctgggactagtacccagacccagagttcatgctgtgagtatgatgtttttccaaggaggtcagggaagcagttgccctggggaaggggctgtgacctctgacactgagtggttgaaaatagcaatcactataggaattccaaaatggccgttccctcagcacaggagcccttggtcaatggaatacaagtactcatggagaactcggtgacttcatcagcctacccaaaccccagcatcctgattgccatgaatctggccggagcctacaacttgaaggcccagaagctcctgacttaccagctcatgtccagcgacaacaacgatctaaccattgggcagctcggcctcaccatcatggccctcacctcctcctgccgagaccctggggataaagtatccattctacaaagacaaatggagaactgggcaccttccagccccaacgctgaagcatcagccttctatgggcccagtctagcgatcttggcactgtgccagaagaactctgaggcgaccttgccgatagccgtccgctttgccaagaccctgctggccaactcctctcccttcaatgtagacacaggagcaatggcaaccttggctctgacctgtatgtacaacaagatccctgtaggttcagaggaaggttacagatccctgtttggtcaggtactaaaggatattgtggagaaaatcagcatgaagatcaaagataatggcatcattggagacatctacagtactggcctcgccatgcaggctctctctgtaacacctgagccatctaaaaaggaatggaactgcaagaagactacggatatgatactcaatgagattaagcaggggaaattccacaaccccatgtccattgctcaaatcctcccttccctgaaaggcaagacatacctagatgtgccccaggtcacttgtagtcctgatcatgaggtacaaccaactctacccagcaaccctggccctggccccacctctgcatctaacatcactgtcatatacaccataaataaccagctgaggggggttgagctgctcttcaacgagaccatcaatgttagtgtgaaaagtgggtcagtgttacttgttgtcctagaggaagcacagcgcaaaaatcctatgttcaaatttgaaaccacaatgacatcttggggccttgtcgtctcttctatcaacaatatcgcggaaaatgttaatcacaagacatactggcagtttcttagtggtgtaacacctttgaatgaaggggttgctgactacatacccttcaaccacgagcacatcacagccaatttcacacagtactaacgaagaggtgggttcagcttctatcaaacatctccaaaggatgggtgaaattttttccacttcattttaaatctatgcaaaaaagcgaatgcctgtgatgctaccatattcctggtaaaaacatggagaaccactatgtagaataaaaatgcaaagttcactggagtctcaacatctatgactcatgaaaataaaattttcatcttctc

SEQ ID NO: 11939 - DNA, 470 bp, Homo sapiens
  source 1..470: mol_type = unassigned DNA
agagcagagacctgagaggcaccaggcccagccgtggcaccacacacctcccagctctgcagacgagatgcagcgactgtgtgtgtatgtgctgatctttgcactggctctggccgccttctctgaagcttcttggaagccccgctcccagcagccagatgcacccttaggtacaggggccaacagggacctggagctaccctggctggagcagcagggcccagcctctcatcatcgaaggcagctgggaccccagggtcccccacacctcgtggcagacccgtccaagaagcagggaccatggctggaggaagaagaagaagcctatggatggatggacttcggccgccgcagtgctgaggatgagaactaacaatcctagaaccaagcttcagagcctagccacctcccaccccactccagccctgtcccctgaaaaactgatcaaaaataaactagtttccagtgga

SEQ ID NO: 11940 - DNA, 848 bp, Homo sapiens
  source 1..848: mol_type = unassigned DNA
ccagcggctgcggcggcggagctcctccgaggtccgggtcaccagtctctgctcttcccagcctctccggcgcgctccaagggcttcccgtcgggaccatgcgcggccgtgagctcccgctggtcctgctggcgctggtcctctgcctggcgccccgggggcgagcggtcccgctgcctgcgggcggagggaccgtgctgaccaagatgtacccgcgcggcaaccactgggcggtggggcacttaatggggaaaaagagcacaggggagtcttcttctgtttctgagagagggagcctgaagcagcagctgagagagtacatcaggtgggaagaagctgcaaggaatttgctgggtctcatagaagcaaaggagaacagaaaccaccagccacctcaacccaaggccctgggcaatcagcagccttcgtgggattcagaggatagcagcaacttcaaagatgtaggttcaaaaggcaaagttggtagactctctgctccaggttctcaacgtgaaggaaggaacccccagctgaaccagcaatgataatgatggcctctctcaaaagagaaaaacaaaacccctaagagactgcgttctgcaagcatcagttctacggatcatcaacaagatttccttgtgcaaaatatttgactattctgtatctttcatccttgactaaattcgtgattttcaagcagcatcttctggtttaaacttgtttgctgtgaacaattgtcgaaaagagtcttccaattaatgcttttttatatctaggctacctgttggttagattcaaggccccgagctgttaccattcacaataaaagcttaaacacattgtccaaa

SEQ ID NO: 11941 - DNA, 579 bp, Homo sapiens
  source 1..579: mol_type = unassigned DNA
atgcgcggccgtgagctcccgctggtcctgctggcgctggtcctctgcctggcgccccgggggcgagcggtcccgctgcctgcgggcggagggaccgtgctgaccaagatgtacccgcgcggcaaccactgggcggtggggcacttaatggggaaaaagagcacaggggagtcttcttctgtttctgagagagggagcctgaagcagcagctgagagagtacatcaggtgggaagaagctgcaaggaatttgctgggtctcatagaagcaaaggagaacagaaaccaccagccacctcaacccaaggccctgggcaatcagcagccttcgtgggattcagaggatagcagcaacttcaaagatgtaggttcaaaaggcaaaggttctcaacgtgaaggaaggaacccccagctgaaccagcaatgataatgatggcctctctcaaaagagaaaaacaaaacccctaagagactgcgttctgcaagcatcagttctacggatcatcaacaagatttccttgtgcaaaatatttgactattctgtatctttcatccttgactaaattcgtgattttcaagc

SEQ ID NO: 11942 - DNA, 417 bp, Homo sapiens
  source 1..417: mol_type = unassigned DNA
atgcgcggccgtgagctcccgctggtcctgctggcgctggtcctctgcctggcgccccgggggcgagcggtcccgctgcctgcgggcggagggaccgtgctgaccaagatgtacccgcgcggcaaccactgggcggtggggcacttaatggggaaaaagagcacaggggagtcttcttctgtttctgagagagggagcctgaagcagcagctgagagagtacatcaggtgggaagaagctgcaaggaatttgctgggtctcatagaagcaaaggagaacagaaaccaccagccacctcaacccaaggccctgggcaatcagcagccttcgtgggattcagaggatagcagcaacttcaaagatttggtagactctctgctccaggttctcaacgtgaaggaaggaacccccagctga

SEQ ID NO: 11943 - DNA, 1929 bp, Homo sapiens
  source 1..1929: mol_type = unassigned DNA
ccagattctaaatatcaggaaagacgctgtgggaaaatagcaggccaaaagttcttagtaaactgcagccagggagactcagactagaatggaggtagaaagaactgatgcagagtgggtttaattctaagcctttttgtggctaagttttgttgttgttaacttattgaatttagagttgtattgcactggtcatgtgaaagccagagcagcaccagtgtcaaaatagtgacagagagttttgaataccatagttagtatatatgtactcagagtatttttattaaagaaggcaaagagcccggcatagatcttatcttcatcttcactcggttgcaaaatcaatagttaagaaatagcatctaagggaacttttaggtgggaaaaaaaatctagagatggctctaaatgactgtttccttctgaacttggaggtggaccatttcatgcactgcaacatctccagtcacagtgcggatctccccgtgaacgatgactggtcccacccggggatcctctatgtcatccctgcagtttatggggttatcattctgataggcctcattggcaacatcactttgatcaagatcttctgtacagtcaagtccatgcgaaacgttccaaacctgttcatttccagtctggctttgggagacctgctcctcctaataacgtgtgctccagtggatgccagcaggtacctggctgacagatggctatttggcaggattggctgcaaactgatcccctttatacagcttacctctgttggggtgtctgtcttcacactcacggcgctctcggcagacagatacaaagccattgtccggccaatggatatccaggcctctcatgccctgatgaagatctgcctcaaagccgcctttatctggatcatctccatgctgctggccattccagaggccgtgttttctgacctccatcccttccatgaggaaagcaccaaccagaccttcattagctgtgccccatacccacactctaatgagcttcaccccaaaatccattctatggcttcctttctggtcttctacgtcattccactgtcgatcatctctgtttactactacttcattgctaaaaatctgatccagagtgcttacaatcttcccgtggaagggaatatacatgtcaagaagcagattgaatcccggaagcgacttgccaagacagtgctggtgtttgtgggcctgttcgccttctgctggctccccaatcatgtcatctacctgtaccgctcctaccactactctgaggtggacacctccatgctccactttgtcaccagcatctgtgcccgcctcctggccttcaccaactcctgcgtgaacccctttgccctctacctgctgagcaagagtttcaggaaacagttcaacactcagctgctctgttgccagcctggcctgatcatccggtctcacagcactggaaggagtacaacctgcatgacctccctcaagagtaccaacccctccgtggccacctttagcctcatcaatggaaacatctgtcacgagcggtatgtctagattgacccttgattttgccccctgagggacggttttgctttatggctagacaggaacccttgcatccattgttgtgtctgtgccctccaaagagccttcagaatgctcctgagtggtgtaggtgggggtggggaggcccaaatgatggatcaccattatattttgaaagaagccatcaagtcttaagtttttcatttcaacttgtgaacgtttcttctgatgtgaagcaaaccttcccttttcagaaaagggaacaagtagaaaattattttttaagcctcaagccctgttaaatggtcgtggccaattatgtcatagaaactgtatgaacaaccagatttacatagcagagaaatcatacattgaatgcttactt

SEQ ID NO: 11944 - DNA, 1225 bp, Homo sapiens
  source 1..1225: mol_type = unassigned DNA
gggaacttttaggtgggaaaaaaaatctagagatggctctaaatgactgtttccttctgaacttggaggtggaccatttcatgcactgcaacatctccagtcacagtgcggatctccccgtgaacgatgactggtcccacccggggatcctctatgtcatccctgcagtttatggggttatcattctgataggcctcattggcaacatcactttgatcaagatcttctgtacagtcaagtccatgcgaaacgttccaaacctgttcatttccagtctggctttgggagacctgctcctcctaataacgtgtgctccagtggatgccagcaggtacctggctgacagatggctatttggcaggattggctgcaaactgatcccctttatacagcttacctctgttggggtgtctgtcttcacactcacggcgctctcggcagacagatacaaagccattgtccggccaatggatatccaggcctctcatgccctgatgaagatctgcctcaaagccgcctttatctggatcatctccatgctgctggccattccagaggccgtgttttctgacctccatcccttccatgaggaaagcaccaaccagaccttcattagctgtgccccatacccacactctaatgagcttcaccccaaaatccattctatggcttcctttctggtcttctacgtcattccactgtcgatcatctctgtttactactacttcattgctaaaaatctgatccagagtgcttacaatcttcccgtggaagggaatatacatgtcaagaagcagattgaatcccggaagcgacttgccaagacagtgctggtgtttgtgggcctgttcgccttctgctggctccccaatcatgtcatctacctgtaccgctcctaccactactctgaggtggacacctccatgctccactttgtcaccagcatctgtgcccgcctcctggccttcaccaactcctgcgtgaacccctttgccctctacctgctgagcgagtttcaggaaacagttcaacactcagctgctctgttgccagcctggcctgatcatccggtctcacagcactggaaggagtacaacctgcatgacctccctcaagagtaccaacccctccgtggccacctttagcctcatcaatggaaacatctgtcacgagcggtatgtctagattgacccttgattttgccccctgagggacggttttgctt

SEQ ID NO: 11945 - DNA, 814 bp, Homo sapiens
  source 1..814: mol_type = unassigned DNA
ataacacctagtttgagtcaacctggttaagtacaaatatgagaaggcttctcattcaggtccatgcttgcctactcctctgtccactgctttcgtgaagacaagatgaagttcacaattgtctttgctggacttcttggagtctttctagctcctgccctagctaactataatatcaacgtcaatgatgacaacaacaatgctggaagtgggcagcagtcagtgagtgtcaacaatgaacacaatgtggccaatgttgacaataacaacggatgggactcctggaattccatctgggattatggaaatggctttgctgcaaccagactctttcaaaagaagacatgcattgtgcacaaaatgaacaaggaagtcatgccctccattcaatcccttgatgcactggtcaaggaaaagaagcttcagggtaagggaccaggaggaccacctcccaagggcctgatgtactcagtcaacccaaacaaagtcgatgacctgagcaagttcggaaaaaacattgcaaacatgtgtcgtgggattccaacatacatggctgaggagatgcaagaggcaagcctgtttttttactcaggaacgtgctacacgaccagtgtactatggattgtggacatttccttctgtggagacacggtggagaactaaacaattttttaaagccactatggatttagtcatctgaatatgctgtgcagaaaaaatatgggctccagtggtttttaccatgtcattctgaaatttttctctactagttatgtttgatttctttaagtttcaataaaatcatttagcattg

SEQ ID NO: 11946 - DNA, 1092 bp, Homo sapiens
  source 1..1092: mol_type = unassigned DNA
atgcagcgggccggaggcggtagcgcccctgggggcaacggcgggggcggcggcgggggcccgggcactgccttctccatcgactccctaatcgggccgccgccgccgcgctccggccacttgctgtacaccggctaccccatgttcatgccctaccggccgctcgtgctgccgcaggcgctggcccctgcgccgctgcccgctggcctcccgcccctcgccccgctagcctctttcgccggccgccttaccaacaccttctgcgcggggctgggtcaggctgtgccctcgatggtggcgctgaccaccgcgctgcccagcttcgcggagccgcccgacgctttctacgggccccaggagctcgccgccgccgctgccgccgccgccgccactgccgcccgaaacaaccccgagccaggcggccgacgcccagagggtgggctggaagctgatgagctgctgccggcccgggagaaagtggcagagcccccaccacctccgcctccgcacttctcagagacttttccaagtctgcccgcagaggggaaggtgtacagctcagatgaggagaagctggaggcatcagcaggagacccagcaggcagcgaacaggaggaagagggctcaggcggtgacagcgaggatgacggtttcctggacagttctgcagggggcccaggggctcttctgggacctaaaccgaagctaaagggaagcctggggactggagctgaggagggggcaccggtgacagcaggggtcacagctcctggggggaaaagccgacggcgccgcacagcatttaccagcgagcagcttttggaattggagaaggaatttcattgcaagaaatacctgagcttgacagagcgctctcagatcgcccacgccctcaagctcagtgaggtgcaggtcaagatctggtttcagaatcgacgggccaagtggaagcgcatcaaagctggcaatgtgagcagccgttctggggagcccgtaagaaaccccaagattgttgtccccatacctgtgcatgtcaacaggtttgctgtgcggagccagcaccaacaaatggagcagggggcccggccctga

SEQ ID NO: 11947 - DNA, 2123 bp, Homo sapiens
  source 1..2123: mol_type = unassigned DNA
ccgccggagataagtacgccggcttcgcgcgctccccagcggcccgcgggaggcgacggacggcgggacggacggacggacggcagcttaccggggccgagggccaaacccgcgaagcgcgcgggctccgacgggcaagcggcggacgggggctccggcgagccctcggggcccgggcgccctctccactccggggcgcacggcctcaccccgcacaccccctgcacccgcccggcatgcagcgggcccaggactgaggggcggaggcgtctgctctccgggtcccgctcggcccctgcccggcgctcccggcggtgctcccggcgtccggcgggcttcccggcggcggcgcggcgcggggacttttcgcctctcgctggcctctaccgagcgcgtctatgagcgcagcgttcccgccgtcgctgatgatgatgcagcgcccgctggggagtagcaccgccttcagcatagactcgctgatcggcagcccgccgcagcccagccccggccatttcgtctacaccggctaccccatgttcatgccctaccggccggtagtgctgccgccgccgccgccgccgccgcccgcgctgccccaggccgcgctgcagccagcgctgccgcccgcacaccctcaccaccagatccccagcctgcccacaggcttctgctccagcctggcgcagggcatggcgctcacctctacgctcatggccacgctccccggcggcttctccgcgtcgccccagcaccaggaggcggcagcggcccgcaagttcgcgccgcagccgctgcccggcggcggtaacttcgacaaggcggaggcgctgcaggctgacgcggaggacggcaaaggcttcctggccaaagagggctcgctgctcgccttctccgcggccgagacggtgcaggcttcgctcgtcggggctgtccgagggcaagggaaagacgagtcaaaggtggaagacgacccgaagggcaaggaggagagcttctcgctggagagcgatgtggactacagctcggatgacaatctgactggccaggcagctcacaaggaggaagacccgggccacgcgctggaggagaccccgccgagcagcggcgccgcgggcagcaccacgtctacgggcaagaaccggcggcggcggactgccttcaccagcgagcagctgctggagctagagaaggagttccactgcaaaaagtacctctccttgaccgagcgctcgcagatcgcccacgccctcaaactcagcgaggtgcaggtgaaaatctggttccagaaccgacgggccaagtggaaacgggtgaaggcaggcaatgccaattccaagacaggggagccctcccggaaccctaagatcgtcgtccccatccctgtccacgtcagcaggttcgctatcagaagtcagcatcagcagctagaacaggcccggccctgagggtccagaagggccagggcctggcacccacctggagaagcccccgcacccgagggaacccatggtggactccactgtgtttgaagcaacaaagtcacagcccagctgtggccatcccaagcaaattgagaatatattcactaaatgggcttaaaagactgcttttgaaggggcttacagccacaccagaagacacgctaaatatttattatactatcctactttgtacataaatatctctatagactggatctcagctgcagtattttgaaagttataggacttaattacccagtaatttctccactcattccagaagaaaacaaaacctctgctgtaatctgcgcggttagcagccacctttccatacttttccaaaggtaaacgtgaaacccaagaacaagcactggggtttaaactgattttggtttgcgttctggctttttgagttgactgaaaagcagacattgttaggcagcctggaaattcgctttgctttgctttgcttttgcctggctttggtttcccctggggttgcctatcctatctgagccatgtgaagcacgtctccgttgtgttaatttatttcaatgtagcttattttcttataagttatgacatttaaacaatttcagtcttgtgaataataaaaaggagagagggggggaaaaagaccaa

SEQ ID NO: 11948 - DNA, 3367 bp, Homo sapiens
  source 1..3367: mol_type = unassigned DNA
gagcgccaggaaggtagcgaggccagcgtcgccccgggactcgctgctcaagtctgtctattgcctgccgccacatccatcctagcagggccccgtcgcccaccaggcggacaaaagcggtccgctgaacaccatgcggccgctcggcgtgccgcccaggctctgctggtgagcgccgccaccccgcgcccaggtcccgcgagcccgcctgccgcgcacctcgccctgctcccagctctactccaggccccgtccgcccgggggcgccgcccaccgcgcctcgctcgggccgttgccgtctgcacccagaccctgagccgccgccgccggccatggaggtggcgcccgagcagccgcgctggatggcgcacccggccgtgctgaatgcgcagcaccccgactcacaccacccgggcctggcgcacaactacatggaacccgcgcagctgctgcctccagacgaggtggacgtcttcttcaatcacctcgactcgcagggcaacccctactatgccaaccccgctcacgcgcgggcgcgcgtctcctacagccccgcgcacgcccgcctgaccggaggccagatgtgccgcccacacttgttgcacagcccgggtttgccctggctggacgggggcaaagcagccctctctgccgctgcggcccaccaccacaacccctggaccgtgagccccttctccaagacgccactgcacccctcagctgctggaggccctggaggcccactctctgtgtacccaggggctgggggtgggagcgggggaggcagcgggagctcagtggcctccctcacccctacagcagcccactctggctcccaccttttcggcttcccacccacgccacccaaagaagtgtctcctgaccctagcaccacgggggctgcgtctccagcctcatcttccgcggggggtagtgcagcccgaggagaggacaaggacggcgtcaagtaccaggtgtcactgacggagagcatgaagatggaaagtggcagtcccctgcgcccaggcctagctactatgggcacccagcctgctacacaccaccccatccccacctacccctcctatgtgccggcggctgcccacgactacagcagcggactcttccaccccggaggcttcctggggggaccggcctccagcttcacccctaagcagcgcagcaaggctcgttcctgttcagaaggccgggagtgtgtcaactgtggggccacagccacccctctctggcggcgggacggcaccggccactacctgtgcaatgcctgtggcctctaccacaagatgaatgggcagaaccgaccactcatcaagcccaagcgaagactgtcggccgccagaagagccggcacctgttgtgcaaattgtcagacgacaaccaccaccttatggcgccgaaacgccaacggggaccctgtctgcaacgcctgtggcctctactacaagctgcacaatgttaacaggccactgaccatgaagaaggaagggatccagactcggaaccggaagatgtccaacaagtccaagaagagcaagaaaggggcggagtgcttcgaggagctgtcaaagtgcatgcaggagaagtcatcccccttcagtgcagctgccctggctggacacatggcacctgtgggccacctcccgcccttcagccactccggacacatcctgcccactccgacgcccatccacccctcctccagcctctccttcggccacccccacccgtccagcatggtgaccgccatgggctagggaacagatggacgtcgaggaccgggcactcccgggatgggtggaccaaacccttagcagcccagcatttcccgaaggccgacaccactcctgccagcccggctcggcccagcaccccctctcctggagggcgcccagcagcctgccagcagttactgtgaatgttccccaccgctgagaggctgcctccgcacctgaccgctgcccaggtggggtttcctgcatggacagttgtttggagaacaacaaggacaactttatgtagagaaaaggaggggacgggacagacgaaggcaaccatttttagaaggaaaaaggattaggcaaaaataatttattttgctcttgtttctaacaaggacttggagacttggtggtctgagctgtcccaagtcctccggttcttcctcgggattggcgggtccacttgccagggctctgggggcagatttgtggggacctcagcctgcaccctcttctcctctggcttccctctctgaaatagccgaactccaggctgggctgagccaaagccagagtggccacggcccagggagggtgagctggtgcctgctttgacgggccaggccctggagggcagagacaatcacgggcggtcctgcacagattcccaggccagggctgggtcacaggaaggaaacaacattttcttgaaaggggaaacgtctcccagatcgctcccttggctttgaggccgaagctgctgtgactgtgtccccttactgagcgcaagccacagcctgtcttgtcaggtggaccctgtaaatacatcctttttctgctaacccttcaaccccctcgcctcctactctgagacaaaagaaaaaatattaaaaaaatgcataggcttaactcgctgatgagttaattgttttatttttaaactctttttgggtccagttgattgtacgtagccacaggagccctgctatgaaaggaataaaacctacacacaaggttggagctttgcaattctttttggaaaagagctgggatcccacagccctagtatgaaagctgggggtggggaggggcctttgctgcccttggtttctgggggctggttggcatttgctggcctggcagggggtgaaggcaggagttgggggcaggtcaggaccaggacccagggagaggctgtgtccctgctggggtctcaggtccagctttactgtggctgtctggatccttcccaaggtacagctgtatataaacgtgtcccgagcttagattctgtatgcggtgacggcggggtgtggtggcctgtgaggggcccctggcccaggaggaggattgtgctgatgtagtgaccaagtgcaatatgggcgggcagtcgctgcagggagcaccacggccagaagtaacttattttgtactagtgtccgcataagaaaaagaatcggcagtattttctgtttttatgttttatttggcttgttttattttggattagtgaactaagttattgttaattatgtacaacatttatatattgtctgtaaaaaatgtatgctatcctcttattcctttaaagtgagtactgttaagaataataaaatactttttgtgaa

SEQ ID NO: 11949 - DNA, 2525 bp, Homo sapiens
  source 1..2525: mol_type = unassigned DNA
ggcagctggcgccagggcggccggaggatgccgaggggccggagccgggagggcccgaggccgaggcgcactctacccccagctcctaccctgtaagccccgccagcctccggacgtgctgtccctgggcccgtcgccctcggggctcccgccggaactccttcactctcagaggccgagtccctcccctccccacggctgcgtgtggccgttgccgtctgcacccagaccctgagccgccgccgccggccatggaggtggcgcccgagcagccgcgctggatggcgcacccggccgtgctgaatgcgcagcaccccgactcacaccacccgggcctggcgcacaactacatggaacccgcgcagctgctgcctccagacgaggtggacgtcttcttcaatcacctcgactcgcagggcaacccctactatgccaaccccgctcacgcgcgggcgcgcgtctcctacagccccgcgcacgcccgcctgaccggaggccagatgtgccgcccacacttgttgcacagcccgggtttgccctggctggacgggggcaaagcagccctctctgccgctgcggcccaccaccacaacccctggaccgtgagccccttctccaagacgccactgcacccctcagctgctggaggccctggaggcccactctctgtgtacccaggggctgggggtgggagcgggggaggcagcgggagctcagtggcctccctcacccctacagcagcccactctggctcccaccttttcggcttcccacccacgccacccaaagaagtgtctcctgaccctagcaccacgggggctgcgtctccagcctcatcttccgcggggggtagtgcagcccgaggagaggacaaggacggcgtcaagtaccaggtgtcactgacggagagcatgaagatggaaagtggcagtcccctgcgcccaggcctagctactatgggcacccagcctgctacacaccaccccatccccacctacccctcctatgtgccggcggctgcccacgactacagcagcggactcttccaccccggaggcttcctggggggaccggcctccagcttcacccctaagcagcgcagcaaggctcgttcctgttcagaaggccgggagtgtgtcaactgtggggccacagccacccctctctggcggcgggacggcaccggccactacctgtgcaatgcctgtggcctctaccacaagatgaatgggcagaaccgaccactcatcaagcccaagcgaagactgacgacaaccaccaccttatggcgccgaaacgccaacggggaccctgtctgcaacgcctgtggcctctactacaagctgcacaatgttaacaggccactgaccatgaagaaggaagggatccagactcggaaccggaagatgtccaacaagtccaagaagagcaagaaaggggcggagtgcttcgaggagctgtcaaagtgcatgcaggagaagtcatcccccttcagtgcagctgccctggctggacacatggcacctgtgggccacctcccgcccttcagccactccggacacatcctgcccactccgacgcccatccacccctcctccagcctctccttcggccacccccacccgtccagcatggtgaccgccatgggctagggaacagatggacgtcgaggaccgggcactcccgggatgggtggaccaaacccttagcagcccagcatttcccgaaggccgacaccactcctgccagcccggctcggcccagcaccccctctcctggagggcgcccagcagcctgccagcagttactgtgaatgttccccaccgctgagaggctgcctccgcacctgaccgctgcccaggtggggtttcctgcatggacagttgtttggagaacaacaaggacaactttatgtagagaaaaggaggggacgggacagacgaaggcaaccatttttagaaggaaaaaggattaggcaaaaataatttattttgctcttgtttctaacaaggacttggagacttggtggtctgagctgtcccaagtcctccggttcttcctcgggattggcgggtccacttgccagggctctgggggcagatttgtggggacctcagcctgcaccctcttctcctctggcttccctctctgaaatagccgaactccaggctgggctgagccaaagccagagtggccacggcccagggagggtgagctggtgcctgctttgacgggccaggccctggagggcagagacaatcacgggcggtcctgcacagattcccaggccagggctgggtcacaggaaggaaacaacattttcttgaaaggggaaacgtctcccagatcgctcccttggctttgaggccgaagctgctgtgactgtgtccccttactgagcgcaagccacagcctgtcttgtcaggtggaccctgtaaatacatcctttttctgctaacccttcaaccccctcgcctcctactctgagacaaaagaaaaaatattaaaaaaatgcataggcttaa

SEQ ID NO: 11950 - DNA, 1878 bp, Homo sapiens
  source 1..1878: mol_type = unassigned DNA
actgggtcaagcacagccctgagcggccgcgtgtccgaggcccaggtgccctctagagccctgtagttcctgcccctctctgcccctctcggctcctgctgttccgccgctgtcgtccgaaccatcccaacccccagtccacccagacagcgcccgagctaggggagggaacggtctgggagtcggcagctggcgccagggcggccggaggatgccgaggggccggagccgggagggcccgaggccgaggcgcactctacccccagctcctaccctgtaagccccgccagcctccggacgtgctgtccctgggcccgtcgccctcggggctcccgccggaactccttcactctcagaggccgagtccctcccctccccacggctgcgtgtggccgttgccgtctgcacccagaccctgagccgccgccgccggccatggaggtggcgcccgagcagccgcgctggatggcgcacccggccgtgctgaatgcgcagcaccccgactcacaccacccgggcctggcgcacaactacatggaacccgcgcagctgctgcctccagacgaggtggacgtcttcttcaatcacctcgactcgcagggcaacccctactatgccaaccccgctcacgcgcgggcgcgcgtctcctacagccccgcgcacgcccgcctgaccggaggccagatgtgccgcccacacttgttgcacagcccgggtttgccctggctggacgggggcaaagcagccctctctgccgctgcggcccaccaccacaacccctggaccgtgagccccttctccaagacgccactgcacccctcagctgctggaggccctggaggcccactctctgtgtacccaggggctgggggtgggagcgggggaggcagcgggagctcagtggcctccctcacccctacagcagcccactctggctcccaccttttcggcttcccacccacgccacccaaagaagtgtctcctgaccctagcaccacgggggctgcgtctccagcctcatcttccgcggggggtagtgcagcccgaggagaggacaaggacggcgtcaagtaccaggtgtcactgacggagagcatgaagatggaaagtggcagtcccctgcgcccaggcctagctactatgggcacccagcctgctacacaccaccccatccccacctacccctcctatgtgccggcggctgcccacgactacagcagcggactcttccaccccggaggcttcctggggggaccggcctccagcttcacccctaagcagcgcagcaaggctcgttcctgttcagaaggccgggagtgtgtcaactgtggggccacagccacccctctctggcggcgggacggcaccggccactacctgtgcaatgcctgtggcctctaccacaagatgaatgggcagaaccgaccactcatcaagcccaagcgaagactgtcggccgccagaagagccggcacctgttgtgcaaattgtcagacgacaaccaccaccttatggcgccgaaacgccaacggggaccctgtctgcaacgcctgtggcctctactacaagctgcacaatgttaacaggccactgaccatgaagaaggaagggatccagactcggaaccggaagatgtccaacaagtccaagaagagcaagaaaggggcggagtgcttcgaggagctgtcaaagtgcatgcaggagaagtcatcccccttcagtgcagctgccctggctggacacatggcacctgtgggccacctcccgcccttcagccactccggacacatcctgcccactccgacgcccatccacccctcctccagcctctccttcggccacccccacccgtccagcatggtgaccgccatgggctag

SEQ ID NO: 11951 - DNA, 844 bp, Homo sapiens
  source 1..844: mol_type = unassigned DNA
gtcgagcgcgggtccctctttattggccagctgggcgccctgctacttggcgtcgcatttctctctcccaggcgggttcgtttccgccagagaatgcagcagtcccgcatcctacgcaggacctgcaaccgaggtggaggcttcggtcaagccggctcctgcctgcgttgtcgaggaaggcaaccccaaggcctgaaaggacctggcagaactcctgtttcctttttttcctctacaccggattgcgggcaaggaggctggttcgggtctcccgaggcccctgctcaagcactccttaaccgtcctgctaagcccctctgtgcggcgattttctgagctgccgagcgggggccgttgccgtctgcacccagaccctgagccgccgccgccggccatggaggtggcgcccgagcagccgcgctggatggcgcacccggccgtgctgaatgcgcagcaccccgactcacaccacccgggcctggcgcacaactacatggaacccgcgcagctgctgcctccagacgaggtggacgtcttcttcaatcacctcgactcgcagggcaacccctactatgccaaccccgctcacgcgcgggcgcgcgtctcctacagccccgcgcacgcccgcctgaccggaggccagatgtgccgcccacacttgttgcacagcccgggtttgccctggctggacgggggcaaagcagccctctctgccgctgcggcccaccaccacaacccctggaccgtgagccccttctccaagacgccactgcacccctcagctgctggaggccctggaggcccactctctgtgtacccaggggctgggggtgggagcggggga

SEQ ID NO: 11952 - DNA, 563 bp, Homo sapiens
  source 1..563: mol_type = unassigned DNA
ggtagcgaggccagcgtcgccccgggactcgctgctcaagtctgtctattgcctgccgccacatccatcctagcagggccccgtcgcccaccaggcggacaaaagcggtccgctgaacaccatgcggccgctcggcgtgccgcccaggctctgctggtgagcgccgccaccccgcgcccaggtcccgcgagcccgcctgccgcgcacctcgccctgctcccagctctactccaggccccgtccgcccgggggcgccgcccaccgcgcctcgctcggcttgaactccgcgttgctccaaccacgaggggaaaggccccgcgttcagggaccccgtgtgtggcgaacgctcctttaccggaaaacaaggaaggaaattcgttgttttggaaaaagcctcctctcccgaggtcgggaacatctggtggtgagctccaggtctacgcaggcaccccgtgctaggattcgtttatgagcaggcaggattcgagaaccagggccgttgccgtctgcacccagaccctgagccgccgccgccggccatggaggtggcgcccgagcagccg

SEQ ID NO: 11953 - DNA, 1865 bp, Homo sapiens
  source 1..1865: mol_type = unassigned DNA
ggaccttcaggccctggggtgaattcagctgctcctacatcagcttccggaaccaccaaaaattcaaattgggattttccggagtaaacaagagcctagagccctttgctcaatgctggatttaatacgtatatatttttaagcgagttggttttttcccctttgatttttgatcttcgcgacagttcctcccacgcatattatcgttgttgccgtcgttttctctccccgcgtggctccttgacctgcgagggagagagaggacaccgaagccgggagctcgcagggaccatgtatcagagcttgccatggccgccaaccacgggccgccccccggtgcctacgaggcgggcggccccggcgccttcatgcacggcgcgggcgccgcgtcctcgccagtctacgtgcccacaccgcggtgccctcctccgtgctgggcctgtcctacctccagggcggaggcgcgggctctgcgtccggagggcctcgggcggcagctccggtggggccgcgtctggtgcggggcccgggacccagcagggcagcccgggatggagccaggcgggagccgacggagccgcttacaccccgccgccggtgtcgccgcgcttctccttcccggggaccaccgggtccctggcggccgccgccgccgctgccgcggcccgggaagctgcggcctacagcagtggcggcggagcggcgggtgcgggcctggcgggccgcgagcagtacgggcgcgccggcttcgcgggctcctactccagcccctacccggcttacatggccgacgtgggcgcgtcctgggccgcagccgccgccgcctccgccggccccttcgacagcccggtcctgcacagcctgcccggccgggccaacccggccgcccgacaccccaatctcgatatgtttgacgacttctcagaaggcagagagtgtgtcaactgtggggctatgtccaccccgctctggaggcgagatgggacgggtcactatctgtgcaacgcctgcggcctctaccacaagatgaacggcatcaaccggccgctcatcaagcctcagcgccggctgtccgcctcccgccgagtgggcctctcctgtgccaactgccagaccaccaccaccacgctgtggcgccgcaatgcggagggcgagcctgtgtgcaatgcctgcggcctctacatgaagctccacggggtccccaggcctcttgcaatgcggaaagaggggatccaaaccagaaaacggaagcccaagaacctgaataaatctaagacaccagcagctccttcaggcagtgagagccttcctcccgccagcggtgcttccagcaactccagcaacgccaccaccagcagcagcgaggagatgcgtcccatcaagacggagcctggcctgtcatctcactacgggcacagcagctccgtgtcccagacgttctcagtcagtgcgatgtctggccatgggccctccatccaccctgtcctctcggccctgaagctctccccacaaggctatgcgtctcccgtcagccagtctccacagaccagctccaagcaggactcttggaacagcctggtcttggccgacagtcacggggacataatcactgcgtaatcttccctcttccctcctcaaattcctgcacggacctgggacttggaggatagcaaagaaggaggccctgggctcccaggggccggcctcctctgcctggtaatgactccagaacaacaactgggaagaaacttgaagtcgacaatctggttaggggaagcgggtgttggattttctcagatgcctttacacgctgatgggactggagggagcccacccttcagcacgagcacactgcatctctcctg

SEQ ID NO: 11954 - DNA, 3414 bp, Homo sapiens
  source 1..3414: mol_type = unassigned DNA
ggacttggaggcggccggcgcaggggccgcgagaggcttcgtcgccgctgcagctccgggggctcccaggggagcgtgcgcggaacctccaggcccagcaggaccccggctgcggcgaggaggaaggagccagcctagcagcttctgcgcctgtggccgcgggtgtcctggaggcctctcggtgtgacgagtgggggacccgaaggctcgtgcgccacctccaggcctggacgctgccctccgtcttctgcccccaataggtgcgccggaccttcaggccctggggtgaattcagctgctcctacatcagcttccggaaccaccaaaaattcaaattgggattttccggagtaaacaagagcctagagccctttgctcaatgctggatttaatacgtatatatttttaagcgagttggttttttcccctttgatttttgatcttcgcgacagttcctcccacgcatattatcgttgttgccgtcgttttctctccccgcgtggctccttgacctgcgagggagagagaggacaccgaagccgggagctcgcagggaccatgtatcagagcttggccatggccgccaaccacgggccgccccccggtgcctacgaggcgggcggccccggcgccttcatgcacggcgcgggcgccgcgtcctcgccagtctacgtgcccacaccgcgggtgccctcctccgtgctgggcctgtcctacctccagggcggaggcgcgggctctgcgtccggaggcgcctcgggcggcagctccggtggggccgcgtctggtgcggggcccgggacccagcagggcagcccgggatggagccaggcgggagccgacggagccgcttacaccccgccgccggtgtcgccgcgcttctccttcccggggaccaccgggtccctggcggccgccgccgccgctgccgcggcccgggaagctgcggcctacagcagtggcggcggagcggcgggtgcgggcctggcgggccgcgagcagtacgggcgcgccggcttcgcgggctcctactccagcccctacccggcttacatggccgacgtgggcgcgtcctgggccgcagccgccgccgcctccgccggccccttcgacagcccggtcctgcacagcctgcccggccgggccaacccggccgcccgacaccccaatctcgatatgtttgacgacttctcagaaggcagagagtgtgtcaactgtggggctatgtccaccccgctctggaggcgagatgggacgggtcactatctgtgcaacgcctgcggcctctaccacaagatgaacggcatcaaccggccgctcatcaagcctcagcgccggctgtccgcctcccgccgagtgggcctctcctgtgccaactgccagaccaccaccaccacgctgtggcgccgcaatgcggagggcgagcctgtgtgcaatgcctgcggcctctacatgaagctccacggggtccccaggcctcttgcaatgcggaaagaggggatccaaaccagaaaacggaagcccaagaacctgaataaatctaagacaccagcagctccttcaggcagtgagagccttcctcccgccagcggtgcttccagcaactccagcaacgccaccaccagcagcagcgaggagatgcgtcccatcaagacggagcctggcctgtcatctcactacgggcacagcagctccgtgtcccagacgttctcagtcagtgcgatgtctggccatgggccctccatccaccctgtcctctcggccctgaagctctccccacaaggctatgcgtctcccgtcagccagtctccacagaccagctccaagcaggactcttggaacagcctggtcttggccgacagtcacggggacataatcactgcgtaatcttccctcttccctcctcaaattcctgcacggacctgggacttggaggatagcaaagaaggaggccctgggctcccaggggccggcctcctctgcctggtaatgactccagaacaacaactgggaagaaacttgaagtcgacaatctggttaggggaagcgggtgttggattttctcagatgcctttacacgctgatgggactggagggagcccacccttcagcacgagcacactgcatctctcctgtgagttggagacttctttcccaagatgtccttgtcccctgcgttccccactgtggcctagaccgtgggttttgcattgtgtttctagcaccgaggatctgagaacaagcggagggccgggccctgggacccctgctccagcccgaatgacggcatctgtttgccatgtacctggatgcgacgggcccctggggacaggcccttgccccatccatccgcttgaggcatggcaccgccctgcatccctaataccaaatctgactccaaaattgtggggtgtgacatacaagtgactgaacacttcctggggagctacaggggcacttaacccaccacagcacagcctcatcaaaatgcagctggcaacttctcccccaggtgccttccccctgctgccggcctttgctccttcacttccaacatctctcaaaataaaaatccctcttcccgctctgagcgattcagctctgcccgcagcttgtacatgtctctcccctggcaaaacaagagctgggtagtttagccaaacggcaccccctcgagttcactgcagacccttcgttcaccgtgtcacacatagaggggttctgagtaagaacaaaacgttctgctgctcaagccagtctggcaagcactcagcccagcctcgaggtccttctggggagagtgtaagtggacagagtcctggtcagggggcaggagtgtcccaagggctggcccacctgctgtctgtctgctcctcctagcccttggtcagatggcagccagagtccctcaggacctgcagcctcgccccggcagaagtcttttgtccaggaggcaaaaagccagagattctgcaacacgaattcgaagcaaacaaacacaacacaacagaattcctggaaagaagacgactgctaagacacggcaggggggcctggagggagcctccgactctgagctgctccgggatctgccgcgttctcctctgcacattgctgtttctgcccctgatgctggagctcaaggagactccttcctctttctcagcagagctgtagctgactgtggcattactacgcctccccacacgcccagacccctcactccaaaatcctactggctgtagcagagaatacctttgaaccaagattctgttttaatcatcatttacattgttttcttccaaaggccccctcgtataccctccctaacccacaaacctgttaacattgtcttaaggtgaaatggctggaaaatcagtatttaactaataaatttatctgtattcctctttc

SEQ ID NO: 11955 - DNA, 686 bp, Homo sapiens
  source 1..686: mol_type = unassigned DNA
agtcagcgccctagggccgagttgctgggccggggacccgagccgcgagctggggacttggaggcggccggcgcaggggccgcgagaggcttcgtcgccgctgcagctccgggggctcccaggggagcgtgcgcggaacctccaggcccagcagtagatatgtttgacgacttctcagaaggcagagagtgtgtcaactgtggggctatgtccaccccgctctggaggcgagatgggacgggtcactatctgtgcaacgcctgcggcctctaccacaagatgaacggcatcaaccggccgctcatcaagcctcagcgccggctgtccgcctcccgccgagtgggcctctcctgtgccaactgccagaccaccaccaccacgctgtggcgccgcaatgcggagggcgagcctgtgtgcaatgcctgcggcctctacatgaagctccacggggtccccaggcctcttgcaatgcggaaagaggggatccaaaccagaaaacggaagcccaagaacctgaataaatctaagacaccagcagctccttcaggcagtgagagccttcctcccgccagcggtgcttccagcaactccagcaacgccaccaccagcagcagcgaggagatgcgtcccatcaagacggagcctggcctgtcatctcactacgggcacagcagctccgtgtccca

SEQ ID NO: 11956 - DNA, 1010 bp, Homo sapiens
  source 1..1010: mol_type = unassigned DNA
cgcaggggccgcgagaggcttcgtcgccgctgcagctccgggggctcccaggggagcgtgcgcggaacctccaggcccagcagttatgaaagaaaaaaaattacattatcttgaagaactgcaggagttgagtattccagaaaatgcaatgaaataggtcagctacttgattttaaaagtcaaatactggatcttttattaaggaccccggctgcggcgaggaggaaggagccagcctagcagcttctgcgcctgtggccgcgggtgtcctggaggcctctcggtgtgacgagtgggggacccgaaggctcgtgcgccacctccaggcctggacgctgccctccgtcttctgcccccaataggtgcgccggaccttcaggccctggggtgaattcagctgctcctacatcagcttccggaaccaccaaaaattcaaattgggattttccggagtaaacaagagcctagagccctttgctcaatgctggatttaatacgtatatatttttaagcgagttggttttttcccctttgatttttgatcttcgcgacagttcctcccacgcatattatcgttgttgccgtcgttttctctccccgcgtggctccttgacctgcgagggagagagaggacaccgaagccgggagctcgcagggaccatgtatcagagcttggccatggccgccaaccacgggccgccccccggtgcctacgaggcgggcggccccggcgccttcatgcacggcgcgggcgccgcgtcctcgccagtctacgtgcccacaccgcgggtgccctcctccgtgctgggcctgtcctacctccagggcggaggcgcgggctctgcgtccggaggcgcctcgggcggcagctccggtggggccgcgtctggtgcggggcccgggacccagcagggcagcccgggatggagccaggcgggagccgacggagccgcttacaccccgccgccggtgtcgccgcgcttctccttcccggggaccaccgggtccct

SEQ ID NO: 11957 - DNA, 2614 bp, Homo sapiens
  source 1..2614: mol_type = unassigned DNA
acaacgtctccctcccacccggctgagaacagcctggaatccctgtgcagagtttgcctcacaccaggccttgagcagccgcagggacgccgctccccaccgcggggacgcatcctgctctgcaccctggttctcggcgctgcgcccgcggaggctcgtgcagggcaggctgcccgtgcgggtgaggactgagtgccgcgcagggaaggagtatcgcagaccggcgcccaggcccagcgggggaatccaagggccgtgttgcaggactcggcattcgttctgcgcgggtcaccttgaatgtctgtccggatccctcgcggcagggccgcagaggcgcgtccatatcttggaggaattcgttccatagaatgagtagatatgtttgacgacttctcagaaggcagagagtgtgtcaactgtggggctatgtccaccccgctctggaggcgagatgggacgggtcactatctgtgcaacgcctgcggcctctaccacaagatgaacggcatcaaccggccgctcatcaagcctcagcgccggctgtccgcctcccgccgagtgggcctctcctgtgccaactgccagaccaccaccaccacgctgtggcgccgcaatgcggagggcgagcctgtgtgcaatgcctgcggcctctacatgaagctccacggggtccccaggcctcttgcaatgcggaaagaggggatccaaaccagaaaacggaagcccaagaacctgaataaatctaagacaccagcagctccttcaggcagtgagagccttcctcccgccagcggtgcttccagcaactccagcaacgccaccaccagcagcagcgaggagatgcgtcccatcaagacggagcctggcctgtcatctcactacgggcacagcagctccgtgtcccagacgttctcagtcagtgcgatgtctggccatgggccctccatccaccctgtcctctcggccctgaagctctccccacaaggctatgcgtctcccgtcagccagtctccacagaccagctccaagcaggactcttggaacagcctggtcttggccgacagtcacggggacataatcactgcgtaatcttccctcttccctcctcaaattcctgcacggacctgggacttggaggatagcaaagaaggaggccctgggctcccaggggccggcctcctctgcctggtaatgactccagaacaacaactgggaagaaacttgaagtcgacaatctggttaggggaagcgggtgttggattttctcagatgcctttacacgctgatgggactggagggagcccacccttcagcacgagcacactgcatctctcctgtgagttggagacttctttcccaagatgtccttgtcccctgcgttccccactgtggcctagaccgtgggttttgcattgtgtttctagcaccgaggatctgagaacaagcggagggccgggccctgggacccctgctccagcccgaatgacggcatctgtttgccatgtacctggatgcgacgggcccctggggacaggcccttgccccatccatccgcttgaggcatggcaccgccctgcatccctaataccaaatctgactccaaaattgtggggtgtgacatacaagtgactgaacacttcctggggagctacaggggcacttaacccaccacagcacagcctcatcaaaatgcagctggcaacttctcccccaggtgccttccccctgctgccggcctttgctccttcacttccaacatctctcaaaataaaaatccctcttcccgctctgagcgattcagctctgcccgcagcttgtacatgtctctcccctggcaaaacaagagctgggtagtttagccaaacggcaccccctcgagttcactgcagacccttcgttcaccgtgtcacacatagaggggttctgagtaagaacaaaacgttctgctgctcaagccagtctggcaagcactcagcccagcctcgaggtccttctggggagagtgtaagtggacagagtcctggtcagggggcaggagtgtcccaagggctggcccacctgctgtctgtctgctcctcctagcccttggtcagatggcagccagagtccctcaggacctgcagcctcgccccggcagaagtcttttgtccaggaggcaaaaagccagagattctgcaacacgaattcgaagcaaacaaacacaacacaacagaattcctggaaagaagacgactgctaagacacggcaggggggcctggagggagcctccgactctgagctgctccgggatctgccgcgttctcctctgcacattgctgtttctgcccctgatgctggagctcaaggagactccttcctctttctcagcagagctgtagctgactgtggcattactacgcctccccacacgcccagacccctcactccaaaatcctactggctgtagcagagaatacctttgaaccaagattctgttttaatcatcatttacattgttttcttccaaaggccccctcgtataccctccctaacccacaaacctgttaacattgtcttaaggtgaaatggctggaaaatcagtatttaactaataaatttatctgtattcctctt

SEQ ID NO: 11958 - DNA, 1459 bp, Homo sapiens
  source 1..1459: mol_type = unassigned DNA
gccgtcgttttctctccccgcgtggctccttgacctgcgagggagagagaggacaccgaagccgggagctcgcagggaccatgtatcagagcttggccatggccgccaaccacgggccgccccccggtgcctacgaggcgggcggccccggcgccttcatgcacggcgcgggcgccgcgtcctcgccagtctacgtgcccacaccgcgggtgccctcctccgtgctgggcctgtcctacctccagggcggaggcgcgggctctgcgtccggaggcgcctcgggcggcagctccggtggggccgcgtctggtgcggggcccgggacccagcagggcagcccgggatggagccaggcgggagccgacggagccgcttacaccccgccgccggtgtcgccgcgcttctccttcccggggaccaccgggtccctggcggccgccgccgccgctgccgcggcccgggaagctgcggcctacagcagtggcggcggagcggcgggtgcgggcctggcgggccgcgagcagtacgggcgcgccggcttcgcgggctcctactccagcccctacccggcttacatggccgacgtgggcgcgtcctgggccgcagccgccgccgcctccgccggccccttcgacagcccggtcctgcacagcctgcccggccgggccaacccggccgcccgacaccccaatctcgtagatatgtttgacgacttctcagaaggcagagagtgtgtcaactgtggggctatgtccaccccgctctggaggcgagatgggacgggtcactatctgtgcaacgcctgcggcctctaccacaagatgaacggcatcaaccggccgctcatcaagcctcagcgccggctgtccgcctcccgccgagtgggcctctcctgtgccaactgccagaccaccaccaccacgctgtggcgccgcaatgcggagggcgagcctgtgtgcaatgcctgcggcctctacatgaagctccacggggtccccaggcctcttgcaatgcggaaagaggggatccaaaccagaaaacggaagcccaagaacctgaataaatctaagacaccagcagctccttcaggcagtgagagccttcctcccgccagcggtgcttccagcaactccagcaacgccaccaccagcagcagcgaggagatgcgtcccatcaagacggagcctggcctgtcatctcactacgggcacagcagctccgtgtcccagacgttctcagtcagtgcgatgtctggccatgggccctccatccaccctgtcctctcggccctgaagctctccccacaaggctatgcgtctcccgtcagccagtctccacagaccagctccaagcaggactcttggaacagcctggtcttggccgacagtcacggggacataatcactgcgtaatcttccctcttccctcctcaaattcctgcacggacctgggacttgga

SEQ ID NO: 11959 - DNA, 2595 bp, Homo sapiens
  source 1..2595: mol_type = unassigned DNA
ccaccgccaccgccgtgccctgccgccctccctgcccgctggtcaagaccacgcctgggaggatgtaccagagcctggcgctggccgcgagcccccgccaggccgcctacgccgactcgggctccttcctgcacgctccgggcgccggctctccgatgtttgtgccgccggcgcgcgtcccctcgatgctgtcctacctgtccgggtgtgagccgagcccgcagccccccgagctcgctgcgcgccccggctgggcgcagacagccaccgcggattcgtcggccttcggcccgggcagtccgcaccccccagccgcgcacccgcccggggccaccgccttccctttcgcgcacagcccctcggggcccggcagcggcggcagcgcggggggccgagacggcagtgcctaccagggcgcgctgttgcctcgagaacagttcgcggccccgcttgggcggccggtggggacctcgtactccgccacctacccggcctacgtgagccccgacgtggcccagtcctggactgccgggcccttcgatggcagcgtcctgcacggcctcccaggccgcaggcccaccttcgtgtccgacttcttggaggagttcccgggtgagggtcgtgagtgtgtcaactgcggggccctgtccacaccgctgtggcgccgagacggcaccggccactacctgtgcaatgcctgcggcctctaccacaagatgaatggcgtcaaccggccgctcgttcggcctcagaagcgcctgtcctcgtcccgccgcgccggcctctgctgcaccaactgccacacgaccaacaccacgctgtggcggcggaactcggagggggagcccgtgtgcaatgcctgcggcctctacatgaagctgcacggggtgccgcggcctctggctatgaagaaggaaagcatccagacacggaagcggaagccaaagaccatcgccaaggccaggggctcctcaggatccacaaggaatgcctcggcctccccatctgctgtcgccagcactgacagctcagcagccacttcgaaagccaagcccagcctggcgtccccagtgtgccctgggcccagcatggccccccaggcctctggccaggaggatgactctcttgcccccggccacttggagttcaagttcgagcctgaggactttgccttcccctccacggccccaagcccccaggctggcctcaggggggctctgcgccaagaggcctggtgtgcgctggccttggcctaggtccccaggccagcccatgtcaggggaacagcctggaacagaccacccactgagtcacctccgtgcctgctttgctccagcacagcagagaccagcaggccccccaacccagagactgggtctgctggagtctccacacagtggtggggaggccttctggacagacggcagtcgggccccagagcaagaaggctggtgagggaagggctcagcttcccaccccacgtacagcaagggactccccaggtgcggcccaaggctccggaccacactggccccctgcggcggaggccaacgcagggcaccaccaccaccaacttgaattccgtcatcaatgctcaccgtcaatatgtttacaagttgtagcagttgggggaaaacagtcaacctcccagtgtaaaaccaagattcccagtgaagcacctgaggccaagcaggggagaggaatgaggggagcagctggacatgggcctcctgaggcctcggggctgtccttcattgcccacatggatagacggagctgtggtgcagagaacttttcccgcaacaggtgcaggactgccagggatcggagtgcgggccgcgcacggtgccaggattccgccgaggggaagccgctcacattgcagtcatcacagacttacgcacttgtttggacagtttttccagaggggatgggaaagggccttgttctagctgaatctgtgtatcatgaccatttctgacaggcagaatgaattgtctggtagccctgtcctgacccatccaagcgctgttggggctggtggtgacgtggtcacatgtcctggcatatctggggccacgcagtttagtctcttgtcccaggagaattgttagtgacccctctttctcttgcaagccccctccacactgggttggatgataccttaatgagtgacgctggcgagaggcaccctacccgacgcagctgtgaatggccggtgatgtatgtcaggaggccacagggagcagaggagcggggcaggcagccacagggccctgcggggagcacatcctcgcctccgtccggctgctgcccttcaacaacaagccctgatttttccagcaatgccagaaacctggattttaagtcttccaatttgattcaaaaatatttttaacattgtgagccagctagacccccagtgcaccaccccatattgaaaaacagttgtctggcatcagcttcaggagcgggtccggtcattctgaaactgtccctccagaggttcttccagccccacttctatgcgatgtcatcttttctaaaagagacaaatgaagccacagggaaagtgaaataaagccttgaacctca

SEQ ID NO: 11960 - DNA, 2533 bp, Homo sapiens
  source 1..2533: mol_type = unassigned DNA
atgtaccagagcctggcgctggccgcgagcccccgccaggccgcctacgccgactcgggctccttcctgcacgctccgggcgccggctctccgatgtttgtgccgccggcgcgcgtcccctcgatgctgtcctacctgtccgggtgtgagccgagcccgcagccccccgagctcgctgcgcgccccggctgggcgcagacagccaccgcggattcgtcggccttcggcccgggcagtccgcaccccccagccgcgcacccgcccggggccaccgccttccctttcgcgcacagcccctcggggcccggcagcggcggcagcgcggggggccgagacggcagtgcctaccagggcgcgctgttgcctcgagaacagttcgcggccccgcttgggcggccggtggggacctcgtactccgccacctacccggcctacgtgagccccgacgtggcccagtcctggactgccgggcccttcgatggcagcgtcctgcacggcctcccaggccgcaggcccaccttcgtgtccgacttcttggaggagttcccgggtgagggtcgtgagtgtgtcaactgcggggccctgtccacaccgctgtggcgccgagacggcaccggccactacctgtgcaatgcctgcggcctctaccacaagatgaatggcgtcaaccggccgctcgttcggcctcagaagcgcctgtcctcgtcccgccgcgccggcctctgctgcaccaactgccacacgaccaacaccacgctgtggcggcggaactcggagggggagcccgtgtgcaatgcctgcggcctctacatgaagctgcacggggtgccgcggcctctggctatgaagaaggaaagcatccagacacggaagcggaagccaaagaccatcgccaaggccaggggctcctcaggatccacaaggaatgcctcggcctccccatctgctgtcgccagcactgacagctcagcagccacttcgaaagccaagcccagcctggcgtccccagtgtgccctgggcccagcatggccccccaggcctctggccaggaggatgactctcttgcccccggccacttggagttcaagttcgagcctgaggactttgccttcccctccacggccccaagcccccaggctggcctcaggggggctctgcgccaagaggcctggtgtgcgctggccttggcctaggtccccaggccagcccatgtcaggggaacagcctggaacagaccacccactgagtcacctccgtgcctgctttgctccagcacagcagagaccagcaggccccccaacccagagactgggtctgctggagtctccacacagtggtggggaggccttctggacagacggcagtcgggccccagagcaagaaggctggtgagggaagggctcagcttcccaccccacgtacagcaagggactccccaggtgcggcccaaggctccggaccacactggccccctgcggcggaggccaacgcagggcaccaccaccaccaacttgaattccgtcatcaatgctcaccgtcaatatgtttacaagttgtagcagttgggggaaaacagtcaacctcccagtgtaaaaccaagattcccagtgaagcacctgaggccaagcaggggagaggaatgaggggagcagctggacatgggcctcctgaggcctcggggctgtccttcattgcccacatggatagacggagctgtggtgcagagaacttttcccgcaacaggtgcaggactgccagggatcggagtgcgggccgcgcacggtgccaggattccgccgaggggaagccgctcacattgcagtcatcacagacttacgcacttgtttggacagtttttccagaggggatgggaaagggccttgttctagctgaatctgtgtatcatgaccatttctgacaggcagaatgaattgtctggtagccctgtcctgacccatccaagcgctgttggggctggtggtgacgtggtcacatgtcctggcatatctggggccacgcagtttagtctcttgtcccaggagaattgttagtgacccctctttctcttgcaagccccctccacactgggttggatgataccttaatgagtgacgctggcgagaggcaccctacccgacgcagctgtgaatggccggtgatgtatgtcaggaggccacagggagcagaggagcggggcaggcagccacagggccctgcggggagcacatcctcgcctccgtccggctgctgcccttcaacaacaagccctgatttttccagcaatgccagaaacctggattttaagtcttccaatttgattcaaaaatatttttaacattgtgagccagctagacccccagtgcaccaccccatattgaaaaacagttgtctggcatcagcttcaggagcgggtccggtcattctgaaactgtccctccagaggttcttccagccccacttctatgcgatgtcatcttttctaaaagagacaaatgaagccacagggaaagtgaaataaagccttgaacctca

SEQ ID NO: 11961 - DNA, 2595 bp, Homo sapiens; identical to SEQ ID NO: 11959
  source 1..2595: mol_type = unassigned DNA

SEQ ID NO: 11962 - DNA, 3770 bp, Homo sapiens
  source 1..3770: mol_type = unassigned DNA
gacccacagcctggcacccttcggcgagcgctgtttgtttagggctcggtgagtccaatcaggagcccaggctgcagttttccggcagagcagtaagaggcgcctcctctctcctttttattcaccagcagcgcggcgcagaccccggactcgcgctcgcccgctggcgccctcggcttctctccgcgcctgggagcaccctccgccgcggccgttctccatgcgcagcgcccgcccgaggagctagacgtcagcttggagcggcgccggaccgtggatggccttgactgacggcggctggtgcttgccgaagcgcttcggggccgcgggtgcggacgccagcgactccagagcctttccagcgcgggagccctccacgccgccttcccccatctcttcctcgtcctcctcctgctcccggggcggagagcggggccccggcggcgccagcaactgcgggacgcctcagctcgacacggaggcggcggccggacccccggcccgctcgctgctgctcagttcctacgcttcgcatcccttcggggctccccacggaccttcggcgcctggggtcgcgggccccgggggcaacctgtcgagctgggaggacttgctgctgttcactgacctcgaccaagccgcgaccgccagcaagctgctgtggtccagccgcggcgccaagctgagccccttcgcacccgagcagccggaggagatgtaccagaccctcgccgctctctccagccagggtccggccgcctacgacggcgcgcccggcggcttcgtgcactctgcggccgcggcggcagcagccgcggcggcggccagctccccggtctacgtgcccaccacccgcgtgggttccatgctgcccggcctaccgtaccacctgcaggggtcgggcagtgggccagccaaccacgcgggcggcgcgggcgcgcaccccggctggcctcaggcctcggccgacagccctccatacggcagcggaggcggcgcggctggcggcggggccgcggggcctggcggcgctggctcagccgcggcgcacgtctcggcgcgcttcccctactctcccagcccgcccatggccaacggcgccgcgcgggagccgggaggctacgcggcggcgggcagtgggggcgcgggaggcgtgagcggcggcggcagtagcctggcggccatgggcggccgcgagccccagtacagctcgctgtcggccgcgcggccgctgaacgggacgtaccaccaccaccaccaccaccaccaccaccatccgagcccctactcgccctacgtgggggcgccactgacgcctgcctggcccgccggacccttcgagaccccggtgctgcacagcctgcagagccgcgccggagccccgctcccggtgccccggggtcccagtgcagacctgctggaggacctgtccgagagccgcgagtgcgtgaactgcggctccatccagacgccgctgtggcggcgggacggcaccggccactacctgtgcaacgcctgcgggctctacagcaagatgaacggcctcagccggcccctcatcaagccgcagaagcgcgtgccttcatcacggcggcttggattgtcctgtgccaactgtcacaccacaactaccaccttatggcgcagaaacgccgagggtgaacccgtgtgcaatgcttgtggactctacatgaaactccatggggtgcccagaccacttgctatgaaaaaagagggaattcaaaccaggaaacgaaaacctaagaacataaataaatcaaagacttgctctggtaatagcaataattccattcccatgactccaacttccacctcttctaactcagatgattgcagcaaaaatacttcccccacaacacaacctacagcctcaggggcgggtgccccggtgatgactggtgcgggagagagcaccaatcccgagaacagcgagctcaagtattcgggtcaagatgggctctacataggcgtcagtctcgcctcgccggccgaagtcacgtcctccgtgcgaccggattcctggtgcgccctggccctggcctgagcccacgccgccaggaggcagggagggctccgccgcgggcctcactccactcgtgtctgcttttgtgcagcggtccagacagtggcgactgcgctgacagaacgtgattctcgtgcctttattttgaaagagatgtttttcccaagaggcttgctgaaagagtgagagaagatggaagggaagggccagtgcaactgggcgcttgggccactccagccagcccgcctccggggcggaccctgctccacttccagaagccaggactaggacctgggccttgcctgctatggaatattgagagagattttttaaaaaagattttgcattttgtccaaaatcatgtgcttcttctgatcaattttggttgttccagaatttcttcataccttttccacatccagatttcatgtgcgttcatggagaagatcacttgaggccatttggtacacatctctggaggctgagtcggttcatgaggtctcttatcaaaaatattactcagtttgcaagactgcattgtaactttaacatacactgtgactgacgtttctcaaagttcatattgtgtggctgatctgaagtcagtcggaatttgtaaacagggtagcaaacaagatatttttcttccatgtatacaataatttttttaaaaagtgcaatttgcgttgcagcaatcagtgttaaatcatttgcataagatttaacagcattttttataatgaatgtaaacattttaacttaatggtacttaaaataatttaaaagaaaaatgttaacttagacattcttatgcttcttttacaactacatcccattttatatttccaattgttaaagaaaaatatttcaagaacaaatcttctctcaggaaaattgcctttctctatttgttaagaatttttatacaagaacaccaatataccccctttattttactgtggaatatgtgctggaaaaattgcaacaacactttactacctaacggatagcatttgtaaatactctaggtatctgtaaacactctgatgaagtctgtatagtgtgactaacccacaggcaggttggtttacattaatttttttttttgaatgggatgtcctatggaaacctatttcaccagagttttaaaaataaaaagggtattgttttgtcttctgtacagtgagttccttcccttttcaaagctttctttttatgctgtatgtgactatagatattcatataaaacaagtgcacgtgaagtttgcaaaatgctttaaggccttcctttcaaagcatagtccttttggagccgttttgtaccttttataccttggcttatttgaagttgacacatggggttagttactactctccatgtgcattggggacagtttttataagtgggaaggactcagtattattatatttgagatgataagcattttgtttgggaacaatgcttaaaaatattccagaaagttcagattttttttctttgtgaatgaaatatattctggcccacgaacagggcgatttcctttcagttttttccttttgcaacgtgccttgaagtctcaaagctcacctgaggttgcagacgttacccccaacagaagataggtagaaatgattccagtggcctctttgtattttcttcattgttgagtagatttcaggaaatcaggaggtgtttcacaatacagaatgatggcctttaactgtg

SEQ ID NO: 11963 - DNA, 8675 bp, Homo sapiens
  source 1..8675: mol_type = unassigned DNA
cagccccggcaggatggcggcggacacgcaggtttccgagacactaaagcgttttgcagggaaggtgacaacagccagtgtaaaggaacggagagaaatcctcagtgaacttgggaagtgtgttgctggaaaagatcttccagagggagcagtgaaggggctctgcaaattgttctgcttgactctgcatcgatatagagatgcagcctcccgcagggccttgcaggcagccatccagcagttggctgaggcccagccagaagccactgctaagaaccttctacactctctgcagtcttctggtataggctccaaagcaggtgttcccagtaagagcagtggctctgccgccttgctggccttgacctggacctgcctcctggtgcgcattgtctttccatcgagagccaagcgacaaggagacatctggaacaaactggtggaagtgcagtgcctgctcttgctggaggtgctgggtggctcccacaagcacgccgtggatggtgctgtgaagaaactcacgaagctgtggaaagagaaccccgggctggtggaacagtacttgtcagccattctcagcctagagcccaaccagaactatgctggcatgctggggctgctggtgcagttctgcacgagtcacaaggagatggacgtggtcagtcagcacaagagcgccctactggacttttacatgaagaacatcctgatgagcaaagtcaagcctccgaagtacctgttggatagctgtgcccctctgctccgatacctgtcccactcagaatttaaggatctgatactgcccaccatacagaagtccttactgaggagtccagagaatgttattgaaactatttctagtctgctggcatcagtgacgcttgacctcagccagtatgccatggacatcgtgaaaggactggctggtcacctgaaatccaacagtccccgcctgatggatgaagctgtgctggcactgcggaacctggcacgccagtgcagtgactcttcggccatggaatccctgaccaagcacctatttgctatcctcggaggctcggaaggaaaactaactgttgtagcccagaagatgagcgtcctctcagggattgggagcgtcagtcatcacgtggtgtctggaccttccagtcaggtcctgaatgggatcgtggctgagctgttcatcccgttccttcagcaggaagttcatgaagggaccttggtacacgctgtctcagtcctggctctctggtgtaaccgattcactatggaagtgcccaagaagctcactgaatggttcaaaaaagctttcagccttaaaacctccacatctgcggtgaggcatgcctacctgcagtgcatgttggcctcttaccggggtgacacgctgttgcaggccctggacttactgcccttgctcatccagacagtggagaaggcagcctcccaaagcactcaggttcccaccatcactgaaggggttgccgcagccttgttgctcttaaagttgtcagtggctgactcacaggctgaggccaaactgagcagtttctggcagttgattgtggatgagaaaaagcaggttttcacttctgagaaattcctggtcatggcttcagaggatgccctgtgtactgtgttgcatctgacagagagacttttccttgaccacccgcatagactcactggcaacaaagttcagcagtaccaccgggctctggtggcggtgctcctgagccgcacctggcacgtccgcaggcaggctcagcagacagttcggaagctgctgtcctctcttgggggctttaagctggcgcacggactcttggaggagctgaagactgtcctcagttctcacaaggtgctgcccttagaggctttggtgactgatgctggagaggtgactgaggcaggcaaggcctacgtgcctccacgggtcctgcaggaggctctgtgtgtcatctccggtgtgccagggctcaagggtgatgtcaccgacactgaacaactggcccaggaaatgctgatcatctcccaccacccatccttagttgccgtgcagtctggactttggccagcacttcttgccaggatgaagatcgatcctgaagcctttatcaccaggcacctggatcagatcattcccaggatgaccacacagagtcccctaaaccagtcctccatgaatgccatgggctccctttccgtcctgtcgccggaccgggtcctcccacagctcatcagcaccatcactgcctccgtgcagaaccctgcactgcgcctggtgacgcgggaggagtttgccattatgcagacccctgctggggagctgtatgacaaatccatcattcagagtgcccagcaggacagcataaaaaaggccaacatgaagcgagagaacaaagcttattccttcaaagagcagatcatcgagctggagctgaaggaggagataaagaagaagaaaggcatcaaagaggaggtgcagctgaccagcaagcagaaggagatgctgcaggcccagctagacagggaggcgcaggtccggaggcggctgcaggagctggatggggagctggaggcggcgcttggactgctggacatcatcctggccaagaacccgtccggcctgacccagtacatccctgttttggtcgactcttttctgcccttgctgaagtctcccctggctgctcccaggatcaagaaccccttcttgtccttggctgcctgtgtcatgccctctaggctcaaggctttgggcactttggtgagccacgtgaccctgcgcctgctgaagccagagtgtgtcctggataagtcctggtgccaggaagagctgtcggtggctgtgaagagggcggtgatgctgctgcacacccacaccatcaccagcagggtgggcaagggggagccaggtgctgcgcccttgtccgcgccagccttctccttagtcttcccgtttctgaagatggtgctgacggagatgccccaccacagtgaggaggaggaggagtggatggcccagattcttcagatcctcactgtccaagcccagctgagggcctcccccaacaccccacccgggcgggtggacgagaatggcccggagttgctgcctcgcgtggccatgctgcgtcttctgacttgggtgatcgggacgggctcgcctcgcttacaggttctggcttcagacaccctgaccaccctgtgtgccagcagcagtggtgatgatggctgtgcctttgcagagcaggaggaggtggacgtgctgctctgtgccttgcagtccccgtgtgccagcgtgcgggaaaccgtgctccgggggctgatggaactccacatggtattgccagcacctgatactgatgagaagaatggcctgaaccttctgcggagactctgggtggtcaagtttgacaaggaggaggagatccggaagctggctgagaggctctggtcaatgatgggcctagacctgcagccagacctctgctccttgctgattgacgacgtgatctatcatgaggcggctgtaaggcaggcaggggccgaagccctctcccaagcagtggcacgttaccagcggcaggcggcggaggttatgggcaggctcatggagatttaccaggaaaagctctaccggccgcccccagtgctggatgctttgggacgagttatttcagaatctcctccagatcagtgggaagccaggtgtggcttggcgttggccctcaacaagctctcccagtatttggacagctctcaggtgaagccactctttcagttttttgtccctgatgccctcaatgaccgacacccagatgtccggaagtgcatgttggatgcagccctcgcaacgctcaacactcatgggaaggagaacgtcaactcgctgttgccagtattcgaggagttcctgaagaacgcgcccaatgatgccagctatgatgctgtgcgacagagtgtggtggtcctgatgggctctctggccaagcacctggacaagagtgaccccaaagtgaagcccattgttgccaagctcatcgctgccctctccaccccctcccagcaggtccaggagtccgtagccagctgcttgccaccccttgtgccagccatcaaggaggatgctggagggatgatccagaggcttatgcagcagctgctggagtcagacaagtacgcagagcgcaaaggggccgcctatggcctggcgggcctggtgaagggcctgggcatcctctcgctgaagcaacaggagatgatggcggcactgactgatgccatccaagataagaagaacttccgccggcgagagggagccctctttgccttcgagatgctctgcaccatgctggggaaactttttgagccgtatgtggttcacgtgctgccccatctgctcctgtgctttggggatggaaaccagtatgtgcgtgaggctgcagatgactgtgccaaggctgtgatgagcaacttgagtgctcacggggtgaagctggtgctcccctccttactggctgccctggaggaggaatcgtggcggaccaaagctgggtcagtggagcttcttggggcaatggcgtactgtgctcctaagcagctgtcatcctgtctacccaacattgtgcccaagcttacggaggtgctgaccgactcccatgtcaaagtccagaaggctggacagcaggcgctcaggcagatcggctccgttatcaggaacccggagatcctggccattgctccagtcctcctggatgccctgacggatccctccaggaagacccagaagtgcttgcagaccctgctggacaccaagtttgtccacttcattgatgccccatccctggccctcatcatgcccattgtccagagagccttccaggaccgttccacggacacgcggaagatggcagcccagattattggcaacatgtactccctgacagaccagaaggacttggctccgtacctgcccagcgtgacgcctggcctgaaagcatcgcttttggaccctgtgcctgaggtgcggaccgtatctgcaaaggcccttggggccatggtgaagggcatgggggagtcgtgctttgaggacttgctgccgtggctgatggagacactgacctatgagcagagctctgtggatcgctcaggcgctgcacaggggttggctgaggtcatggccggtttgggggtggagaagttggagaagttgatgccagaaatcgtggctacagccagcaaagtggacattgcaccccatgtccgagatggctacattatgatgtttaactacctgcccatcacctttggagacaagtttactccttatgtggggcccatcatcccctgtatcctcaaagctcttgctgatgagaatgagtttgtgcgtgacaccgccctgcgcgcgggccagcgggttatctccatgtacgctgagacagccatcgccctgctgctgccccagctagagcaaggcctctttgatgacctttggagaatcaggttcagctctgttcagctccttggggatctcctgtttcacatctcaggagtcactgggaagatgaccacagaaactgcctctgaggatgataactttggaactgcccagtccaacaaggcgatcatcactgccctgggggtagagcggcggaaccgggtgttggcagggctgtacatgggccgctcagacacccagctggtggtgcggcaggcgtccctgcatgtctggaagattgttgtctccaataccccccgcaccttgcgtgagatcctacccactctctttgggctcctgctgggtttcctggccagcacgtgtgcagataagagaacgattgcagcgagaacattgggagatcttgtgcggaagttaggggagaaaatcctccccgagatcatccccatccttgaggaaggcctgaggtctcagaagagcgatgagaggcagggtgtgtgcattggcctaagtgagatcatgaagtccaccagccgggatgccgtgctgtatttctctgaatccctcgtgcccacggcaaggaaggctttgtgtgacccactggaggaggtcagagaggcggcagccaagactttcgagcagctgcattccaccatcggccaccaggctctggaggacattctcccatttttactaaagcagctggatgacgaggaggtgtcagagtttgccttggatggtctgaagcaagtcatggctattaagagtcgtgtggtgctgccctaccttgtgcccaagctgacaacgccacctgtcaacacccgggtgctggctttcctttcgtcagtggctggtgatgccctcacccgtcatcttggcgtgatcctcccagcggtcatgctggccctgaaggaaaagcttgggaccccagatgagcagctggagatggccaattgtcaggctgtgatcctctccgtagaggatgacacagggcaccggatcatcatcgagtatctgctggaggccacccgcagccctgaggtgggcatgaggcaagctgctgccatcatcctcaacatctactgttcccgctcaaaggctgactacaccagccacctgcggagcctggtctcgggcctgatccgcctcttcaatgactccagccctgtggttctggaggagagctgggatgccctaaatgccatcactaagaagctggatgctggcaaccagttggcactcattgaagagctgcacaaggaaatccggctcatagggaacgagagcaaaggcgagcatgtgccaggattctgcctcccgaagaagggagtgacctccatccttccagtgttgcgggaaggagtcctgactggcagccctgagcagaaggaggaggcagccaaagccttaggcttggtaatccgcctgacctcggctgacgccctgaggccctccgtggtcagcatcactggccctctgatccgcatcctgggggacaggttcagctggaatgtgaaggcggctctgctcgagacactcagcctcttgttggctaaggttgggattgccctgaagcccttcctgccccagctgcagaccactttcaccaaagccctgcaggactccaaccggggggtgcgcctgaaggccgcagatgctctggggaagctcatttccatccacattaaggtggaccccctcttcacagagctgctcaatggcatccgcgccatggaggacccaggtgtcagggacaccatgctgcaggccctgaggtttgtgattcagggagcaggggccaaagtggatgccgtcatccggaaaaacatcgtctcactcctgctgagcatgctgggacacgatgaggacaacactcgcatctcctcagccgggtgcctaggggaactgtgtgcctttttgactgaagaggagcttagtgccgttctacagcagtgcttgctggcggacgtgtccggcattgactggatggttcggcacgggcggagcctggcactttccgtggctgtgaatgtggctcctggcagactttgtgccggcagatatagcagtgatgttcaggaaatgatcctgagcagtgccacggcggacaggatccccattgcggtgagcggggtccggggcatgggctttctcatgagacaccacatcgagacaggcggagggcagttgccggccaaactttccagcctgttcgttaagtgtctgcagaacccatccagcgacatcaggctggtggctgagaagatgatctggtgggcaaataaggacccactgcctcccctggacccccaggccatcaagcccatcctgaaggctcttcttgacaacaccaaggataagaacaccgtggtcagggcctacagcgaccaggcaattgtcaacctcctcaagatgcggcagggtgaagaggtgtttcagtccctctccaagatcctggatgtggccagtttggaggtgctgaacgaggttaaccgaaggtccctgaagaagctggccagccaggccgactccacggagcaggtggacgacaccatcctgacatgagaggcctgggccagcagcagcattgccgctccacatctttgctcaatgttttcatttttgaaaatacatttgttccaatggggagcttggaagatggcgttcccagaaagtattttaatatcaatagaccacagccaaagccttaaatcaaacccacacacaactgaaaattgcctcctccatctctcaccttttcctgtggagaagagaaggaaaagcacacgcatgcgcctcagcaaatggcagcccaggagctgtttgtccagtttagcatggctaggtctggaactataatagcagggtcagactgtgggttcctcttctcctgtgcttgagctctggtttgagagctggcgctaccaacctttttcctatatcccgagtggggcacagacggtggatctctgcccagtgtggtgtgtctggcttggcttttcaatattgtgaggtctgaatggatctgacccctgtcagatgaaaatgattcacagctctggcagttcccaagtctggggaggggtataggtttgaaaggctgtttgaaagaggaatgtttaataaaggctttgatttaatcttgatataaacagatttttaaaaatctccacccattaaacatgaagcttcctgcatcaggaataaggaa

SEQ ID NO: 11964 - DNA, 1786 bp, Homo sapiens
  source 1..1786: mol_type = unassigned DNA
ctggacctaaatggcgcagcatgactttgctccagcctggcttaatttccctactccaccatcatcaacaaaggtcctgaccagcagtttgaaatcgtcattgaattttgagaagcattctgaaaactttgcatggacagagaatcgttatgatgtgaaccgtcgacgacacaactcttcagatggctttgattctgctattgggcgtcctaatggaggtaactttggaaggaaagaaaaaaatggatggcgtacacatggaagaaatggtacagaaaacataaatcatcgaggtggataccatggtggaagttcccgttctcgtagcagtattttccatgcaggaaaaagccaaggactacatgaaaacaacatacctgacaatgaaaccgggaggaaagaagacaagagagaacgcaaacagtttgaagctgaggattttccgtctttaaatcctgagtatgagagagaaccaaatcacaataagtctttagctgcaggtgtgtgggaatatcctccgaatcctaaatctagagctccaaggatgctggtcattaagaaaggtaatacaaaagacttacagctatctggattcccagtagtaggaaatcttccgtcacagccagttaagaatggaactggtccaagtgtttataaaggtttagtccctaaacctgctgctccacctacaaaacctacacaatggaaaagccaaacaaaagaaaataaagttggaacttctttccctcatgagtccacatttggcgttggcaactttaatgcttttaaatcaactgccaagaactttagtccatctacaaattcagtgaaagagtgtaatcgctcaaattcctcttctcctgttgacaaacttaatcagcagcctcgtctaaccaaactgacacgaatgcgcactgataagaagagtgaatttttgaaagcattgaaaagagacagagtagaagaggaacatgaagatgaaagccgtgctggctcagagaaggatgacgactcatttaatttacataacagcaatagtactcaccaagaaagggatataaaccgaaacttcgatgaaaatgaaattcctcaagagaatggcaatgcctcagtgatttcccagcagatcattcggtcttcaaccttcccacaaactgatgttctttcaagttcacttgaggcagaacacagattgttaaaggaaatgggctggcaggaagacagtgaaaatgatgaaacatgtgctcccttaactgaggatgaaatgagagaattccaagttattagtgaacagttacagaagaatggtctgagaaaaaatggtattttgaaaaatggcttgatctgtgacttcaagtttggaccgtggaagaacagcactttcaaacccacaactgagaatgatgacacagagacaagtagcagtgatacatcagatgacgacgatgtgtgaaggatttcctaacagctttagaaatcttagtgtgatacatctctcatacagtttggggtgaattgtaaaaatgaagaactataatttatgtagtgaaataccccattagaagaggattttttgggggacttcaatatgaagaaaaccaagaatgttttgttgggctgtgttgaacattatttctttgtaaatgaatgttgtaggaatgaggacttgggttggtccaacattgactttcttcatcactgcaacatttctctgactagcaatgtgacgatgtaacaaatgagattttctcatttaataataaaaaattgtgtaatgttttgcaaa

SEQ ID NO: 11965 - DNA, 3136 bp, Homo sapiens
  source 1..3136: mol_type = unassigned DNA
cacactctttctccctccttctcctcgccccgccttccctccctcctcaatccctctagttccttccccgcctcgccactgtgcacgatctcgcgagacttggcccagaacattgcggatcgggtcggcgccattttgggactgagactggttgtgggggagggaaaagcggcaaaaggggattattcaaagtaccgaaaaccttctcccgggatcaggcgcggcggcacccccaggccaggggcacctctggtggggcagaaggtgattgaattactcagatatgaagatcatcatctaggttttgtgtaaaaggccctggatattttaagtggccattttggatttacagtgtttttggataattttgccccagaagtttattaaaattggcaagaatcgtctgtgaagtgaattgatagtagtgaacaattcagcaagctacttaaaaagagacccaggcagcatttcttcagtattttggttcaaacggattatataactggttacagtatttcagctggtggtaatttttgcctccccttcccccaccccgttgttggggttcttcagccgaaactgagagacgttgatttgtgtactgagtagtttcagcagtttcaaatgactgagtattgctgaagtttcatggcagtttatttttacctttattgaaagttttaggaatttttgacttcagctctttcatgtcacaatgggacactttttctgaatgaagagattgaaagaatacagagtttttttccttttatcttttatttacgtggaaatttaagatgttgcagttttccggcagcatggtagtattgagatagctatgtgtgtctctgtatatgctgatgtttaggaatgctcttcagatgtgaaattttctttttgtttttgctttttggctcgtaaattggatatttcatctggagtggacaagtacaacagtggcaagtacatggaataataaagaagactttgatcttaaatctaaagaacttggctaattcgggagatagccatatgaaaactttaaaacagaagtatgggtagctgacttgaagtaactctatgtcaaatagtcgtaggttaagtatcttcaaagaacttcgatattatttcagaggatacaaaataaaaatacaaactggaaaataaagattacagagaaaaaaccaacaccttcctgtgcagtcctgttggaatttggacttgccatgaggtgttgaagccttgtttcactgagttggagagactggacctaaatggcgcagcatgactttgctccagcctggcttaatttccctactccaccatcatcaacaaagtcgtcattgaattttgagaagcattctgaaaactttgcatggacagagaatcgttatgatgtgaaccgtcgacgacacaactcttcagatggctttgattctgctattgggcgtcctaatggaggtaactttggaaggaaagaaaaaaatggatggcgtacacatggaagaaatggtacagaaaacataaatcatcgaggtggataccatggtggaagttcccgttctcgtagcagtattttccatgcaggaaaaagccaaggactacatgaaaacaacatacctgacaatgaaaccgggaggaaagaagacaagagagaacgcaaacagtttgaagctgaggattttccgtctttaaatcctgagtatgagagagaaccaaatcacaataagtctttagctgcaggtgtgtggggcctacacgcccagacacacacatacccaaccaaaaaaatctcccaagctcctctcttagaatatcctccgaatcctaaatctagagctccaaggatgctggtcattaagaaaggtaatacaaaagacttacagctatctggattcccagtagtaggaaatcttccgtcacagccagttaagaatggaactggtccaagtgtttataaaggtttagtccctaaacctgctgctccacctacaaaacctacacaatggaaaagccaaacaaaagaaaataaagttggaacttctttccctcatgagtccacatttggcgttggcaactttaatgcttttaaatcaactgccaagaactttagtccatctacaaattcagtgaaagagtgtaatcgctcaaattcctcttctcctgttgacaaacttaatcagcagcctcgtctaaccaaactgacacgaatgcgcactgataagaagagtgaatttttgaaagcattgaaaagagacagagtagaagaggaacatgaagatgaaagccgtgctggctcagagaaggatgacgactcatttaatttacataacagcaatagtactcaccaagaaagggatataaaccgaaacttcgatgaaaatgaaattcctcaagagaatggcaatgcctcagtgatttcccagcagatcattcggtcttcaaccttcccacaaactgatgttctttcaagttcacttgaggcagaacacagattgttaaaggaaatgggctggcaggaagacagtgaaaatgatgaaacatgtgctcccttaactgaggatgaaatgagagaattccaagttattagtgaacagttacagaagaatggtctgagaaaaaatggtattttgaaaaatggcttgatctgtgacttcaagtttggaccgtggaagaacagcactttcaaacccacaactgagaatgatgacacagagacaagtagcagtgatacatcagatgacgacgatgtgtgaaggatttcctaacagctttagaaatcttagtgtgatacatctctcatacagtttggggtgaattgtaaaaatgaagaactataatttatgtagtgaaataccccattagaagaggattttttgggggacttcaatatgaagaaaaccaagaatgttttgttgggctgtgttgaacattatttctttgtaaatgaatgttgtaggaatgaggacttgggttggtccaacattgactttcttcatcactgcaacatttctctgactagcaatgtgacgatgtaacaaatgagattttctcatttaataataaaaaattgtgtaatgttttgcaaagcttctgtcttaaaatgtccaggtcttaagaaaaaaggcagcttaca

SEQ ID NO: 11966 - DNA, 4418 bp, Homo sapiens
  source 1..4418: mol_type = unassigned DNA
gtgattgaattactcagatatgaagatcatcatctaggttttgtgtaaaaggccctggatattttaagtggccattttggatttacagtgtttttggataattttgccccagaagtttattaaaattggcaagaatcgtctgtgaagtgaattgatagtagtgaacaattcagcaagctacttaaaaagagacccaggcagcatttcttcagtattttggttcaaacggattatataactggttacagtatttcagctggtggtaatttttgcctccccttcccccaccccgttgttggggttcttcagccgaaactgagagacgttgatttgtgtactgagtagtttcagcagtttcaaatgactgagtattgctgaagtttcatggcagtttatttttacctttattgaaagttttaggaatttttgacttcagctctttcatgtcacaatgggacactttttctgaatgaagagattgaaagaatacagagtttttttccttttatcttttatttacgtggaaatttaagatgttgcagttttccggcagcatggtagtattgagatagctatgtgtgtctctgtatatgctgatgtttaggaatgctcttcagatgtgaaattttctttttgtttttgctttttggctcgtaaattggatatttcatctggagtggacaagtacaacagtggcaagtacatggaataataaagaagactttgatcttaaatctaaagaacttggctaattcgggagatagccatatgaaaactttaaaacagaagtatgggtagctgacttgaagtaactctatgtcaaatagtcgtaggttaagtatcttcaaagaacttcgatattatttcagaggatacaaaataaaaatacaaactggaaaataaagattacagagaaaaaaccaacaccttcctgtgcagtcctgttggaatttggacttgccatgaggtgttgaagccttgtttcactgagttggagagactggacctaaatggcgcagcatgactttgctccagcctggcttaatttccctactccaccatcatcaacaaagtcgtcattgaattttgagaagcattctgaaaactttgcatggacagagaatcgttatgatgtgaaccgtcgacgacacaactcttcagatggctttgattctgctattgggcgtcctaatggaggtaactttggaaggaaagaaaaaaatggatggcgtacacatggaagaaatggtacagaaaacataaatcatcgaggtggataccatggtggaagttcccgttctcgtagcagtattttccatgcaggaaaaagccaaggactacatgaaaacaacatacctgacaatgaaaccgggaggaaagaagacaagagagaacgcaaacagtttgaagctgaggattttccgtctttaaatcctgagtatgagagagaaccaaatcacaataagtctttagctgcaggtgtgtggggcctacacgcccagacacacacatacccaaccaaaaaaatctcccaagctcctctcttagaatatcctccgaatcctaaatctagagctccaaggatgctggtcattaagaaaggtaatacaaaagacttacagctatctggattcccagtagtaggaaatcttccgtcacagccagttaagaatggaactggtccaagtgtttataaaggtttagtccctaaacctgctgctccacctacaaaacctacacaatggaaaagccaaacaaaagaaaataaagttggaacttctttccctcatgagtccacatttggcgttggcaactttaatgcttttaaatcaactgccaagaactttagtccatctacaaattcagtgaaagagtgtaatcgctcaaattcctcttctcctgttgacaaacttaatcagcagcctcgtctaaccaaactgacacgaatgcgcactgataagaagagtgaatttttgaaagcattgaaaagagacagagtagaagaggaacatgaagatgaaagccgtgctggctcagagaaggatgacgactcatttaatttacataacagcaatagtactcaccaagaaagggatataaaccgaaacttcgatgaaaatgaaattcctcaagagaatggcaatgcctcagtgatttcccagcagatcattcggtcttcaaccttcccacaaactgatgttctttcaagttcacttgaggcagaacacagattgttaaaggaaatgggctggcaggaagacagtgaaaatgatgaaacatgtgctcccttaactgaggatgaaatgagagaattccaagttattagtgaacagttacagaagaatggtctgagaaaaaatggtattttgaaaaatggcttgatctgtgacttcaagtttggaccgtggaagaacagcactttcaaacccacaactgagaatgatgacacagagacaagtagcagtgatacatcagatgacgacgatgtgtgaaggatttcctaacagctttagaaatcttagtgtgatacatctctcatacagtttggggtgaattgtaaaaatgaagaactataatttatgtagtgaaataccccattagaagaggattttttgggggacttcaatatgaagaaaaccaagaatgttttgttgggctgtgttgaacattatttctttgtaaatgaatgttgtaggaatgaggacttgggttggtccaacattgactttcttcatcactgcaacatttctctgactagcaatgtgacgatgtaacaaatgagattttctcatttaataataaaaaattgtgtaatgttttgcaaagcttctgtcttaaaatgtccaggtcttaagaaaaaaggcagcttacactgttttgcttgcagagtcatatctttttcgtacaatggaaatcctcaagtccactttgtgcggtctccctctccttcccccaaaaaacaacaacaacaaaacaaaaaccaaaaaggaaaatgtagcatgttggctaaaactggagcaaagtgcactaaaacaatttcctgaactcacctgttgtactattcaccttttaaaccataaattgctctttagccatttgtagtgcagtaaatgttacaggaaaagacttggcacattttcttccaaattttaagaggtgattttcaaaagctttattggggtatgttgtcagaccagggttttcagagttgatggaaaagagtcttgtgagaaaacttattttgataaattattacacacgcagaaaaactgatcacactgactggatctgtccacgacatggaaaataaactggattttcagaatattgttgttttctgtagtgttcaaggtattgtttctaaacataaacatactctaaacatgctttattcacttgttaaagtcatacttttaaaagtaataccttactaaagatggtgattacttttccgaggtcagaaaaggaaagctaagcgttttcattatcaaatacacaagcttattaaatgaatgactgttaactactttattttcatttgcacattaattttggaattgtttctgttttgctgctgacggaaatactattttggctctgtgtatatttgtattttgatttttctggtttgtttacccccatttgcttttagctcccccttatgtttaaatatattctaacttatgtaaagagcataatcttagagcaaaaatacttgaggttttatgtcagatctaatcttaagtgtttgttgttttttaaaaagtgttttctcagatggctgcagtgtttttgctatttctgcataaataccctacctggactccccagttttcaccagaaactgttatttttttttgttgttgttcccactgagactgatggtgatggggaaattaaaaacaacacactagcacactcccacaaaacttgaggaagagttagaatggtaataaaatattaaatagaccttatacttaaaataaggtttcactatataatttgtcacaattcaatctaatcagctaaagttaaatgtagttagaattagccacaggagaatgtaaagcatgctttgacgaagctatcggtaacacatattgaatgtctttgagactcttagattgtactatttgcttaatagattaatgaaatttatcagatacaacctgtatttccaaaaacaagctagaaggaacctgaggaatgtggtttacatttgagatccaccttactgtgttttctactttcagaaaagattctgtagttttggtttttggcatctttcttatactcagttttttctgccttaattcccatttaccagcagttaactcatgtttattgtgctttcatgcattgtgatatggaatgtgtttagtaatttactccttataaatatggtaaagtacagtggt

SEQ ID NO: 11967 - DNA, 2857 bp, Homo sapiens
  source 1..2857: mol_type = unassigned DNA
cggcaaaaggggattattcaaagtaccgaaaaccttctcccgggatcaggcgcggcggcacccccaggccaggggcacctctggtggggcagaaggtgattgaattactcagatatgaagatcatcatctaggttttgtgtaaaaggccctggatattttaagtggccattttggatttacagtgtttttggataattttgccccagaagtttattaaaattggcaagaatcgtctgtgaagtgaattgatagtagtgaacaattcagcaagctacttaaaaagagacccaggcagcatttcttcagtattttggttcaaacggattatataactggttacagtatttcagctggtggtaatttttgcctccccttcccccaccccgttgttggggttcttcagccgaaactgagagacgttgatttgtgtactgagtagtttcagcagtttcaaatgactgagtattgctgaagtttcatggcagtttatttttacctttattgaaagttttaggaatttttgacttcagctctttcatgtcacaatgggacactttttctgaatgaagagattgaaagaatacagagtttttttccttttatcttttatttacgtggaaatttaagatgttgcagttttccggcagcatggtagtattgagatagctatgtgtgtctctgtatatgctgatgtttaggaatgctcttcagatgtgaaattttctttttgtttttgctttttggctcgtaaattggatatttcatctggagtggacaagtacaacagtggcaagtacatggaataataaagaagactttgatcttaaatctaaagaacttggctaattcgggagatagccatatgaaaactttaaaacagaagtatgggtagctgacttgaagtaactctatgtcaaatagtcgtaggttaagtatcttcaaagaacttcgatattatttcagaggatacaaaataaaaatacaaactggaaaataaagattacagagaaaaaaccaacaccttcctgtgcagtcctgttggaatttggacttgccatgaggtgttgaagccttgtttcactgagttggagagactggacctaaatggcgcagcatgactttgctccagcctggcttaatttccctactccaccatcatcaacaaagtcgtcattgaattttgagaagcattctgaaaactttgcatggacagagaatcgttatgatgtgaaccgtcgacgacacaactcttcagatggctttgattctgctattgggcgtcctaatggaggtaactttggaaggaaagaaaaaaatggatggcgtacacatggaagaaatggtacagaaaacataaatcatcgaggtggataccatggtggaagttcccgttctcgtagcagtattttccatgcaggaaaaagccaaggactacatgaaaacaacatacctgacaatgaaaccgggaggaaagaagacaagagagaacgcaaacagtttgaagctgaggattttccgtctttaaatcctgagtatgagagagaaccaaatcacaataagtctttagctgcaggtgtgtgggaatatcctccgaatcctaaatctagagctccaaggatgctggtcattaagaaaggtaatacaaaagacttacagctatctggattcccagtagtaggaaatcttccgtcacagccagttaagaatggaactggtccaagtgtttataaaggtttagtccctaaacctgctgctccacctacaaaacctacacaatggaaaagccaaacaaaagaaaataaagttggaacttctttccctcatgagtccacatttggcgttggcaactttaatgcttttaaatcaactgccaagaactttagtccatctacaaattcagtgaaagagtgtaatcgctcaaattcctcttctcctgttgacaaacttaatcagcagcctcgtctaaccaaactgacacgaatgcgcactgataagaagagtgaatttttgaaagcattgaaaagagacagagtagaagaggaacatgaagatgaaagccgtgctggctcagagaaggatgacgactcatttaatttacataacagcaatagtactcaccaagaaagggatataaaccgaaacttcgatgaaaatgaaattcctcaagagaatggcaatgcctcagtgatttcccagcagatcattcggtcttcaaccttcccacaaactgatgttctttcaagttcacttgaggcagaacacagattgttaaaggaaatgggctggcaggaagacagtgaaaatgatgaaacatgtgctcccttaactgaggatgaaatgagagaattccaagttattagtgaacagttacagaagaatggtctgagaaaaaatggtattttgaaaaatggcttgatctgtgacttcaagtttggaccgtggaagaacagcactttcaaacccacaactgagaatgatgacacagagacaagtagcagtgatacatcagatgacgacgatgtgtgaaggatttcctaacagctttagaaatcttagtgtgatacatctctcatacagtttggggtgaattgtaaaaatgaagaactataatttatgtagtgaaataccccattagaagaggattttttgggggacttcaatatgaagaaaaccaagaatgttttgttgggctgtgttgaacattatttctttgtaaatgaatgttgtaggaatgaggacttgggttggtccaacattgactttcttcatcactgcaacatttctctgactagcaatgtgacgatgtaacaaatgagattttctcatttaataataaaaaattgtgtaatgttttgc

SEQ ID NO: 11968 - DNA, 2243 bp, Homo sapiens
  source 1..2243: mol_type = unassigned DNA
tttccttttatcttttatttacgtggaaatttaagatgttgcagttttccggcagcatggtagtattgagatagctatgtgtgtctctgtatatgctgatgtttaggaatgctcttcagatgtgaaattttctttttgtttttgctttttggctcgtaaattggatatttcatctggagtggacaagtacaacagtggcaagtacatggaataataaagaagactttgatcttaaatctaaagaacttggctaattcgggagatagccatatgaaaactttaaaacagaagtatgggtagctgacttgaagtaactctatgtcaaatagtcgtaggttaagtatcttcaaagaacttcgatattatttcagaggatacaaaataaaaatacaaactggaaaataaagattacagagaaaaaaccaacaccttcctgtgcagtcctgttggaatttggacttgccatgaggtgttgaagccttgtttcactgagttggagagactggacctaaatggcgcagcatgactttgctccagcctggcttaatttccctactccaccatcatcaacaaaggtcctgaccagcagtttgaaatcgtcattgaattttgagaagcattctgaaaactttgcatggacagagaatcgttatgatgtgaaccgtcgacgacacaactcttcagatggctttgattctgctattgggcgtcctaatggaggtaactttggaaggaaagaaaaaaatggatggcgtacacatggaagaaatggtacagaaaacataaatcatcgaggtggataccatggtggaagttcccgttctcgtagcagtattttccatgcaggaaaaagccaaggactacatgaaaacaacatacctgacaatgaaaccgggaggaaagaagacaagagagaacgcaaacagtttgaagctgaggattttccgtctttaaatcctgagtatgagagagaaccaaatcacaataagtctttagctgcaggtgtgtgggaatatcctccgaatcctaaatctagagctccaaggatgctggtcattaagaaaggtaatacaaaagacttacagctatctggattcccagtagtaggaaatcttccgtcacagccagttaagaatggaactggtccaagtgtttataaaggtttagtccctaaacctgctgctccacctacaaaacctacacaatggaaaagccaaacaaaagaaaataaagttggaacttctttccctcatgagtccacatttggcgttggcaactttaatgcttttaaatcaactgccaagaactttagtccatctacaaattcagtgaaagagcagcctcgtctaaccaaactgacacgaatgcgcactgataagaagagtgaatttttgaaagcattgaaaagagacagagtagaagaggaacatgaagatgaaagccgtgctggctcagagaaggatgacgactcatttaatttacataacagcaatagtactcaccaagaaagggatataaaccgaaacttcgatgaaaatgaaattcctcaagagaatggcaatgcctcagtgatttcccagcagatcattcggtcttcaaccttcccacaaactgatgttctttcaagttcacttgaggcagaacacagattgttaaaggaaatgggctggcaggaagacagtgaaaatgatgaaacatgtgctcccttaactgaggatgaaatgagagaattccaagttattagtgaacagttacagaagaatggtctgagaaaaaatggtattttgaaaaatggcttgatctgtgacttcaagtttggaccgtggaagaacagcactttcaaacccacaactgagaatgatgacacagagacaagtagcagtgatacatcagatgacgacgatgtgtgaaggatttcctaacagctttagaaatcttagtgtgatacatctctcatacagtttggggtgaattgtaaaaatgaagaactataatttatgtagtgaaataccccattagaagaggattttttgggggacttcaatatgaagaaaaccaagaatgttttgttgggctgtgttgaacattatttctttgtaaatgaatgttgtaggaatgaggacttgggttggtccaacattgactttcttcatcactgcaacatttctctgactagcaatgtgacgatgtaacaaatgagattttctcatttaataataaaaaattgtgtaatgttttgcaaa

SEQ ID NO: 11969 - DNA, 3310 bp, Homo sapiens
  source 1..3310: mol_type = unassigned DNA
ggcccagaacattgcggatcgggtcggcgccattttgggactgagactggttgtgggggagggaaaagcggcaaaaggggattattcaaagtaccgaaaaccttctcccgggatcaggcgcggcggcacccccaggccaggggcacctctggtggggcagaaggtgattgaattactcagatatgaagatcatcatctaggttttgtgtaaaaggccctggatattttaagtggccattttggatttacagtgtttttggataattttgccccagaagtttattaaaattggcaagaatcgtctgtgaagtgaattgatagtagtgaacaattcagcaagctacttaaaaagagacccaggcagcatttcttcagtattttggttcaaacggattatataactggttacagtatttcagctggtggtaatttttgcctccccttcccccaccccgttgttggggttcttcagccgaaactgagagacgttgatttgtgtactgagtagtttcagcagtttcaaatgactgagtattgctgaagtttcatggcagtttatttttacctttattgaaagttttaggaatttttgacttcagctctttcatgtcacaatgggacactttttctgaatgaagagattgaaagaatacagagtttttttccttttatcttttatttacgtggaaatttaagatgttgcagttttccggcagcatggtagtattgagatagctatgtgtgtctctgtatatgctgatgtttaggaatgctcttcagatgtgaaattttctttttgtttttgctttttggctcgtaaattggatatttcatctggagtggacaagtacaacagtggcaagtacatggaataataaagaagactttgatcttaaatctaaagaacttggctaattcgggagatagccatatgaaaactttaaaacagaagtatgggtagctgacttgaagtaactctatgtcaaatagtcgtaggttaagtatcttcaaagaacttcgatattatttcagaggatacaaaataaaaatacaaactggaaaataaagattacagagaaaaaaccaacaccttcctgtgcagtcctgttggaattttcgtcattgaattttgagaagcattctgaaaactttgcatggacagagaatcgttatgatgtgaaccgtcgacgacacaactcttcagatggctttgattctgctattgggcgtcctaatggaggtaactttggaaggaaagaaaaaaatggatggcgtacacatggaagaaatggtacagaaaacataaatcatcgaggtggataccatggtggaagttcccgttctcgtagcagtattttccatgcaggaaaaagccaaggactacatgaaaacaacatacctgacaatgaaaccgggaggaaagaagacaagagagaacgcaaacagtttgaagctgaggattttccgtctttaaatcctgagtatgagagagaaccaaatcacaataagtctttagctgcaggtgtgtgggaatatcctccgaatcctaaatctagagctccaaggatgctggtcattaagaaaggtaatacaaaagacttacagctatctggattcccagtagtaggaaatcttccgtcacagccagttaagaatggaactggtccaagtgtttataaaggtttagtccctaaacctgctgctccacctacaaaacctacacaatggaaaagccaaacaaaagaaaataaagttggaacttctttccctcatgagtccacatttggcgttggcaactttaatgcttttaaatcaactgccaagaactttagtccatctacaaattcagtgaaagagtgtaatcgctcaaattcctcttctcctgttgacaaacttaatcagcagcctcgtctaaccaaactgacacgaatgcgcactgataagaagagtgaatttttgaaagcattgaaaagagacagagtagaagaggaacatgaagatgaaagccgtgctggctcagagaaggatgacgactcatttaatttacataacagcaatagtactcaccaagaaagggatataaaccgaaacttcgatgaaaatgaaattcctcaagagaatggcaatgcctcagtgatttcccagcagatcattcggtcttcaaccttcccacaaactgatgttctttcaagttcacttgaggcagaacacagattgttaaaggaaatgggctggcaggaagacagtgaaaatgatgaaacatgtgctcccttaactgaggatgaaatgagagaattccaagttattagtgaacagttacagaagaatggtctgagaaaaaatggtattttgaaaaatggcttgatctgtgacttcaagtttggaccgtggaagaacagcactttcaaacccacaactgagaatgatgacacagagacaagtagcagtgatacatcagatgacgacgatgtgtgaaggatttcctaacagctttagaaatcttagtgtgatacatctctcatacagtttggggtgaattgtaaaaatgaagaactataatttatgtagtgaaataccccattagaagaggattttttgggggacttcaatatgaagaaaaccaagaatgttttgttgggctgtgttgaacattatttctttgtaaatgaatgttgtaggaatgaggacttgggttggtccaacattgactttcttcatcactgcaacatttctctgactagcaatgtgacgatgtaacaaatgagattttctcatttaataataaaaaattgtgtaatgttttgcaaagcttctgtcttaaaatgtccaggtcttaagaaaaaaggcagcttacactgttttgcttgcagagtcatatctttttcgtacaatggaaatcctcaagtccactttgtgcggtctccctctccttcccccaaaaaacaacaacaacaaaacaaaaaccaaaaaggaaaatgtagcatgttggctaaaactggagcaaagtgcactaaaacaatttcctgaactcacctgttgtactattcaccttttaaaccataaattgctctttagccatttgtagtgcagtaaatgttacaggaaaagacttggcacattttcttccaaattttaagaggtgattttcaaaagctttattggggtatgttgtcagaccagggttttcagagttgatggaaaagagtcttgtgagaaaacttattttgataaattattacacacgcagaaaaactgatcacactgactggatctgtccacgacatggaaaataaactggattttcagaata

SEQ ID NO: 11970 - DNA, 3369 bp, Homo sapiens
  source 1..3369: mol_type = unassigned DNA
atggcgcagcatgactttgctccagcctggcttaatttccctactccaccatcatcaacaaaggtattatcaaataccttgaaatcgtcattgaattttgagaagcattctgaaaactttgcatggacagagaatcgttatgatgtgaaccgtcgacgacacaactcttcagatggctttgattctgctattgggcgtcctaatggaggtaactttggaaggaaagaaaaaaatggatggcgtacacatggaagaaatggtacagaaaacataaatcatcgaggtggataccatggtggaagttcccgttctcgtagcagtattttccatgcaggaaaaagccaaggactacatgaaaacaacatacctgacaatgaaaccgggaggaaagaagacaagagagaacgcaaacagtttgaagctgaggattttccgtctttaaatcctgagtatgagagagaaccaaatcacaataagtctttagctgcaggtgtgtgggaatatcctccgaatcctaaatctagagctccaaggatgctggtcattaagaaaggtaatacaaaagacttacagctatctggattcccagtagtaggaaatcttccgtcacagccagttaagaatggaactggtccaagtgtttataaaggtttagtccctaaacctgctgctccacctacaaaacctacacaatggaaaagccaaacaaaagaaaataaagttggaacttctttccctcatgagtccacatttggcgttggcaactttaatgcttttaaatcaactgccaagaactttagtccatctacaaattcagtgaaagagtgtaatcgctcaaattcctcttctcctgttgacaaacttaatcagcagcctcgtctaaccaaactgacacgaatgcgcactgataagaagagtgaatttttgaaagcattgaaaagagacagagtagaagaggaacatgaagatgaaagccgtgctggctcagagaaggatgacgactcatttaatttacataacagcaatagtactcaccaagaaagggatataaaccgaaacttcgatgaaaatgaaattcctcaagagaatggcaatgcctcagtgatttcccagcagatcattcggtcttcaaccttcccacaaactgatgttctttcaagttcacttgaggcagaacacagattgttaaaggaaatgggctggcaggaagacagtgaaaatgatgaaacatgtgctcccttaactgaggatgaaatgagagaattccaagttattagtgaacagttacagaagaatggtctgagaaaaaatggtattttgaaaaatggcttgatctgtgacttcaagtttggaccgtggaagaacagcactttcaaacccacaactgagaatgatgacacagagacaagtagcagtgatacatcagatgacgacgatgtgtgaaggatttcctaacagctttagaaatcttagtgtgatacatctctcatacagtttggggtgaattgtaaaaatgaagaactataatttatgtagtgaaataccccattagaagaggattttttgggggacttcaatatgaagaaaaccaagaatgttttgttgggctgtgttgaacattatttctttgtaaatgaatgttgtaggaatgaggacttgggttggtccaacattgactttcttcatcactgcaacatttctctgactagcaatgtgacgatgtaacaaatgagattttctcatttaataataaaaaattgtgtaatgttttgcaaagcttctgtcttaaaatgtccaggtcttaagaaaaaaggcagcttacactgttttgcttgcagagtcatatctttttcgtacaatggaaatcctcaagtccactttgtgcggtctccctctccttcccccaaaaaacaacaacaacaaaacaaaaaccaaaaaggaaaatgtagcatgttggctaaaactggagcaaagtgcactaaaacaatttcctgaactcacctgttgtactattcaccttttaaaccataaattgctctttagccatttgtagtgcagtaaatgttacaggaaaagacttggcacattttcttccaaattttaagaggtgattttcaaaagctttattggggtatgttgtcagaccagggttttcagagttgatggaaaagagtcttgtgagaaaacttattttgataaattattacacacgcagaaaaactgatcacactgactggatctgtccacgacatggaaaataaactggattttcagaatattgttgttttctgtagtgttcaaggtattgtttctaaacataaacatactctaaacatgctttattcacttgttaaagtcatacttttaaaagtaataccttactaaagatggtgattacttttccgaggtcagaaaaggaaagctaagcgttttcattatcaaatacacaagcttattaaatgaatgactgttaactactttattttcatttgcacattaattttggaattgtttctgttttgctgctgacggaaatactattttggctctgtgtatatttgtattttgatttttctggtttgtttacccccatttgcttttagctcccccttatgtttaaatatattctaacttatgtaaagagcataatcttagagcaaaaatacttgaggttttatgtcagatctaatcttaagtgtttgttgttttttaaaaagtgttttctcagatggctgcagtgtttttgctatttctgcataaataccctacctggactccccagttttcaccagaaactgttatttttttttgttgttgttcccactgagactgatggtgatggggaaattaaaaacaacacactagcacactcccacaaaacttgaggaagagttagaatggtaataaaatattaaatagaccttatacttaaaataaggtttcactatataatttgtcacaattcaatctaatcagctaaagttaaatgtagttagaattagccacaggagaatgtaaagcatgctttgacgaagctatcggtaacacatattgaatgtctttgagactcttagattgtactatttgcttaatagattaatgaaatttatcagatacaacctgtatttccaaaaacaagctagaaggaacctgaggaatgtggtttacatttgagatccaccttactgtgttttctactttcagaaaagattctgtagttttggtttttggcatctttcttatactcagttttttctgccttaattcccatttaccagcagttaactcatgtttattgtgctttcatgcattgtgatatggaatgtgtttagtaatttactccttataaatatggtaaagtacagtggt

SEQ ID NO: 11971 - DNA, 2568 bp, Homo sapiens
  source 1..2568: mol_type = unassigned DNA
tctggccagaagaaatctggcctcggaacacgccattctccgcgccgcttccaataaccactaacatccctaacgagcatccgagccgagggctctgctcggaaatcgtcctggcccaactcggcccttcgagctctcgaagattaccgcatctatttttttttcttttttttcttttcctagcgcagataaagtgagcccggaaagggaaggagggggcggggacaccattgccctgaaagaataaataagtaaataaacaaactggctcctcgccgcagctggacgcggtcggttgagtccaggttgggtcggacctgaacccctaaaagcggaaccgcctcccgccctcgccatcccggagctgagtcgccggcggcggtggctgctgccagacccggagtttcctctttcactggatggagctgaactttgggcggccagagcagcacagctgtccggggatcgctgcacgctgagctccctcggcaagacccagcggcggctcgggatttttttgggggggcggggaccagccccgcgccggcaccatgttcctggcgaccctgtacttcgcgctgccgctcttggacttgctcctgtcggccgaagtgagcggcggagaccgcctggattgcgtgaaagccagtgatcagtgcctgaaggagcagagctgcagcaccaagtaccgcacgctaaggcagtgcgtggcgggcaaggagaccaacttcagcctggcatccggcctggaggccaaggatgagtgccgcagcgccatggaggccctgaagcagaagtcgctctacaactgccgctgcaagcggggtatgaagaaggagaagaactgcctgcgcatttactggagcatgtaccagagcctgcagggaaatgatctgctggaggattccccatatgaaccagttaacagcagattgtcagatatattccgggtggtcccattcatatcagtggagcacattcccaaagggaacaactgcctggatgcagcgaaggcctgcaacctcgacgacatttgcaagaagtacaggtcggcgtacatcaccccgtgcaccaccagcgtgtccaacgatgtctgcaaccgccgcaagtgccacaaggccctccggcagttctttgacaaggtcccggccaagcacagctacggaatgctcttctgctcctgccgggacatcgcctgcacagagcggaggcgacagaccatcgtgcctgtgtgctcctatgaagagagggagaagcccaactgtttgaatttgcaggactcctgcaagacgaattacatctgcagatctcgccttgcggatttttttaccaactgccagccagagtcaaggtctgtcagcagctgtctaaaggaaaactacgctgactgcctcctcgcctactcggggcttattggcacagtcatgacccccaactacatagactccagtagcctcagtgtggccccatggtgtgactgcagcaacagtgggaacgacctagaagagtgcttgaaatttttgaatttcttcaaggacaatacatgtcttaaaaatgcaattcaagcctttggcaatggctccgatgtgaccgtgtggcagccagccttcccagtacagaccaccactgccactaccaccactgccctccgggttaagaacaagcccctggggccagcagggtctgagaatgaaattcccactcatgttttgccaccgtgtgcaaatttacaggcacagaagctgaaatccaatgtgtcgggcaatacacacctctgtatttccaatggtaattatgaaaaagaaggtctcggtgcttccagccacataaccacaaaatcaatggctgctcctccaagctgtggtctgagcccactgctggtcctggtggtaaccgctctgtccaccctattatctttaacagaaacatcatagctgcattaaaaaaatacaatatggacatgtaaaaagacaaaaaccaagttatctgtttcctgttctcttgtatagctgaaattccagtttaggagctcagttgagaaacagttccattcaactggaacattttttttttttccttttaagaaagcttcttgtgatcctttggggcttctgtgaaaaacctgatgcagtgctccatccaaactcagaaggctttgggatatgctgtattttaaagggacagtttgtaacttgggctgtaaagcaaactggggctgtgttttcgatgatgatgatgatcatgatgatgatcatcatgatcatgatgatgatcatcatgatcatgatgatgattttaacagttttacttctggcctttcctagctagagaaggagttaatatttctaaggtaactcccatatctcctttaatgacattgatttctaatgatataaatttcagcctacattgatgccaagcttttttgccacaaagaagattcttaccaagagtgggctttgtggaaacagctggtactgatgttcacctttatatatgtactagcattttccacgctgatgtttatgtactgtaaacagttctgcactcttgtacaaaagaaaaaac

SEQ ID NO: 11972 - DNA, 1748 bp, Homo sapiens
  source 1..1748: mol_type = unassigned DNA
cgccgggactgcgggccggcgcgctcgccctgggctggggtgcggaagcgcccgagtcctgggcaccgggcgagagtgtgagaggagcggacgcccaggagggagccgaggacgcgcggcgggttgggtcggacctgaacccctaaaagcggaaccgcctcccgccctcgccatcccggagctgagtcgccggcggcggtggctgctgccagacccggagtttcctctttcactggatggagctgaactttgggcggccagagcagcacagctgtccggggatcgctgcacgctgagctccctcggcaagacccagcggcggctcgggatttttttgggggggcggggaccagccccgcgccggcaccatgttcctggcgaccctgtacttcgcgctgccgctcttggacttgctcctgtcggccgaagtgagcggcggagaccgcctggattgcgtgaaagccagtgatcagtgcctgaaggagcagagctgcagcaccaagtaccgcacgctaaggcagtgcgtggcgggcaaggagaccaacttcagcctggcatccggcctggaggccaaggatgagtgccgcagcgccatggaggccctgaagcagaagtcgctctacaactgccgctgcaagcggggtatgaagaaggagaagaactgcctgcgcatttactggagcatgtaccagagcctgcagggaaatgatctgctggaggattccccatatgaaccagttaacagcagattgtcagatatattccgggtggtcccattcatatcagtggagcacattcccaaagggaacaactgcctggatgcagcgaaggcctgcaacctcgacgacatttgcaagaagtacaggtcggcgtacatcaccccgtgcaccaccagcgtgtccaacgatgtctgcaaccgccgcaagtgccacaaggccctccggcagttctttgacaaggtcccggccaagcacagctacggaatgctcttctgctcctgccgggacatcgcctgcacagagcggaggcgacagaccatcgtgcctgtgtgctcctatgaagagagggagaagcccaactgtttgaatttgcaggactcctgcaagacgaattacatctgcagatctcgccttgcggatttttttaccaactgccagccagagtcaaggtctgtcagcagctgtctaaaggaaaactacgctgactgcctcctcgcctactcggggcttattggcacagtcatgacccccaactacatagactccagtagcctcagtgtggccccatggtgtgactgcagcaacagtgggaacgacctagaagagtgcttgaaatttttgaatttcttcaaggacaatacatgtcttaaaaatgcaattcaagcctttggcaatggctccgatgtgaccgtgtggcagccagccttcccagtacagaccaccactgccactaccaccactgccctccgggttaagaacaagcccctggggccagcagggtctgagaatgaaattcccactcatgttttgccaccgtgtgcaaatttacaggcacagaagctgaaatccaatgtgtcgggcaatacacacctctgtatttccaatggtaattatgaaaaagaaggtctcggtgcttccagccacataaccacaaaatcaatggctgctcctccaagctgtggtctgagcccactgctggtcctggtggtaaccgctctgtccaccctattatctttaacagaaacatca

SEQ ID NO: 11973 - DNA, 2592 bp, Homo sapiens
  source 1..2592: mol_type = unassigned DNA
cttccaggttgggtcggacctgaacccctaaaagcggaaccgcctcccgccctcgccatcccggagctgagtcgccggcggcggtggctgctgccagacccggagtttcctctttcactggatggagctgaactttgggcggccagagcagcacagctgtccggggatcgctgcacgctgagctccctcggcaagacccagcggcggctcgggatttttttgggggggcggggaccagccccgcgccggcaccatgttcctggcgaccctgtacttcgcgctgccgctcttggacttgctcctgtcggccgaagtgagcggcggagaccgcctggattgcgtgaaagccagtgatcagtgcctgaaggagcagagctgcagcaccaagtaccgcacgctaaggcagtgcgtggcgggcaaggagaccaacttcagcctggcatccggcctggaggccaaggatgagtgccgcagcgccatggaggccctgaagcagaagtcgctctacaactgccgctgcaagcggggtatgaagaaggagaagaactgcctgcgcatttactggagcatgtaccagagcctgcagggaaatgatctgctggaggattccccatatgaaccagttaacagcagattgtcagatatattccgggtggtcccattcatatcagtggagcacattcccaaagggaacaactgcctggatgcagcgaaggcctgcaacctcgacgacatttgcaagaagtacaggtcggcgtacatcaccccgtgcaccaccagcgtgtccaacgatgtctgcaaccgccgcaagtgccacaaggccctccggcagttctttgacaaggtcccggccaagcacagctacggaatgctcttctgctcctgccgggacatcgcctgcacagagcggaggcgacagaccatcgtgcctgtgtgctcctatgaagagagggagaagcccaactgtttgaatttgcaggactcctgcaagacgaattacatctgcagatctcgccttgcggatttttttaccaactgccagccagagtcaaggtctgtcagcagctgtctaaaggaaaactacgctgactgcctcctcgcctactcggggcttattggcacagtcatgacccccaactacatagactccagtagcctcagtgtggccccatggtgtgactgcagcaacagtgggaacgacctagaagagtgcttgaaatttttgaatttcttcaaggacaatacatgtcttaaaaatgcaattcaagcctttggcaatggctccgatgtgaccgtgtggcagccagccttcccagtacagaccaccactgccactaccaccactgccctccgggttaagaacaagcccctggggccagcagggtctgagaatgaaattcccactcatgttttgccaccgtgtgcaaatttacaggcacagaagctgaaatccaatgtgtcgggcaatacacacctctgtatttccaatggtaattatgaaaaagaaggtctcggtgcttccagccacataaccacaaaatcaatggctgctcctccaagctgtggtctgagcccactgctggtcctggtggtaaccgctctgtccaccctattatctttaacagaaacatcatagctgcattaaaaaaatacaatatggacatgtaaaaagacaaaaaccaagttatctgtttcctgttctcttgtatagctgaaattccagtttaggagctcagttgagaaacagttccattcaactggaacattttttttttttccttttaagaaagcttcttgtgatcctttggggcttctgtgaaaaacctgatgcagtgctccatccaaactcagaaggctttgggatatgctgtattttaaagggacagtttgtaacttgggctgtaaagcaaactggggctgtgttttcgatgatgatgatgatcatgatgatgatcatcatgatcatgatgatgatcatcatgatcatgatgatgattttaacagttttacttctggcctttcctagctagagaaggagttaatatttctaaggtaactcccatatctcctttaatgacattgatttctaatgatataaatttcagcctacattgatgccaagcttttttgccacaaagaagattcttaccaagagtgggctttgtggaaacagctggtactgatgttcacctttatatatgtactagcattttccacgctgatgtttatgtactgtaaacagttctgcactcttgtacaaaagaaaaaacacctgtcacatccaaatatagtatctgtcttttcgtcaaaatagagagtggggaatgagtgtgccgattcaatacctcaatccctgaacgacactctcctaatcctaagccttacctgagtgagaagccctttacctaacaaaagtccaatatagctgaaatgtcgctctaatactctttacacatatgaggttatatgtagaaaaaaattttactactaaatgatttcaactattggctttctatattttgaaagtaatgatattgtctcatttttttactgatggtttaatacaaaatacacagagcttctttcccctca

SEQ ID NO: 11974 - DNA, 9561 bp, Homo sapiens
  source 1..9561: mol_type = unassigned DNA
cagaacactgcgtgtcctgtgcgcgagtacgggtccggccgcgggtcccaccgcaagcgggcgtgtgcagctgcggctgcctggcgggcgagcttaggagggagctggagctgcggagcggcgggaacaggagcaggccgagggtcctctggccagaagaaatctggcctcggaacacgccattctccgcgccgcttccaataaccactaacatccctaacgagcatccgagccgagggctctgctcggaaatcgtcctggcccaactcggcccttcgagctctcgaagattaccgcatctatttttttttcttttttttcttttcctagcgcagataaagtgagcccggaaagggaaggagggggcggggacaccattgccctgaaagaataaataagtaaataaacaaactggctcctcgccgcagctggacgcggtcggttgagtccaggttgggtcggacctgaacccctaaaagcggaaccgcctcccgccctcgccatcccggagctgagtcgccggcggcggtggctgctgccagacccggagtttcctctttcactggatggagctgaactttgggcggccagagcagcacagctgtccggggatcgctgcacgctgagctccctcggcaagacccagcggcggctcgggatttttttgggggggcggggaccagccccgcgccggcaccatgttcctggcgaccctgtacttcgcgctgccgctcttggacttgctcctgtcggccgaagtgagcggcggagaccgcctggattgcgtgaaagccagtgatcagtgcctgaaggagcagagctgcagcaccaagtaccgcacgctaaggcagtgcgtggcgggcaaggagaccaacttcagcctggcatccggcctggaggccaaggatgagtgccgcagcgccatggaggccctgaagcagaagtcgctctacaactgccgctgcaagcggggtatgaagaaggagaagaactgcctgcgcatttactggagcatgtaccagagcctgcagggaaatgatctgctggaggattccccatatgaaccagttaacagcagattgtcagatatattccgggtggtcccattcatatcagatgtttttcagcaagtggagcacattcccaaagggaacaactgcctggatgcagcgaaggcctgcaacctcgacgacatttgcaagaagtacaggtcggcgtacatcaccccgtgcaccaccagcgtgtccaacgatgtctgcaaccgccgcaagtgccacaaggccctccggcagttctttgacaaggtcccggccaagcacagctacggaatgctcttctgctcctgccgggacatcgcctgcacagagcggaggcgacagaccatcgtgcctgtgtgctcctatgaagagagggagaagcccaactgtttgaatttgcaggactcctgcaagacgaattacatctgcagatctcgccttgcggatttttttaccaactgccagccagagtcaaggtctgtcagcagctgtctaaaggaaaactacgctgactgcctcctcgcctactcggggcttattggcacagtcatgacccccaactacatagactccagtagcctcagtgtggccccatggtgtgactgcagcaacagtgggaacgacctagaagagtgcttgaaatttttgaatttcttcaaggacaatacatgtcttaaaaatgcaattcaagcctttggcaatggctccgatgtgaccgtgtggcagccagccttcccagtacagaccaccactgccactaccaccactgccctccgggttaagaacaagcccctggggccagcagggtctgagaatgaaattcccactcatgttttgccaccgtgtgcaaatttacaggcacagaagctgaaatccaatgtgtcgggcaatacacacctctgtatttccaatggtaattatgaaaaagaaggtctcggtgcttccagccacataaccacaaaatcaatggctgctcctccaagctgtggtctgagcccactgctggtcctggtggtaaccgctctgtccaccctattatctttaacagaaacatcatagctgcattaaaaaaatacaatatggacatgtaaaaagacaaaaaccaagttatctgtttcctgttctcttgtatagctgaaattccagtttaggagctcagttgagaaacagttccattcaactggaacattttttttttttccttttaagaaagcttcttgtgatcctttggggcttctgtgaaaaacctgatgcagtgctccatccaaactcagaaggctttgggatatgctgtattttaaagggacagtttgtaacttgggctgtaaagcaaactggggctgtgttttcgatgatgatgatgatcatgatgatgatcatcatgatcatgatgatgatcatcatgatcatgatgatgattttaacagttttacttctggcctttcctagctagagaaggagttaatatttctaaggtaactcccatatctcctttaatgacattgatttctaatgatataaatttcagcctacattgatgccaagcttttttgccacaaagaagattcttaccaagagtgggctttgtggaaacagctggtactgatgttcacctttatatatgtactagcattttccacgctgatgtttatgtactgtaaacagttctgcactcttgtacaaaagaaaaaacacctgtcacatccaaatatagtatctgtcttttcgtcaaaatagagagtggggaatgagtgtgccgattcaatacctcaatccctgaacgacactctcctaatcctaagccttacctgagtgagaagccctttacctaacaaaagtccaatatagctgaaatgtcgctctaatactctttacacatatgaggttatatgtagaaaaaaattttactactaaatgatttcaactattggctttctatattttgaaagtaatgatattgtctcatttttttactgatggtttaatacaaaatacacagagcttctttcccctcataagtagtgttcgctctgatatgaacttcacaaatacagctcatcaaaagcagactctgagaagcctcgtgctgtagcagaaagttctgcatcatgtgactgtggacaggcaggaggaaacagaacagacaagcattgtcttttgtcattgctcgaagtgcaagcgtgcatacctgtggagggaactggtggctgcttgtaaatgttctgcagcatctcttgacacacttgtcatgacacaatccagtaccttggttttcaggttatctgacaaaggcagctttgattgggacatggaggcatgggcaggttctcctttctttggaaacacatccatgctgggatgcacagttcttttcctaaggattgtgtttactcctgactgcaacgtcttggccactgtttggagcagtttggtctgaaggtcattaaggatctgcttgcatcttgtttcatgtcctccgtgacagactgcagaccatgttagaagagaaggaaggtttgtggatcaagagggttgacattaggtttggtgagatgagttgcttggcacagatcagcagaacaggaccctggtgataaggcatctggctttgctaaccacttatcatcttccattattctctttcttaactaagtagacccgaaagtgcacttttgaagtctggtttagatggcgagattccgaatctacaatgatcgagtactggtggccacttttctccaacattaagtaaagaggaggagattccaccttcagaaagtgctgggaagcattggctttcttcccacattggtagaagagatggaggaggaaaccagggtgcacatttctacagatcccctttgcctgctggtgtttgccttgtaagataagtcactggggggaaggggaaatctatgaaatccaagataaaggcatagtctttcagctctattggtgttaaaagtatatttgtgtccaaatgttaatcaacacaaatgtacagtactcagtactgacttttttcacttcaaaatgttttcaagggaaattcagcagacacccaactgtatttaattagtgaaaagatctataaagactcttactttgaataaacacattaagtaagtgtgtcaaaatatttggaatgccagttatctatgagcgcatatctcttacagagtgtattttgttttcattaaggtatctctgtgtatctacactggactaatttcatagggatctgattctatgtgatccactgtagaaagctactgattacttctgcagtaacagcagctctaattagcatcagatgaccaaagcggaaatgggagtttcagcgctaacaagggcagccttcattgaagaatgcatgggtaggcaatatataaattacattttgaaaagcctcatctgtcaccaacaaatatctcatttttcttcagtgataaaagcatattcaagttaccagctcctcaatttgaaaatcagttgctgattaaataaatagggggaagcatcttgttcagggacaacacgttagagagattcttatcaaagcaagccaagcaaggtttccgccattcagtgtgatcttagtttgacacggtgaccctaaaacaccatcatttgccccagaactggagcacaataagttaaatcatttacctgtctcacttcttcttggcgtgcttaaaagcaaaaatgattcgctacttcctgtccttcagtccgggcatttggggtgccactgaagacaggggttatctgctgaggtttgggtgtcttgcaggaagtatctcattgcagttgattttgatgaaaccaaacagtaactagggtccatgcagaccgtgactccctgattacatctagccatgccctacttatttcagagagaaagagagggggaataaaggcagtattgccacactgattagaagcacattcattccactttgatgttgaatatttttgaccgatacatgcttgagtatctttttaatagagcacatgaaggaagaagcacacaatatagagaaggaattgagaatgccaattacatatttatttttccatacctgatttttttcaagtctgtaataaaaaaagtataagttgagattaacataggttatttttcatgaagtatagcaaacgatctagaatgtgataggagtgtggtttccatttctttttttttttttttaacagacttttgtgctgtagtaagaatgtcttagaagttgtgtcttcgagttcctcaaacaccggacagggctcccccagagctgcctcagcctttgatttggtccatattcagacacttcctgtcttgcatacactctgaggatgggccgcttctagctgccgcccgtctccctcttgccttcttgtctctaaatcagacactcccaagcactccatctgctatactaggagagtgggagagccaaagcattttggagtccatgtaaagtgcctgggaaaagagatgtaagagcagtgggagtttatataattagcgaattcttttctcagaattcagcggaaatgtatttctgttgttattatttacaaaattgtggcctcagaggagctgtcttttggaaaataagttttcattcatgcagttagttagacatgcacgatgtacttgaatcaataaactgtggaccagaaaagggctgcttaaatgaattcacgtgttctaattctctttcgaggctgttgatgacctcctggattcatacccccatgatctgtcttgctcttgcctctgttctttgataaagcacatcagactatgtgacacccatcttttcaagaacgacctaaaagcaatgacaacaggcaggagagaattaccactggcctgggcacagtgacagcagaaggcccacctgagcttggagagttggcgagataaggcaaaatcaaggtgcaacagtgggccatgttccaagggtgaatggatctgagagtccgctgatgttccttactgatcagaacagggaccttctaacgaaacagccagagttccttgaatcaggcagaagttctttagagacaggaagccagagctattgataatatccgaacgacagaggaaggaatttcttattagaaattctaaaataaaacaagtggggatttggttggatacccttagaagctacatttttctctcatccctaagatagatatctcaagtgtatatctgacacctcttggctttgacacggctctgcttctcaagtgaccatttgttttaagtctgttgtctagaattctttgtgggggctggacctctgaaaaagattctcactgcagaggctttaaatctgtgtttttttccactccctccgtcctgggatgtattcggtaggacatttcatttatatcaggatattggctgattcagctctctttcatcgttattattcaggcctccctccaccaccttgttctttattgcctaagtattgccctccccaattcttcatcgtaatagctctaaatttagtttgacccaaattaatttttgttccaacagatatattttaagacagagaagcctctctcaggagccagatgatctgaagatgatgctaatccccaaatacgaagttcctccagctaactctcctctgagctccctcttcttagctttgggattggggatggtctcatccttgccaggaatccctttgttgctcccagtgtctctgatgagcttctcctccctcccagagacaatgcaggggtggttttcagcagaatgtgccacctgcacttctgattgttctgagacccagcccagaggggtggagaaggcgcacaaaccctattccaataaactgcctgcagagaaccacagcctgctaatagtcgttgaggtctcagccccctaaggtctccaagctcatttgaccagcgcagctgcgacttcggctgtctgcctctggcaggtgccaatatcagcatcttgtcccactgccatggggagttaatttttgctccagggcagctgccaagcccagcaccggcatcaatagaaggttttctctgattttcttctcttcctctcaggctaggctttcttaccaatccccaattttcttctgtagggcgccaggagactggccagagatctttagactcttacttagtttgaacatctcttgctgctcacacccaggcttcttcagcagaaagcatgacccatagtaggtactcagaaactggttgaatgaaaagccttgacatttaagggctttattctgtcatacggtagcaagaactggcctattggcatcgtattcctggcattgagctgtattgaccctgaatgtgtcctcctgaggtttttgagggtgacctaggagaaagggtctgaaaaagcactgggatccaagtgactttaaatctgcccgtggcatttcctgctgagaggcgagaaactagcatctctcccaacaggctcacatccgccaggaaggacagagcccaaaacgggggtagactttgtgggaaattcgccagttagtccgctgagattttaatctgcctcaagcacaggatgctgacaagaaaggtagaccactcccccgatcccagacaaaccccaggggtgacaacttctccatcagtatcctgagaagcaacatcaaatgcttaccaagtcagcacgtttactgagtgagtactctgacggaataaaccagcatttggagctgaacttgagaacacagggccctctgacagcagcttagggaaacacccatcccttccagattggcagaatccttccatttcatgtccttcggagacgctgtattctctttacaaatcattcatgaaactgagactcagtctcccaggggtaagtcctgggccacgtgcaaacaatggcaaatccagctcttccatgatagagaaggcaaacacacccaccttcatcctgagcctaaaaggccacctctgagcacttgggcagccactcctctgggcctcagagggccatgagcttggccaggtaggcacagcggcggggaagtcacagctgtcaggtaccggccatggtgcaggtgggaataggagatgccagagctgctttagctgaggaaagcaaacagtcagcagtgctcaaaggagcaaaacttcgaatgtgcacattgacccctgacacctgcaagcataacacagatcctaagactagagtgaagtaggaagaagaattagaaaatccagtggatgtcctgagtatagggaaccagggccgttgaaaatcagtaaaggttgattacctggggcgagaccgggtgactgtggcagtgcaggtgaaggtaccctggaccttctcagttcgctggcacataaggctccgccaataaagcgtggttctctctgtcacacacacacacacacacacacacacacacacacacacacacacacacacaatgattggagggctatatgatccagcattagcttcctggtgtgccaagcatgcttgatcgggaatttttttttattattattattttttagctgtagctgaaggcatttctcggatgtggagaggagaatggaaatcgcagaaccaaatcagtttgccctgccatatttggctgtggtctgtcattgggcatttctgatgtgcttttctggattcaggaagagctgattgtcctccgagggttgaaaaaaaaaaaacagtttcagaaacctgaatccagggccttatagttctcctcattatctatcttcttctcccttccctcgcccaagggagtgggggaaacacttttcactgcagagtttgctttaaagttttcccatcttgcgtgcattatcccttgatattaaaattattttctcagtttaatccaactcctgctgagaagctgtgtgagatttaggctgtggggtttttttcttgtactcttttggatggtgttgcatttttcactcttaacccgagggtgtgtttcagcttatgttcgttctgtttcatgcaggtttatagcacggtagagtagaaggcggcttctgatttttagggtatttttagaattcattcctgagtgaggggttcagacacccagtctcctcggaacaggggtgaggggtcgactgagctttgttgagaagcctccagttaggcttcgggcgggtctccatgttatattgtgtgtttactgagcttcccactggtagaagatgacacatttgtccatcgtcctgtgtatctgctttccagaggacaccggagcattctcctggggtcactcccacatggctgcctcacatagctgttttgcaacagcctttattgccaacacccttggaagaacatctcctgtagaagtacaagttttgcaatatggactttggaagtggttttgtgatgttcgaattttctgttagcctattgctcaagcactacagaatgtacatagtccctttggccatcctctcaccccagaatatcctaataaacattgttttctttttt

SEQ ID NO: 11975 - DNA, 1309 bp, Homo sapiens
  source 1..1309: mol_type = unassigned DNA
gtgctagctgctggggagatggtggtgggccagaaagtgcagagtgcaatgccatgtaaagaaggggagaaggagagaggaagagaactaggatgcaggaaggaaagttctggaaggggatggcagagaccggaatgtggggatgtggggagtggattccagtggagcacattcccaaagggaacaactgcctggatgcagcgaaggcctgcaacctcgacgacatttgcaagaagtacaggtcggcgtacatcaccccgtgcaccaccagcgtgtccaacgatgtctgcaaccgccgcaagtgccacaaggccctccggcagttctttgacaaggtcccggccaagcacagctacggaatgctcttctgctcctgccgggacatcgcctgcacagagcggaggcgacagaccatcgtgcctgtgtgctcctatgaagagagggagaagcccaactgtttgaatttgcaggactcctgcaagacgaattacatctgcagatctcgccttgcggatttttttaccaactgccagccagagtcaaggtctgtcagcagctgtctaaaggaaaactacgctgactgcctcctcgcctactcggggcttattggcacagtcatgacccccaactacatagactccagtagcctcagtgtggccccatggtgtgactgcagcaacagtgggaacgacctagaagagtgcttgaaatttttgaatttcttcaaggacaatacatgtcttaaaaatgcaattcaagcctttggcaatggctccgatgtgaccgtgtggcagccagccttcccagtacagaccaccactgccactaccaccactgccctccgggttaagaacaagcccctggggccagcagggtctgagaatgaaattcccactcatgttttgccaccgtgtgcaaatttacaggcacagaagctgaaatccaatgtgtcgggcaatacacacctctgtatttccaatggtaattatgaaaaagaaggtctcggtgcttccagccacataaccacaaaatcaatggctgctcctccaagctgtggtctgagcccactgctggtcctggtggtaaccgctctgtccaccctattatctttaacagaaacatcatagctgcattaaaaaaatacaatatggacatgtaaaaagacaaaaaccaagttatctgtttcctgttctcttgtatagctgaaattccagtttaggagctcagttgagaaacagttccattcaactggaacattttttttttttccttttaagaaagcttcttgtgatcctttggggcttctgtg

SEQ ID NO: 11976 - DNA, 3013 bp, Homo sapiens
  source 1..3013: mol_type = unassigned DNA
ggagagagagagagaggagagagaaagacacacgcacgcagagacacacggtcactggaattccattagaaaaaagtgagccgagcaagggttagcgggagaagatttttttgaatcttgtcttcgtcttggtgcgaaagaagcgactccagtctctcgtcctcgaagctccgactggattgttcttgggcgctgacacccgtctgtggatttcttttctatttgcattttattccgaccccctccctcgccgcttccttccagcccttcactcgcaaatcgcctctctccccacctccccaggcccctcctgggaagcgcaggggaattggacccgcggggactcacgccttcccggacgattggaggggagggctgaccccaggactgggctgttggcttagaaagccgatacacagatacgcgtatatttgattgtagcgggcaaggggggcgtcgagaggcagcagcccatcgcccgcctctcaccccaccccctccagccagaggcgagaatcgcaggactcgggatcttcatcgggtggactagctgggatctccgcattggatttggggctgattaccactgcttgcctattattattgttgttgttactactattatttttttttacccaagggagaaagacaaaaaaacggtgggatttatttaacatgatcttggcaaacgtcttctgcctcttcttctttctaggtgaggagttctacgaagcctccccctatgagccggtgacctcccgcctctcggacatcttcaggcttgcttcaatcttctcagggacaggggcagacccggtggtcagcgccaagagcaaccattgcctggatgctgccaaggcctgcaacctgaatgacaactgcaagaagctgcgctcctcctacatctccatctgcaaccgcgagatctcgcccaccgagcgctgcaaccgccgcaagtgccacaaggccctgcgccagttcttcgaccgggtgcccagcgagtacacctaccgcatgctcttctgctcctgccaagaccaggcgtgcgctgagcgccgccggcaaaccatcctgcccagctgctcctatgaggacaaggagaagcccaactgcctggacctgcgtggcgtgtgccggactgaccacctgtgtcggtcccggctggccgacttccatgccaattgtcgagcctcctaccagacggtcaccagctgccctgcggacaattaccaggcgtgtctgggctcttatgctggcatgattgggtttgacatgacacctaactatgtggactccagccccactggcatcgtggtgtccccctggtgcagctgtcgtggcagcgggaacatggaggaggagtgtgagaagttcctcagggacttcaccgagaacccatgcctccggaacgccatccaggcctttggcaacggcacggacgtgaacgtgtccccaaaaggcccctcgttccaggccacccaggcccctcgggtggagaagacgccttctttgccagatgacctcagtgacagtaccagcttggggaccagtgtcatcaccacctgcacgtctgtccaggagcaggggctgaaggccaacaactccaaagagttaagcatgtgcttcacagagctcacgacaaatatcatcccagggagtaacaaggtgatcaaacctaactcaggccccagcagagccagaccgtcggctgccttgaccgtgctgtctgtcctgatgctgaaactggccttgtaggctgtgggaaccgagtcagaatatttttgaaagctacgcagacaagaacagccgcctgacgaaatggaaacacacacagacacacacacaccttgcaaaaaaaaaattgtttttcccaccttgtcgctgaacctgtctcctcccaggtttcttctctggagaagtttttgtaaaccaaacagacaagcaggcaggcagcctgagagctggcccaggggtcccctggcaggggaaactctggtgccggggagggcacgaggctctagaaatgcccttcactttctcctggtgtttttctctctggacccttctgaagcagagaccggacaagagcctgcagcggaagggactctgggctgtgcctgaggctggctgggggcaggacaacacagctgcttccccaggctgcccactctggggacccgctgggggctggcagagggcatcggtcagcggggcagcggggctggccatgagggtccaccttcagccctttggcttcaaggatggagatggttttgccctccctctctgccctcgggtggggctggtgggtctgcagctggtgtgggaacttccccacggatggcggtggagggggttcgcaccgtgctgggctccccctgactgtagcacggagtgttggggctgggggccagctccaggagggcttgagagctcagcctgcctgggagagcccttgtggcgaggcattaaaacttgggcaccagcttctttctcggtggcagaaattttgaagtcagagagaaacggtcctttgttggcttctttgctttctcgtgggtcctttggcaggcctccctttggggagagggaggggagagaccacagccgggtgtgtgtctgcagcaccgtgggccctcaagctttcctgctgtcttctccctcctcctcctttcccctttctctttcctcatttcctagacgtacgtcaactgtatgtacataccggggctcctctcctaacatatatgtatatacacatccatatacatatattgtgtggtttcccctttctttcctttttttaagcaacaaaactatggaaataataccccaacagatgagcgaaaatgtattattgtaaagtttattttttttaatactgttgtctataatggggaaaaaggacattggccccgcagtgccctgccccagtcagcctggctgggctctggtgggggctcctgatccgcatccaagcttaaccaaggctccaataaacgtgctaggaagc

SEQ ID NO: 11977 - DNA, 2104 bp, Homo sapiens
  source 1..2104: mol_type = unassigned DNA
gggagtggagccagcagctgagaccccggcaagggcaaccatggatctggagttggaacgggacaatgcgccatcaggccggcagaagctggcagatgagggccgagttgcggcacacaggtgccagatctccaaatagaggaaattggaaagaaaaagataaagctaatctgtaatttcatcacccggagacaactgctgttgacattgcattgtgtgtctaaggaggactttgacagggagaaagacaaaaaaacggtgggatttatttaacatgatcttggcaaacgtcttctgcctcttcttctttctagacgagaccctccgctctttggccagcccttcctccctgcagggccccgagctccacggctggcgccccccagtggactgtgtccgggccaatgagctgtgtgccgccgaatccaactgcagctctcgctaccgcactctgcggcagtgcctggcaggccgcgaccgcaacaccatgctggccaacaaggagtgccaggcggccttggaggtcttgcaggagagcccgctgtacgactgccgctgcaagcggggcatgaagaaggagctgcagtgtctgcagatctactggagcatccacctggggctgaccgagggtgaggagttctacgaagcctccccctatgagccggtgacctcccgcctctcggacatcttcaggcttgcttcaatcttctcagggacaggggcagacccggtggtcagcgccaagagcaaccattgcctggatgctgccaaggcctgcaacctgaatgacaactgcaagaagctgcgctcctcctacatctccatctgcaaccgcgagatctcgcccaccgagcgctgcaaccgccgcaagtgccacaaggccctgcgccagttcttcgaccgggtgcccagcgagtacacctaccgcatgctcttctgctcctgccaagaccaggcgtgcgctgagcgccgccggcaaaccatcctgcccagctgctcctatgaggacaaggagaagcccaactgcctggacctgcgtggcgtgtgccggactgaccacctgtgtcggtcccggctggccgacttccatgccaattgtcgagcctcctaccagacggtcaccagctgccctgcggacaattaccaggcgtgtctgggctcttatgctggcatgattgggtttgacatgacacctaactatgtggactccagccccactggcatcgtggtgtccccctggtgcagctgtcgtggcagcgggaacatggaggaggagtgtgagaagttcctcagggacttcaccgagaacccatgcctccggaacgccatccaggcctttggcaacggcacggacgtgaacgtgtccccaaaaggcccctcgttccaggccacccaggcccctcgggtggagaagacgccttctttgccagatgacctcagtgacagtaccagcttggggaccagtgtcatcaccacctgcacgtctgtccaggagcaggggctgaaggccaacaactccaaagagttaagcatgtgcttcacagagctcacgacaaatatcatcccagggagtaacaaggtgatcaaacctaactcaggccccagcagagccagaccgtcggctgccttgaccgtgctgtctgtcctgatgctgaaactggccttgtaggctgtgggaaccgagtcagaatatttttgaaagctacgcagacaagaacagccgcctgacgaaatggaaacacacacagacacacacacaccttgcaaaaaaaaaattgtttttcccaccttgtcgctgaacctgtctcctcccaggtttcttctctggagaagtttttgtaaaccaaacagacaagcaggcaggcagcctgagagctggcccaggggtcccctggcaggggaaactctggtgccggggagggcacgaggctctagaaatgcccttcactttctcctggtgtttttctctctggacccttctgaagcagagaccggacaagagcctgcagcggaagggactctgggctgtgcctgaggctggctgggggcaggacaacacagctgcttccccaggctgcccactctggggacccgctgggggctg

SEQ ID NO: 11978 - DNA, 1503 bp, Homo sapiens
  source 1..1503: mol_type = unassigned DNA
gagaatcgcaggactcgggatcttcatcgggtggactagctgggatctccgcattggatttggggctgattaccactgcttgcctattattattgttgttgttactactattatttttttttacccaagggagaaagacaaaaaaacggtgggatttatttaacatgatcttggcaaacgtcttctgcctcttcttctttctagggacaggggcagacccggtggtcagcgccaagagcaaccattgcctggatgctgccaaggcctgcaacctgaatgacaactgcaagaagctgcgctcctcctacatctccatctgcaaccgcgagatctcgcccaccgagcgctgcaaccgccgcaagtgccacaaggccctgcgccagttcttcgaccgggtgcccagcgagtacacctaccgcatgctcttctgctcctgccaagaccaggcgtgcgctgagcgccgccggcaaaccatcctgcccagctgctcctatgaggacaaggagaagcccaactgcctggacctgcgtggcgtgtgccggactgaccacctgtgtcggtcccggctggccgacttccatgccaattgtcgagcctcctaccagacggtcaccagctgccctgcggacaattaccaggcgtgtctgggctcttatgctggcatgattgggtttgacatgacacctaactatgtggactccagccccactggcatcgtggtgtccccctggtgcagctgtcgtggcagcgggaacatggaggaggagtgtgagaagttcctcagggacttcaccgagaacccatgcctccggaacgccatccaggcctttggcaacggcacggacgtgaacgtgtccccaaaaggcccctcgttccaggccacccaggcccctcgggtggagaagacgccttctttgccagatgacctcagtgacagtaccagcttggggaccagtgtcatcaccacctgcacgtctgtccaggagcaggggctgaaggccaacaactccaaagagttaagcatgtgcttcacagagctcacgacaaatatcatcccagggagtaacaaggtgatcaaacctaactcaggccccagcagagccagaccgtcggctgccttgaccgtgctgtctgtcctgatgctgaaactggccttgtaggctgtgggaaccgagtcagaatatttttgaaagctacgcagacaagaacagccgcctgacgaaatggaaacacacacagacacacacacaccttgcaaaaaaaaaattgtttttcccaccttgtcgctgaacctgtctcctcccaggtttcttctctggagaagtttttgtaaaccaaacagacaagcaggcaggcagcctgagagctggcccaggggtcccctggcaggggaaactctggtgccggggagggcacgaggctctagaaatgcccttcactttctcctggtgtttttctctctggacccttctgaagcagagaccggacaagagcctgcagcgg

SEQ ID NO: 11979 - DNA, 874 bp, Homo sapiens
  source 1..874: mol_type = unassigned DNA
gccgtagccgggggagccagtcagtttccggccaaggcagcagggagaaagacaaaaaaacggtgggatttatttaacatgatcttggcaaacgtcttctgcctcttcttctttctagacgagaccctccgctctttggccagcccttcctccctgcagggccccgagctccacggctggcgccccccagtggactgtgtccgggccaatgagctgtgtgccgccgaatccaactgcagctctcgctaccgcactctgcggcagtgcctggcaggccgcgaccgcaacaccatgctggccaacaaggagtgccaggcggccttggaggtcttgcaggagagcccgctgtacgactgccgctgcaagcggggcatgaagaaggagctgcagtgtctgcagatctactggagcatccacctggggctgaccgagggtgaggagttctacgaagcctccccctatgagccggtgacctcccgcctctcggacatcttcaggcttgcttcaatcttctcagggacaggggcagacccggtggtcagcgccaagagcaaccattgcctggatgctgccaaggcctgcaacctgaatgacaactgcaagaagctgcgctcctcctacatctccatctgcaaccgcgagatctcgcccaccgagcgctgcaaccgccgcaagtgccacaaggccctgcgccagttcttcgaccgggtgcccagcgagtacacctaccgcatgctcttctgctcctgccaagaccaggcgtgcgctgagcgccgccggcaaaccatcctgcccagctgctcctatgaggacaaggagaagcccaactgcctggacctgcgtggcgtgtgccggactgaccacctgtgtcggt

SEQ ID NO: 11980 - DNA, 4921 bp, Homo sapiens
  source 1..4921: mol_type = unassigned DNA
aagacacacgcacgcagagacacacggtcactggaattccattagaaaaaagtgagccgagcaagggttagcgggagaagatttttttgaatcttgtcttcgtcttggtgcgaaagaagcgactccagtctctcgtcctcgaagctccgactggattgttcttgggcgctgacacccgtctgtggatttcttttctatttgcattttattccgaccccctccctcgccgcttccttccagcccttcactcgcaaatcgcctctctccccacctccccaggcccctcctgggaagcgcaggggaattggacccgcggggactcacgccttcccggacgattggaggggagggctgaccccaggactgggctgttggcttagaaagccgatacacagatacgcgtatatttgattgtagcgggcaaggggggcgtcgagaggcagcagcccatcgcccgcctctcaccccaccccctccagccagaggcgagaatcgcaggactcgggatcttcatcgggtggactagctgggatctccgcattggatttggggctgattaccactgcttgcctattattattgttgttgttactactattatttttttttacccaagggagaaagacaaaaaaacggtgggatttatttaacatgatcttggcaaacgtcttctgcctcttcttctttctagacgagaccctccgctctttggccagcccttcctccctgcagggccccgagctccacggctggcgccccccagtggactgtgtccgggccaatgagctgtgtgccgccgaatccaactgcagctctcgctaccgcactctgcggcagtgcctggcaggccgcgaccgcaacaccatgctggccaacaaggagtgccaggcggccttggaggtcttgcaggagagcccgctgtacgactgccgctgcaagcggggcatgaagaaggagctgcagtgtctgcagatctactggagcatccacctggggctgaccgagggtgaggagttctacgaagcctccccctatgagccggtgacctcccgcctctcggacatcttcaggcttgcttcaatcttctcagggacaggggcagacccggtggtcagcgccaagagcaaccattgcctggatgctgccaaggcctgcaacctgaatgacaactgcaagaagctgcgctcctcctacatctccatctgcaaccgcgagatctcgcccaccgagcgctgcaaccgccgcaagtgccacaaggccctgcgccagttcttcgaccgggtgcccagcgagtacacctaccgcatgctcttctgctcctgccaagaccaggcgtgcgctgagcgccgccggcaaaccatcctgcccagctgctcctatgaggacaaggagaagcccaactgcctggacctgcgtggcgtgtgccggactgaccacctgtgtcggtcccggctggccgacttccatgccaattgtcgagcctcctaccagacggtcaccagctgccctgcggacaattaccaggcgtgtctgggctcttatgctggcatgattgggtttgacatgacacctaactatgtggactccagccccactggcatcgtggtgtccccctggtgcagctgtcgtggcagcgggaacatggaggaggagtgtgagaagttcctcagggacttcaccgagaacccatgcctccggaacgccatccaggcctttggcaacggcacggacgtgaacgtgtccccaaaaggcccctcgttccaggccacccaggcccctcgggtggagaagacgccttctttgccagatgacctcagtgacagtaccagcttggggaccagtgtcatcaccacctgcacgtctgtccaggagcaggggctgaaggccaacaactccaaagagttaagcatgtgcttcacagagctcacgacaaatatcatcccagggagtaacaaggtgatcaaacctaactcaggccccagcagagccagaccgtcggctgccttgaccgtgctgtctgtcctgatgctgaaactggccttgtaggctgtgggaaccgagtcagaatatttttgaaagctacgcagacaagaacagccgcctgacgaaatggaaacacacacagacacacacacaccttgcaaaaaaaaaattgtttttcccaccttgtcgctgaacctgtctcctcccaggtttcttctctggagaagtttttgtaaaccaaacagacaagcaggcaggcagcctgagagctggcccaggggtcccctggcaggggaaactctggtgccggggagggcacgaggctctagaaatgcccttcactttctcctggtgtttttctctctggacccttctgaagcagagaccggacaagagcctgcagcggaagggactctgggctgtgcctgaggctggctgggggcaggacaacacagctgcttccccaggctgcccactctggggacccgctgggggctggcagagggcatcggtcagcggggcagcggggctggccatgagggtccaccttcagccctttggcttcaaggatggagatggttttgccctccctctctgccctcgggtggggctggtgggtctgcagctggtgtgggaacttccccacggatggcggtggagggggttcgcaccgtgctgggctccccctgactgtagcacggagtgttggggctgggggccagctccaggagggcttgagagctcagcctgcctgggagagcccttgtggcgaggcattaaaacttgggcaccagcttctttctcggtggcagaaattttgaagtcagagagaaacggtcctttgttggcttctttgctttctcgtgggtcctttggcaggcctccctttggggagagggaggggagagaccacagccgggtgtgtgtctgcagcaccgtgggccctcaagctttcctgctgtcttctccctcctcctcctttcccctttctctttcctcatttcctagacgtacgtcaactgtatgtacataccggggctcctctcctaacatatatgtatatacacatccatatacatatattgtgtggtttcccctttctttcctttttttaagcaacaaaactatggaaataataccccaacagatgagcgaaaatgtattattgtaaagtttattttttttaatactgttgtctataatggggaaaaaggacattggccccgcagtgccctgccccagtcagcctggctgggctctggtgggggctcctgatccgcatccaagcttaaccaaggctccaataaacgtgctaggaagcaagctgcctctgcctcggtcccgtggggttttgcccccattttgttcttggtccagtgttacctgcgtaagtggagctcccagtgggctggggaaatgtgtgtccgtgtgtgtgcctgtgtgcatgtgtgtgcatccatgtgtctcacccatgtgtccacattgtgtgtagatggagctctcttaggagctggtttgacactgggggcgggatctgagggtccacgctgtgctgagcctggtgggctgttctgttccctctttgctcacttctccagttggcgcaaatgcctgtggctcccaggctggaagagaatgcagtggacgtggacgtggtggggagccacagcttggcatcacacgttgggaatgttttattgtcaggctgtctgggtggccctgttagtcttacatagagcaaagtggtatgtccctctgggactcctggcttatttgagatgtgtgattgtgagtgcagtgacctggccttttgggtcccaccagagaagaaggacatgactgtgcatgttctggggtcatggtctgaaagcataagtattttttgggtctccctctattccttcctttcctgtttctccatttgctacccaggccccacttggacactaggcctgccatagtctccaagagagattctccccagagaggaccaggagaatgcctgctggccaagtgtgtgtgtgtccatgtatgtgagcatgtgtacatgtgtgtgcggtcgtgtgcaggctcgcacatgttcacgtgcacgtgtgaatatatacccatggcaggagggagaatggaagactggtaggcgagaagatgtttctactgtcagcctggccttcagggctgcatgtgagcccatcccatttcaactggacaataggatgcagttttcccatctcccaatcgcaggtcccctcaatggcttttgcttctggttgtatatgtgtgagcagcatccgttcacagcgtttatcactgtggtgtattgccttccagcctctgcatggaaggggtacagtgagccagccaggtctctgtccagccattgcgggtagacgtggtcatggcatccacttaggaatccgtgttctttgcaaacagcaaagaccatttaacttaaaaagtactttactggaaggctatgggagaaggtggctcacggaatttgtgggaggtggggggaccaggggaggcgagggcagggactggagggcatctgaggggctggaaggcaggatgtacagggtcagcattctgctgccaaccattgcccatctggctgaactgggccttgtgcctgccctctgccatacttgagtgtgagagagaggatatatatgtcatgtctggtatccctaataggaggtaagcccttaggctacatcatgggggagagaaaatttcccaagaggaaactgaggtgccattatgaaggaggagtggatactagctagctttactctgccctcaaatgtctccctatccaagtatcacatggctgaaattttaccattaggtattcattcctttggttgagatgattcctatttgtgattctctcaaaatatgcaaatcgaactagaagaataaattgttgctatcttaa

SEQ ID NO: 11981 - DNA, 2039 bp, Homo sapiens
  source 1..2039: mol_type = unassigned DNA
gcggctcccggggcgccggccctcccccgcccccacccccgcggtccctcggaccagcgctggaggcgcgtggtgtggacgcgcgcttcggagttggagggcggcgcccaggaccctggtgggagagtgtgtgcgtcgcgctggagggcgggaggcgggggcgggaggtgccggtcgagggagccccgctctcagagctccaggggaggagcgaggggagcgcggagcccggcgcctacagctcgccatggtgcgccccctgaacccgcgaccgctgccgcccgtagtcctgatgttgctgctgctgctgccgccgtcgccgctgcctctcgcagccggagacccccttcccacagaaagccgactcatgaacagctgtctccaggccaggaggaagtgccaggctgatcccacctgcagtgctgcctaccaccacctggattcctgcacctctagcataagcaccccactgccctcagaggagccttcggtccctgctgactgcctggaggcagcacagcaactcaggaacagctctctgataggctgcatgtgccaccggcgcatgaagaaccaggttgcctgcttggacatctattggaccgttcaccgtgcccgcagccttggtaactatgagctggatgtctccccctatgaagacacagtgaccagcaaaccctggaaaatgaatctcagcaaactgaacatgctcaaaccagactcagacctctgcctcaagtttgccatgctgtgtactctcaatgacaagtgtgaccggctgcgcaaggcctacggggaggcgtgctccgggccccactgccagcgccacgtctgcctcaggcagctgctcactttcttcgagaaggccgccgagccccacgcgcagggcctgctactgtgcccatgtgcccccaacgaccggggctgcggggagcgccggcgcaacaccatcgcccccaactgcgcgctgccgcctgtggcccccaactgcctggagctgcggcgcctctgcttctccgacccgctttgcagatcacgcctggtggatttccagacccactgccatcccatggacatcctaggaacttgtgcaacagagcagtccagatgtctacgagcatacctggggctgattgggactgccatgacccccaactttgtcagcaatgtcaacaccagtgttgccttaagctgcacctgccgaggcagtggcaacctgcaggaggagtgtgaaatgctggaagggttcttctcccacaacccctgcctcacggaggccattgcagctaagatgcgttttcacagccaactcttctcccaggactggccacaccctacctttgctgtgatggcacaccagaatgaaaaccctgctgtgaggccacagccctgggtgccctctcttttctcctgcacgcttcccttgattctgctcctgagcctatggtagctggacttccccagggccctcttcccctccaccacacccaggtggacttgcagcccacaaggggtgaggaaaggacagcagcaggaaggaggtgcagtgcgcagatgagggcacaggagaagctaagggttatgacctccagatccttactggtccagtcctcattccctccaccccatctccacttctgattcatgctgcccctccttggtggccacaatttagccatgtcatctggtggtgaccagctccaccaagcccctttctgagcccttcctcttgactaccaggatcaccagaatctaataagttagccattctctattgcattccagattagggttagggtagggaggactgggtgttctgaggcagcctagaaagtcattctcctttgtgaagaaggctcctgccccctcgtctcctcctctgagtggaggatggaaaactactgcctgcactgccctgtccccggatcctgccgaacatctgggcatcaggagctggagcctgtgggccttgctttattcctattattgtcctaaagtctctctgggctcttggatcatgattaaacctttgacttaag

SEQ ID NO: 11982 - DNA, 1837 bp, Homo sapiens
  source 1..1837: mol_type = unassigned DNA
cccaggaccctggtgggagagtgtgtgcgtcgcgctggagggcgggaggcgggggcgggaggtgccggtcgagggagccccgctctcagagctccaggggaggagcgaggggagcgcggagcccggcgcctacagctcgccatggtgcgccccctgaacccgcgaccgctgccgcccgtagtcctgatgttgctgctgctgctgccgccgtcgccgctgcctctcgcagccggagacccccttcccacagaaagccgactcatgaacagctgtctccaggccaggaggaagtgccaggctgatcccacctgcagtgctgcctaccaccacctggattcctgcacctctagcataagcaccccactgccctcagaggagccttcggtccctgctgactgcctggaggcagcacagcaactcaggaacagctctctgataggctgcatgtgccaccggcgcatgaagaaccaggttgcctgcttggacatctattggaccgttcaccgtgcccgcagccttgactcagacctctgcctcaagtttgccatgctgtgtactctcaatgacaagtgtgaccggctgcgcaaggcctacggggaggcgtgctccgggccccactgccagcgccacgtctgcctcaggcagctgctcactttcttcgagaaggccgccgagccccacgcgcagggcctgctactgtgcccatgtgcccccaacgaccggggctgcggggagcgccggcgcaacaccatcgcccccaactgcgcgctgccgcctgtggcccccaactgcctggagctgcggcgcctctgcttctccgacccgctttgcagatcacgcctggtggatttccagacccactgccatcccatggacatcctaggaacttgtgcaacagagcagtccagatgtctacgagcatacctggggctgattgggactgccatgacccccaactttgtcagcaatgtcaacaccagtgttgccttaagctgcacctgccgaggcagtggcaacctgcaggaggagtgtgaaatgctggaagggttcttctcccacaacccctgcctcacggaggccattgcagctaagatgcgttttcacagccaactcttctcccaggactggccacaccctacctttgctgtgatggcacaccagaatgaaaaccctgctgtgaggccacagccctgggtgccctctcttttctcctgcacgcttcccttgattctgctcctgagcctatggtagctggacttccccagggccctcttcccctccaccacacccaggtggacttgcagcccacaaggggtgaggaaaggacagcagcaggaaggaggtgcagtgcgcagatgagggcacaggagaagctaagggttatgacctccagatccttactggtccagtcctcattccctccaccccatctccacttctgattcatgctgcccctccttggtggccacaatttagccatgtcatctggtggtgaccagctccaccaagcccctttctgagcccttcctcttgactaccaggatcaccagaatctaataagttagccattctctattgcattccagattagggttagggtagggaggactgggtgttctgaggcagcctagaaagtcattctcctttgtgaagaaggctcctgccccctcgtctcctcctctgagtggaggatggaaaactactgcctgcactgccctgtccccggatcctgccgaacatctgggcatcaggagctggagcctgtgggccttgctttattcctattattgtcctaaagtctctctgggctcttggatcatgattaaacctttgactt

SEQ ID NO: 11983 - DNA, 4835 bp, Homo sapiens
  source 1..4835: mol_type = unassigned DNA
gttcctaccggcctggtccagcggacagcggctgcagcgggggcgccggctgggagctgtttttggaaggaagaaagatggaaagcggtgcagttctgctggaatccaaatcctccccatttaacctactgcatgagatgcatgagcttcgcctcctgggtcacctgtgtgacgtgacagtcagcgtggagtatcagggtgtccgcaaagacttcatggcccacaaggcagtgctggctgccaccagcaagttttttaaggaagtgttccttaatgagaagagtgtggatggtactaggactaatgtctacttaaatgaagtgcaggttgctgactttgcttcatttcttgagtttgtctacactgcaaaggtacaggtggaagaagatcgggtgcagcgaatgctggaagtggctgaaaagctgaaatgtttggatttatcagaaacttgttttcaattaaagaaacagatgttagagtcagtacttttggagttgcaaaatttctcagagtctcaggaggtggaggtgagcagtggctcccaagttagtgctgctcctgcccccagggcaagtgtggccaccgatggccctcaccccagtggtctcacggattccttggactacccaggagagagagccagcaatggcatgtcttcagatttgccaccgaagaagtccaaggacaaactagacaagaagaaagaggtagttaaacctccctaccctaaaatcaggagagctagtggaaggctggctgggaggaaggtctttgtggagatccctaaaaagaaatatacgagaagactccgagagcagcagaaaactgctgagggtgatgtgggggactacaggtgtccccaggaccaaagcccggacagggtgggcacggagatggagcaggtttccaaaaatgagggttgccaggcaggtgctgagttggaggaattgtcaaagaaagcagggccggaggaggaagaggaggaggaggaggaggacgaagaaggggagaagaagaagagcaactttaagtgcagcatttgcgagaaggcgtttctgtatgagaagagcttcctgaagcacagcaagcaccgccacggcgtggccaccgaggtggtgtaccgctgcgacacctgcggccagaccttcgccaaccgctgcaacctgaagagccaccagcgccacgtgcacagcagcgagcgccatttcccatgcgagctgtgcgggaagaagttcaagcgcaagaaggacgtgaagcggcacgtgctgcaggtgcatgagggcggcggcgagcggcaccgctgcggccagtgcggcaagggcctgagttccaagacagcgctgcggctgcacgagcgcacacacacgggagaccggccctacggctgcaccgagtgcggcgccaggttctcgcagccgtccgcgctcaagacgcacatgagaattcatacaggggaaaaaccttttgtctgtgatgaatgtggtgcaagattcactcagaaccacatgctgatttatcataaaaggtgtcacacaggtgaaagaccttttatgtgtgaaacatgtggcaagagttttgcttctaaggagtacttaaaacaccacaatagaatccatactggatccaaaccctttaaatgtgaagtatgtttcaggacttttgcccagcggaattcactgtaccagcatattaaagtccacacaggggagcgtccctactgctgtgaccagtgcggcaagcagttcacccagctcaacgccctccagcgccaccgccgcatccacacaggggagaggccattcatgtgcaatgcgtgcggacggacattcaccgacaagtccactcttcggcggcacacctcaatacacgataagaatactccatggaagtctttccttgtcattgtagatggctcgcccaagaacgatgacggacacaagactgaacagcctgacgaagagtatgtgtcatccaagctttcggataaattgctgtcttttgcagaaaatggccatttccacaacctggctgcagtccaagacactgtacctaccatgcaggagaacagttctgctgacacagcctgcaaggcagatgactccgtggtgtcccaggacaccctcctggccaccaccatcagtgagcttagcgagctgaccccacagacagactcgatgcccacacagcttcactctttgagcaacatggaataagagcttcaagcagttcccatcctgttagtctgcgtgtgtggtagctgaactcaagatgatgtggggctaagaaaaataattgtccatgtgcaaagatgtgggcaagaatggcctctgcagattttcctgaacttctgctaacttgcacggctttatcacagcatttttaaagctttccctcaaaaatcctgatctgcatgatctcagctactttattgacaaaaaggcagtgaacataacctcacttaattctggtgtagggtgtatgtgctaatcgttctaattcttgattacctagtttatagataactgctggtcttaattgcagagtacagagaactgaaccagctcctgatattgtagttagcagtcttcctggcttctcactctgccttatatttccatgtgggtttacttctctcataactactttcaaggtatttttcttccaagctgaaataaaactggggccacatattttcagtcatttcttccctgttgaattgaagcaaatcagattttctgtggggaccctcaaatgcaactgaagaaatagattgttgcattcattcctccccaccccccatttgtaggcagtaaacaaagtatgactgacagattgaacacctgcaaaactgctagcgtaatctcagcacatacgcagctaggaagtttgtcataaaatcaacttagaaatgagatgaggctgttcagtttgtcttaaaaaaatcagattaggtaaaagctgtcctaccaaagagtctagcaaaacaatatagtatttttttgcagaggcatgaaaaattaagacgctttagagtacttgaaagttgtgtagtcattttatttgcaaaatgaggtgactgtggcaaattatagaacacagagtattattacttttgccaggtttttctgacttgatttctgtaatttccagaaacccagacttctcatttccacacctagagatggaaacaggcaagtaactgacatgtctatttccttgggagcatgtgagaacatagcagtagggaccaaaagtctcagcacacttacctccgattatgccttaaagagttgattgtgaagaaccagtaactttgtcccaaatgcttctttggctgtttcatgcaggacttaattattgcttttaaaaattcacaatgaaaagacgattctgctgtatttgttaaacgttgacatttggttctagggccttgagtatgtgccacgtgcttgtgaaatgctatgattcacatgtaacatttaaacattaatttaaaaagggaaccttggagaattcttttgttcactagttccttttttctctacatttttaatttattaaacttgctgtgaaaacactttgattttctaagaggaaggtactttaagttccagaatgaacatgtagctgcactatgccagaaattaatgagggaagactttcttcctaagtgcttatgttttaacttatgttagtgaaaccactacaaggtgtttcaggcgctgataacatgcttcacacctgcccttggaggtcacagtactaatttacttcaaatttagttatgacagtgtcactgtatcctagttatgtttacagcacaaataaataatgactgtcatacatccagaggagaccgaacctgcccagctgatgtactgttttatggaataaagtcacttgatcagaaggaattgaaacaatagatcattttgttacctactggagggatttttgtcttgaatttgtttccttagaaattctacaaaaaaatgttgttaataaatgtctgctttgtaaaagcagttttgcaattttttaaagatctatttctgttataatttaggttctgcagaaatatgattcttaattgaaacatataatttgcttaattacgtgaataatgaaatgtaaaatccgggtccataagcctttatttcatacagtcctaggattaagctgtttaactgcttggatcccagttggtctctggcagtgggatcctggagaggagaaatcctggcctctgctcatgcgcaggccacaaccgggctggaagtgcggttgagctctctgccactttcttcaatgtaaaaagtaggcatcaaagatacgacttctactatatacatttctctgtccctgagaacagagaaacgtaaccctgtaggggactggttacagaggacctcctggagcatctgccccattcctccaagtccaagcacagccatgctgagtggaagcgaggccaccatctgagtggattggtcccaagtgtgtaatgaggaaagtggccaggtgccggcacagtgcctctcccagagcctcaagaagggccatttaggagcttgcttcaaccattttccaaccattttctgtgaaatgctgtcagcccaaactccaaagggatgtgcagcctttcgttttaccaaattctttgctgtcgtttggaaaaaatgggccatgtggtggagacctttatttaaggtgatttttacagaaatgtgattttgctgtaggtgattatccaaacaagtaaatttgagtgtataatttaatttttaacctgttaaataaaccttgtccctccaaggagttcatttttgggaaac

SEQ ID NO: 11984 - DNA, 4740 bp, Homo sapiens
  source 1..4740: mol_type = unassigned DNA
atggaaagcggtgcagttctgctggaatccaaatcctccccatttaacctactgcatgagatgcatgagcttcgcctcctgggtcacctgtgtgacgtgacagtcagcgtggagtatcagggtgtccgcaaagacttcatggcccacaaggcagtgctggctgccaccagcaagttttttaaggaagtgttccttaatgagaagagtgtggatggtactaggactaatgtctacttaaatgaagtgcaggttgctgactttgcttcatttcttgagtttgtctacactgcaaaggtacaggtggaagaagatcgggtgcagcgaatgctggaagtggctgaaaagctgaaatgtttggatttatcagaaacttgttttcaattaaagaaacagatgttagagtcagtacttttggagttgcaaaatttctcagagtctcaggaggtggaggtgagcagtggctcccaagttagtgctgctcctgcccccagggcaagtgtggccaccgatggccctcaccccagtggtctcacggattccttggactacccaggagagagagccagcaatggcatgtcttcagatttgccaccgaagaagtccaaggacaaactagacaagaagaaagaggtagttaaacctccctaccctaaaatcaggagagctagtggaaggctggctgggaggaaggtctttgtggagatccctaaaaagaaatatacgagaagactccgagagcagcagaaaactgctgagggtgatgtgggggactacaggtgtccccaggaccaaagcccggacagggtgggcacggagatggagcaggtttccaaaaatgagggttgccaggcaggtgctgagttggaggaattgtcaaagaaagcagggccggaggaggaagaggaggaggaggaggaggacgaagaaggggagaagaagaagagcaactttaagtgcagcatttgcgagaaggcgtttctgtatgagaagagcttcctgaagcacagcaagcaccgccacggcgtggccaccgaggtggtgtaccgctgcgacacctgcggccagaccttcgccaaccgctgcaacctgaagagccaccagcgccacgtgcacagcagcgagcgccatttcccatgcgagctgtgcgggaagaagttcaagcgcaagaaggacgtgaagcggcacgtgctgcaggtgcatgagggcggcggcgagcggcaccgctgcggccagtgcggcaagggcctgagttccaagacagcgctgcggctgcacgagcgcacacacacgggagaccggccctacggctgcaccgagtgcggcgccaggttctcgcagccgtccgcgctcaagacgcacatgagaattcatacaggggaaaaaccttttgtctgtgatgaatgtggtgcaagattcactcagaaccacatgctgatttatcataaaaggtgtcacacaggtgaaagaccttttatgtgtgaaacatgtggcaagagttttgcttctaaggagtacttaaaacaccacaatagaatccatactggatccaaaccctttaaatgtgaagtatgtttcaggacttttgcccagcggaattcactgtaccagcatattaaagtccacacaggggagcgtccctactgctgtgaccagtgcggcaagcagttcacccagctcaacgccctccagcgccaccgccgcatccacacaggggagaggccattcatgtgcaatgcgtgcggacggacattcaccgacaagtccactcttcggcggcacacctcaatacacgataagaatactccatggaagtctttccttgtcattgtagatggctcgcccaagaacgatgacggacacaagactgaacagcctgacgaagagtatgtgtcatccaagctttcggataaattgctgtcttttgcagaaaatggccatttccacaacctggctgcagtccaagacactgtacctaccatgcaggagaacagttctgctgacacagcctgcaaggcagatgactccgtggtgtcccaggacaccctcctggccaccaccatcagtgagcttagcgagctgaccccacagacagactcgatgcccacacagcttcactctttgagcaacatggaataagagcttcaagcagttcccatcctgttagtctgcgtgtgtggtagctgaactcaagatgatgtggggctaagaaaaataattgtccatgtgcaaagatgtgggcaagaatggcctctgcagattttcctgaacttctgctaacttgcacggctttatcacagcatttttaaagctttccctcaaaaatcctgatctgcatgatctcagctactttattgacaaaaaggcagtgaacataacctcacttaattctggtgtagggtgtatgtgctaatcgttctaattcttgattacctagtttatagataactgctggtcttaattgcagagtacagagaactgaaccagctcctgatattgtagttagcagtcttcctggcttctcactctgccttatatttccatgtgggtttacttctctcataactactttcaaggtatttttcttccaagctgaaataaaactggggccacatattttcagtcatttcttccctgttgaattgaagcaaatcagattttctgtggggaccctcaaatgcaactgaagaaatagattgttgcattcattcctccccaccccccatttgtaggcagtaaacaaagtatgactgacagattgaacacctgcaaaactgctagcgtaatctcagcacatacgcagctaggaagtttgtcataaaatcaacttagaaatgagatgaggctgttcagtttgtcttaaaaaaatcagattaggtaaaagctgtcctaccaaagagtctagcaaaacaatatagtatttttttgcagaggcatgaaaaattaagacgctttagagtacttgaaagttgtgtagtcattttatttgcaaaatgaggtgactgtggcaaattatagaacacagagtattattacttttgccaggtttttctgacttgatttctgtaatttccagaaacccagacttctcatttccacacctagagatggaaacaggcaagtaactgacatgtctatttccttgggagcatgtgagaacatagcagtagggaccaaaagtctcagcacacttacctccgattatgccttaaagagttgattgtgaagaaccagtaactttgtcccaaatgcttctttggctgtttcatgcaggacttaattattgcttttaaaaattcacaatgaaaagacgattctgctgtatttgttaaacgttgacatttggttctagggccttgagtatgtgccacgtgcttgtgaaatgctatgattcacatgtaacatttaaacattaatttaaaaagggaaccttggagaattcttttgttcactagttccttttttctctacatttttaatttattaaacttgctgtgaaaacactttgattttctaagaggaaggtactttaagttccagaatgaacatgtagctgcactatgccagaaattaatgagggaagactttcttcctaagtgcttatgttttaacttatgttagtgaaaccactacaaggtgtttcaggcgctgataacatgcttcacacctgcccttggaggtcacagtactaatttacttcaaatttagttatgacagtgtcactgtatcctagttatgtttacagcacaaataaataatgactgtcatacatccagaggagaccgaacctgcccagctgatgtactgttttatggaataaagtcacttgatcagaaggaattgaaacaatagatcattttgttacctactggagggatttttgtcttgaatttgtttccttagaaattctacaaaaaaatgttgttaataaatgtctgctttgtaaaagcagttttgcaattttttaaagatctatttctgttataatttaggttctgcagaaatatgattcttaattgaaacatataatttgcttaattacgtgaataatgaaatgtaaaatccgggtccataagcctttatttcatacagtcctaggattaagctgtttaactgcttggatcccagttggtctctggcagtgggatcctggagaggagaaatcctggcctctgctcatgcgcaggccacaaccgggctggaagtgcggttgagctctctgccactttcttcaatgtaaaaagtaggcatcaaagatacgacttctactatatacatttctctgtccctgagaacagagaaacgtaaccctgtaggggactggttacagaggacctcctggagcatctgccccattcctccaagtccaagcacagccatgctgagtggaagcgaggccaccatctgagtggattggtcccaagtgtgtaatgaggaaagtggccaggtgccggcacagtgcctctcccagagcctcaagaagggccatttaggagcttgcttcaaccattttccaaccattttctgtgaaatgctgtcagcccaaactccaaagggatgtgcagcctttcgttttaccaaattctttgctgtcgtttggaaaaaatgggccatgtggtggagacctttatttaaggtgatttttacagaaatgtgattttgctgtaggtgattatccaaacaagtaaatttgagtgtataatttaatttttaacctgttaaataaaccttgtccctccaagg

SEQ ID NO: 11985 - DNA, 795 bp, Homo sapiens
  source 1..795: mol_type = unassigned DNA
ggacctgcgcgtctcggggatgcgggagcgggggcagggggcggcccgagggcctgatccacgcggccccggatgcccgcgtcgggaggcggcgcgtcgggccgaggaggggcttctctgtggctgcagtagtttgttctctgggtcgtctttggagtggccgagcggcgtccgggcgctggggcggccaagtggcgcgggaagggtgggaggtgccgtgagggcggcgaggacagcggcggatttaagccccactggaaaccccggcccttgtggccgtggactgggctgcgggtagcagcgtctcctggaagggctctggccccgtgagcctcggggattcaggggccgccgacgttggtgcagatgccgggcgcactgggaggcggccggaatgccaatgagattcggcggatacgcagctgtcaccggccgcagactgccctgtcgccacctccagtgcctgcactccagtagccaagcaacataggaaatcgcgctcagaacccactttgttgattgagaaatcagacacgttgaatccgaggtgacatctgtggtctggccgaaggaggctagaaggaaggcatgtgctttggatggatggaaacaggaatcaaagaggaagctgtttttggaaggaagaaagatggaaagcggtgcagttctgctggaatccaaatcctccccatttaacctactgcatgagatgcatgagcttcgcctcctgggtcacctgtgtgacgtgacagtcagcgtggagtatcagggtgtccgcaaagacttcatggccca

SEQ ID NO: 11986 - DNA, 951 bp, Homo sapiens
  source 1..951: mol_type = unassigned DNA
gttcctaccggcctggtccagcggacagcggctgcagcgggggcgccggctgggaggtgaaagaccttttatgtgtgaaacatgtggcaagagttttgcttctaaggagtacttaaaacaccacaatagaatccatactggatccaaaccctttaaatgtgaagtatgtttcaggacttttgcccagcggaattcactgtaccagcatattaaagtccacacaggggagcgtccctactgctgtgaccagtgcggcaagcagttcacccagctcaacgccctccagcgccaccgccgcatccacacaggggagaggccattcatgtgcaatgcgtgcggacggacattcaccgacaagtccactcttcggcggcacacctcaatacacgataagaatactccatggaagtctttccttgtcattgtagatggctcgcccaagaacgatgacggacacaagactgaacagcctgacgaagagtatgtgtcatccaagctttcggataaattgctgtcttttgcagaaaatggccatttccacaacctggctgcagtccaagacactgtacctaccatgcaggagaacagttctgctgacacagcctgcaaggcagatgactccgtggtgtcccaggacaccctcctggccaccaccatcagtgagcttagcgagctgaccccacagacagactcgatgcccacacagcttcactctttgagcaacatggaataagagcttcaagcagttcccatcctgttagtctgcgtgtgtggtagctgaactcaagatgatgtggggctaagaaaaataattgtccatgtgcaaagatgtgggcaagaatggcctctgcagattttcctgaacttctgctaacttgcacggctttatcacagcatttttaaagctttccctcaaaaatcctgatctgcatgatctcagctactttattg

SEQ ID NO: 11987 - DNA, 989 bp, Homo sapiens
  source 1..989: mol_type = unassigned DNA
agggtgctacgccacgcccagccgggccggccgttcctaccggcctggtccagcggacagcggctgcagcgggggcgccggctgggagaattcatacaggggaaaaaccttttgtctgtgatgaatgtggtgcaagattcactcagaaccacatgctgatttatcataaaaggtgtcacacaggtgaaagaccttttatgtgtgaaacatgtggcaagagttttgcttctaaggagtacttaaaacaccacaatagaatccatactggatccaaaccctttaaatgtgaagtatgtttcaggacttttgcccagcggaattcactgtaccagcatattaaagtccacacaggggagcgtccctactgctgtgaccagtgcggcaagcagttcacccagctcaacgccctccagcgccaccgccgcatccacacaggggagaggccattcatgtgcaatgcgtgcggacggacattcaccgacaagtccactcttcggcggcacacctcaatacacgataagaatactccatggaagtctttccttgtcattgtagatggctcgcccaagaacgatgacggacacaagactgaacagcctgacgaagagtatgtgtcatccaagctttcggataaattgctgtcttttgcagaaaatggccatttccacaacctggctgcagtccaagacactgtacctaccatgcaggagaacagttctgctgacacagcctgcaaggcagatgactccgtggtgtcccaggacaccctcctggccaccaccatcagtgagcttagcgagctgaccccacagacagactcgatgcccacacagcttcactctttgagcaacatggaataagagcttcaagcagttcccatcctgttagtctgcgtgtgtggtagctgaactcaagatgatgtggggctaagaaaaataattgtccatgtgcaaagatgtgggcaagaatggcctctgcagattttcctg

SEQ ID NO: 11988 - DNA, 1495 bp, Homo sapiens
  source 1..1495: mol_type = unassigned DNA
atctttggtccagtgcggtggcggcggcggcggtggcggcggcgactgctgcggtgaaggaggaggaggagccgagcgggcgctggcaccgaggcctgaccatggacgaggaatacgatgtgatcgtgctggggaccggtctcaccgaatgcatcctgtcgggcatcatgtctgtgaacgggaagaaggtgctgcacatggaccggaacccctactacgggggcgagagctcctccatcacacccctggaggagctgtataagcgttttcagttgctggaggggccccctgagtcgatgggccgaggccgagactggaatgttgacctgattcccaaattcctcatggctaacgggcagctggtaaagatgctactgtatacagaggtgactcgctacctggacttcaaggtggtggagggcagctttgtctacaaggggggcaagatctacaaagtgccgtccactgagactgaggccttggcttccaatctgatgggcatgtttgagaatgaccccaagacctttgagggcgttgacccccagactaccagcatgcgtgacgtctaccggaagtttgatctgggccaggatgtcatcgatttcactggccatgccctggcgctctaccgcactgatgactacctggaccagccctgccttgagaccgtcaaccgcatcaagttgtacagtgagtccctggcccggtatggcaagagcccatatttatacccgctctacggcttgggcgagctgccccagggttttgcaagattgagtgccatctatggggggacatatatgctgaacaaacctgtggatgacatcatcatggagaacggcaaggtggtgggcgtgaagtctgagggagaggtggcccgctgcaagcagctgatctgtgaccccagctacatcccggaccgtgtgcggaaggctggccaggttatccgcatcatctgtatccttagccaccccatcaagaacaccaacgacgccaactcctgccaaataatcatcccccagaaccaggtcaacaggaagtcagacatctacgtgtgcatgatctcctatgcacacaacgtggcggcccagggcaagtacatagctattgccagcactactgtggagaccacggaccctgaaaaggaggtggagccggctctggagctgttggagcccattgatgatggttgtgagagccaggtgttctgttcctgctcctacgatgccaccacacactttgagacaacctgcaacgacatcaaagacatctacaaacgcatggctggcacggcctttgactttgagaacatgaagcgcaaacagaacgacgtctttggagaagctgagcagtgattgtggccgcccccagcccctgctgccccagcctgtgtctgttctcctcgagggctccagcatcctctgcttcccccaccacgttcccatcacccacctcattgatccactgaccaaatccttaaccctagcgatggctt

SEQ ID NO: 11989 - DNA, 2474 bp, Homo sapiens
  source 1..2474: mol_type = unassigned DNA
ctgggccgcagcaccggccgccggcccgccccgcccgccccgccccgcgcctctctagactctcggcgagcagcgtcgcccgcggagccgcgctggtgctgtggcccgggccctggcagccctcccgggaggcgagccggggaggcggtggcccctgccggttgcggcggggcgcgggaagaggcgggactctttgacgcggcggaggggtcgggcgacggccgacgcgccgccatctttggtccagtgcggtggcggcggcggcggtggcggcggcgactgctgcggtgaaggaggaggaggagccgagcgggcgctggcaccgaggcctgaccatggacgaggaatacgatgtgatcgtgctggggaccggtctcaccgaatgcatcctgtcgggcatcatgtctgtgaacgggaagaaggtgctgcacatggaccggaacccctactacgggggcgagagctcctccatcacacccctggaggagctgtataagcgttttcagttgctggaggggccccctgagtcgatgggccgaggccgagactggaatgttgacctgattcccaaattcctcatggctaacgggcagctggtaaagatgctactgtatacagaggtgactcgctacctggacttcaaggtggtggagggcagctttgtctacaaggggggcaagatctacaaagtgccgtccactgagactgaggccttggcttccaatctgatgggcatgtttgagaaacggcgcttccgcaagttcctggtgtttgtggcaaacttcgatgagaatgaccccaagacctttgagggcgttgacccccagactaccagcatgcgtgacgtctaccggaagtttgatctgggccaggatgtcatcgatttcactggccatgccctggcgctctaccgcactgatgactacctggaccagccctgccttgagaccgtcaaccgcatcaagttgtacagtgagtccctggcccggtatggcaagagcccatatttatacccgctctacggcttgggcgagctgccccagggttttgcaagattgagtgccatctatggggggacatatatgctgaacaaacctgtggatgacatcatcatggagaacggcaaggtggtgggcgtgaagtctgagggagaggtggcccgctgcaagcagctgatctgtgaccccagctacatcccggaccgtgtgcggaaggctggccaggttatccgcatcatctgtatccttagccaccccatcaagaacaccaacgacgccaactcctgccaaataatcatcccccagaaccaggtcaacaggaagtcagacatctacgtgtgcatgatctcctatgcacacaacgtggcggcccagggcaagtacatagctattgccagcactactgtggagaccacggaccctgaaaaggaggtggagccggctctggagctgttggagcccattgaccagaagtttgtggctatcagtgacttgtatgagcccattgatgatggttgtgagagccaggtgttctgttcctgctcctacgatgccaccacacactttgagacaacctgcaacgacatcaaagacatctacaaacgcatggctggcacggcctttgactttgagaacatgaagcgcaaacagaacgacgtctttggagaagctgagcagtgattgtggccgcccccagcccctgctgccccagcctgtgtctgttctcctcgagggctccagcatcctctgcttcccccaccacgttcccatcacccacctcattgatccactgaccaaatccttaaccctagcgatggcttgggagatggggggttggatagcatcctctttcttggcccttccttatcctaggaaaagagggttcctctccttgtgtgtgtctcttccccccacccctaattcttctgctctgtttgggaagacgtggaggaaaaggtgacttctgcccccaccgctcttacccccactgtagtggcctttggagatgcccccacctcccccccaccaactctcgcgtgttggagagaaggggccctcccagcacaaagttgcattcctcccccctaatttattctaatttattaactttgacccaccctttctgagcctgcagccttcccgtgtggcctgagggctgtcgagtgagctgccccagcccctcccagcccttgcccagcctgggggagtggggaaggcttgggcatggccccgttggaggttgatttgctgttttgtttcttgtctttgtgttctgtggtacttgctgagagaaaagaaaagtgagccaagcagaaggaggtgggaaaacggacccaaaccccagtgtgccctgccccatgcctttcctttagtggtgggaaacccttatcttgcaaagtgaatgtgtccccttccccaccctctagtgtatttcacagaaaacaaaacctcccaataaaacggttgaaacctgaa

SEQ ID NO: 11990 - DNA, 584 bp, Homo sapiens
  source 1..584: mol_type = unassigned DNA
gaagcccccggaagcctccccagaagctgttgccggtgctatgcgacctgtacagcctgcagaaccaaagatccatggtccaatataacatatcttcttcaagtatttatggggtaacatcccaaaataacacttttagatgtctctaggcaagagaaaaccttcgaacttttatttggctaattttttaggaaaggaatgtatcctgtcaggtataatgtcagtgaatggcaagaaagttcttcatatggatcgaaacccttactacggaggagagagtgcatctataacaccattggaagatttatacaaaagatttaaaataccaggatcaccacccgagtcaatggggagaggaagagactggaatgttgacttgattcccaagttccttatggctaatggtcagctggttaagatgctgctttatacagaggtaactcgctatctggattttaaagtgactgaagggagctttgtctataagggtggaaaaatctacaaggttccttccactgaagcagaagccctggcatctagcctaatgggattgtttgaaaaacgtcgcttcaggaaattcctag

SEQ ID NO: 11991 - DNA, 1680 bp, Homo sapiens
  source 1..1680: mol_type = unassigned DNA
ttcttctcttcccgtctgaggtggcggtcggtctcgccttgtcgccagctccattttcctctctttctcttcccctttccttcgcgcccaagagcgcctcccagcctcgtagggtggtcacggagcccctgcgccttttccttgctcgggtcctgcgtccgcgcctgccccgccatgaatgaggagtacgacgtgatcgtgctgggcaccggcctgacggtaacatcccaaaataacacttttagatgtctctaggcaagagaaaaccttcgaacttttatttggctaattttttaggaaaggaatgtatcctgtcaggtataatgtcagtgaatggcaagaaagttcttcatatggatcgaaacccttactacggaggagagagtgcatctataacaccattggaagatttatacaaaagatttaaaataccaggatcaccacccgagtcaatggggagaggaagagactggaatgttgacttgattcccaagttccttatggctaatggtcagctggttaagatgctgctttatacagaggtaactcgctatctggattttaaagtgactgaagggagctttgtctataagggtggaaaaatctacaaggttccttccactgaagcagaagccctggcatctagcctaatgggattgtttgaaaaacgtcgcttcaggaaattcctagtgtatgttgccaacttcgatgaaaaagatccaagaacttttgaaggcattgatcctaagaagaccacaatgcgagatgtgtataagaaatttgatttgggtcaagacgttatagattttactggtcatgctcttgcactttacagaactgatgattacttagatcaaccgtgttatgaaaccattaatagaattaaactttacagtgaatctttggcaagatatggcaaaagcccatacctttatccactctatggccttggagaactgccccaaggatttgcaaggctaagtgctatttatggaggtacctatatgctgaataaacccattgaagaaatcattgtacagaatggaaaagtaattggtgtaaaatctgaaggagaaattgctcgctgtaagcagctcatctgtgaccccagctacgtaaaagatcgggtagaaaaagtgggccaggtgatcagagttatttgcatcctcagccaccccatcaagaacaccaatgatgccaactcctgccagatcattattccacagaaccaagtcaatcgaaagtcagatatctacgtctgcatgatctcctttgcgcacaatgtagcagcacaagggaagtacattgctatagttagtacaactgtggaaaccaaggagcctgagaaggaaatcagaccagctttggagctcttggaaccaattgaacagaaatttgttagcatcagtgacctcctggtaccaaaagacttgggaacagaaagccagatctttatttcccgcacatatgatgccaccactcattttgagacaacgtgtgatgacattaaaaacatctataagaggatgacaggatcagagtttgactttgaggaaatgaagcgcaagaagaatgacatctatggggaagactaacagcagtacatgttattatgtaattaggacacatttaaaatttggcaaataatgcatataatgaaatcaatattgtaaggcctgc

SEQ ID NO: 11992 - DNA, 2266 bp, Homo sapiens
  source 1..2266: mol_type = unassigned DNA
agagtgccgggagcgcctgattggcggccctcccggcgcctgcaggccccgccccggctgcggaggctcagtcacagccctcccctcctcgctccctcccctcctctccccgcccagttcttctcttcccgtctgaggtggcggtcggtctcgccttgtcgccagctccattttcctctctttctcttcccctttccttcgcgcccaagagcgcctcccagcctcgtagggtggtcacggagcccctgcgccttttccttgctcgggtcctgcgtccgcgcctgccccgccatgaatgaggagtacgacgtgatcgtgctgggcaccggcctgacggaatgtatcctgtcaggtataatgtcagtgaatggcaagaaagttcttcatatggatcgaaacccttactacggaggagagagtgcatctataacaccattggaagatttatacaaaagatttaaaataccaggatcaccacccgagtcaatggggagaggaagagactggaatgttgacttgattcccaagttccttatggctaatggtcagctggttaagatgctgctttatacagaggtaactcgctatctggattttaaagtgactgaagggagctttgtctataagggtggaaaaatctacaaggttccttccactgaagcagaagccctggcatctagcctaatgggattgtttgaaaaacgtcgcttcaggaaattcctagtgtatgttgccaacttcgatgaaaaagatccaagaacttttgaaggcattgatcctaagaagaccacaatgcgagatgtgtataagaaatttgatttgggtcaagacgttatagattttactggtcatgctcttgcactttacagaactgatgattacttagatcaaccgtgttatgaaaccattaatagaattaaactttacagtgaatctttggcaagatatggcaaaagcccatacctttatccactctatggccttggagaactgccccaaggatttgcaaggctaagtgctatttatggaggtacctatatgctgaataaacccattgaagaaatcattgtacagaatggaaaagtaattggtgtaaaatctgaaggagaaattgctcgctgtaagcagctcatctgtgaccccagctacgtaaaagatcgggtagaaaaagtgggccaggtgatcagagttatttgcatcctcagccaccccatcaagaacaccaatgatgccaactcctgccagatcattattccacagaaccaagtcaatcgaaagtcagatttgttagcatcagtgacctcctggtaccaaaagacttgggaacagaaagccagatctttatttcccgcacatatgatgccaccactcattttgagacaacgtgtgatgacattaaaaacatctataagaggatgacaggatcagagtttgactttgaggaaatgaagcgcaagaagaatgacatctatggggaagactaacagcagtacatgttattatgtaattaggacacatttaaaatttggcaaataatgcatataatgaaatcaatattgtaaggcctgcttttgtaatgaaaatggagagaatgaagagcgctgtgccagtaaatactccccttcacctttctaattattaacttgttttcatggagtggctattcagcattggcagttaccacattctgttcaatttaaccaaactggctttttttttttctagtgaagttaaacaaacattgggataccgacacagacaacttgagacagtttttttaatcttttaatcagtgtagctatgtgctgctgctgctcaagagctggatccatacaggttgtgtgtcatctgtcctcttgaggttcaggagattctaaattgaatattccacggtttgggacagcatccggaagttttccctatgactttatattttgtattatgtcaaatgttatggcagggcccaaatagcatagccacaagtttggtttatgtgggcataaaattctaaccaaaccccagacatagggagtcatttggagaaagcctgtatgtggtgttttaacctaataaagttgatgagagagaaggggagaggaagcgaacataaagcgggtcaagtgtagtgcatcttttgtatctcaggcgtggcttcttcagtggaccaagctgcaatgcagtattgacttgacagagcctctacttctgtctcaaaatggctccaaatgatttctgtactgcaaaataaagccaaattctggaaact

SEQ ID NO: 11993 - DNA, 1408 bp, Homo sapiens
  source 1..1408: mol_type = unassigned DNA
tggcggtcggtctcgccttgtcgccagctccattttcctctctttctcttcccctttccttcgcgcccaagagcgcctcccagcctcgtagggtggtcacggagcccctgcgccttttccttgctcgggtcctgcgtccgcgcctgccccgccatgaatgaggagtacgacgtgatcgtgctgggcaccggcctgacggaatgtatcctgtcaggtataatgtcagtgaatggcaagaaagttcttcatatggatcgaaacccttactacggaggagagagtgcatctataacaccattggaagatttatacaaaagatttaaaataccaggatcaccacccgagtcaatggggagaggaagagactggaatgttgacttgattcccaagttccttatggctaatggcctaatgggattgtttgaaaaacgtcgcttcaggaaattcctagtgtatgttgccaacttcgatgaaaaagatccaagaacttttgaaggcattgatcctaagaagaccacaatgcgagatgtgtataagaaatttgatttgggtcaagacgttatagattttactggtcatgctcttgcactttacagaactgatgattacttagatcaaccgtgttatgaaaccattaatagaattaaactttacagtgaatctttggcaagatatggcaaaagcccatacctttatccactctatggccttggagaactgccccaaggatttgcaaggctaagtgctatttatggaggtacctatatgctgaataaacccattgaagaaatcattgtacagaatggaaaagtaattggtgtaaaatctgaaggagaaattgctcgctgtaagcagctcatctgtgaccccagctacgtaaaagatcgggtagaaaaagtgggccaggtgatcagagttatttgcatcctcagccaccccatcaagaacaccaatgatgccaactcctgccagatcattattccacagaaccaagtcaatcgaaagtcagatatctacgtctgcatgatctcctttgcgcacaatgtagcagcacaagggaagtacattgctatagttagtacaactgtggaaaccaaggagcctgagaaggaaatcagaccagctttggagctcttggaaccaattgaacagaaatttgttagcatcagtgacctcctggtaccaaaagacttgggaacagaaagccagatctttatttcccgcacatatgatgccaccactcattttgagacaacgtgtgatgacattaaaaacatctataagaggatgacaggatcagagtttgactttgaggaaatgaagcgcaagaagaatgacatctatggggaagactaacagcagtacatgttattatgtaattaggacacatttaaaatttggcaaataa

SEQ ID NO: 11994 - DNA, 2412 bp, Homo sapiens
  source 1..2412: mol_type = unassigned DNA
agagtgccgggagcgcctgattggcggccctcccggcgcctgcaggccccgccccggctgcggaggctcagtcacagccctcccctcctcgctccctcccctcctctccccgcccagttcttctcttcccgtctgaggtggcggtcggtctcgccttgtcgccagctccattttcctctctttctcttcccctttccttcgcgcccaagagcgcctcccagcctcgtagggtggtcacggagcccctgcgccttttccttgctcgggtcctgcgtccgcgcctgccccgccatgaatgaggagtacgacgtgatcgtgctgggcaccggcctgacggaatgtatcctgtcaggtataatgtcagtgaatggcaagaaagttcttcatatggatcgaaacccttactacggaggagagagtgcatctataacaccattggaagatttatacaaaagatttaaaataccaggatcaccacccgagtcaatggggagaggaagagactggaatgttgacttgattcccaagttccttatggctaatggtcagctggttaagatgctgctttatacagaggtaactcgctatctggattttaaagtgactgaagggagctttgtctataagggtggaaaaatctacaaggttccttccactgaagcagaagccctggcatctagcctaatgggattgtttgaaaaacgtcgcttcaggaaattcctagtgtatgttgccaacttcgatgaaaaagatccaagaacttttgaaggcattgatcctaagaagaccacaatgcgagatgtgtataagaaatttgatttgggtcaagacgttatagattttactggtcatgctcttgcactttacagaactgatgattacttagatcaaccgtgttatgaaaccattaatagaattaaactttacagtgaatctttggcaagatatggcaaaagcccatacctttatccactctatggccttggagaactgccccaaggatttgcaaggctaagtgctatttatggaggtacctatatgctgaataaacccattgaagaaatcattgtacagaatggaaaagtaattggtgtaaaatctgaaggagaaattgctcgctgtaagcagctcatctgtgaccccagctacgtaaaagatcgggtagaaaaagtgggccaggtgatcagagttatttgcatcctcagccaccccatcaagaacaccaatgatgccaactcctgccagatcattattccacagaaccaagtcaatcgaaagtcagatatctacgtctgcatgatctcctttgcgcacaatgtagcagcacaagggaagtacattgctatagttagtacaactgtggaaaccaaggagcctgagaaggaaatcagaccagctttggagctcttggaaccaattgaacagaaatttgttagcatcagtgacctcctggtaccaaaagacttgggaacagaaagccagatctttatttcccgcacatatgatgccaccactcattttgagacaacgtgtgatgacattaaaaacatctataagaggatgacaggatcagagtttgactttgaggaaatgaagcgcaagaagaatgacatctatggggaagactaacagcagtacatgttattatgtaattaggacacatttaaaatttggcaaataatgcatataatgaaatcaatattgtaaggcctgcttttgtaatgaaaatggagagaatgaagagcgctgtgccagtaaatactccccttcacctttctaattattaacttgttttcatggagtggctattcagcattggcagttaccacattctgttcaatttaaccaaactggctttttttttttctagtgaagttaaacaaacattgggataccgacacagacaacttgagacagtttttttaatcttttaatcagtgtagctatgtgctgctgctgctcaagagctggatccatacaggttgtgtgtcatctgtcctcttgaggttcaggagattctaaattgaatattccacggtttgggacagcatccggaagttttccctatgactttatattttgtattatgtcaaatgttatggcagggcccaaatagcatagccacaagtttggtttatgtgggcataaaattctaaccaaaccccagacatagggagtcatttggagaaagcctgtatgtggtgttttaacctaataaagttgatgagagagaaggggagaggaagcgaacataaagcgggtcaagtgtagtgcatcttttgtatctcaggcgtggcttcttcagtggaccaagctgcaatgcagtattgacttgacagagcctctacttctgtctcaaaatggctccaaatgatttctgtactgcaaaataaagccaaattctggaaacta

SEQ ID NO: 11995 - DNA, 636 bp, Homo sapiens
  source 1..636: mol_type = unassigned DNA
ttctcttcccgtctgaggtggcggtcggtctcgccttgtcgccagctccattttcctctctttctcttcccctttccttcgcgcccaagagcgcctcccagcctcgtagggtggtcacggagcccctgcgccttttccttgctcgggtcctgcgtccgcgcctgccccgccatgaatgaggagtacgacgtgatcgtgctgggcaccggcctgacgttatacaaaagatttaaaataccaggatcaccacccgagtcaatggggagaggaagagactggaatgttgacttgattcccaagttccttatggctaatggtcagctggttaagatgctgctttatacagaggtaactcgctatctggattttaaagtgactgaagggagctttgtctataagggtggaaaaatctacaaggttccttccactgaagcagaagccctggcatctagcctaatgggattgtttgaaaaacgtcgcttcaggaaattcctagtgtatgttgccaacttcgatgaaaaagatccaagaacttttgaaggcattgatcctaagaagaccacaatgcgagatgtgtataagaaatttgatttgggtcaagacgttatagattttactggtcatgctcttgcactt

SEQ ID NO: 11996 - DNA, 834 bp, Homo sapiens
  source 1..834: mol_type = unassigned DNA
aagaaatttgatttgggtcaagacgttatagattttactggtcatgctcttgcactttacagaactgatgattacttagatcaaccgtgttatgaaaccattaatagaattaaactttacagtgaatctttggcaagatatggcaaaagcccatacctttatccactctatggccttggagaactgccccaaggatttgcaaggctaagtgctatttatggaggtacctatatgctgaataaacccattgaagaaatcattgtacagaatggaaaagtaattggtgtaaaatctgaaggagaaattgctcgctgtaagcagctcatctgtgaccccagctacgtaaaagatcgggtagaaaaagtgggccaggtgatcagagttatttgcatcctcagccaccccatcaagaacaccaatgatgccaactcctgccagatcattattccacagaaccaagtcaatcgaaagtcagatttgttagcatcagtgacctcctggtaccaaaagacttgggaacagaaagccagatctttatttcccgcacatatgatgccaccactcattttgagacaacgtgtgatgacattaaaaacatctataagaggatgacaggatcagagtttgactttgaggaaatgaagcgcaagaagaatgacatctatggggaagactaacagcagtacatgttattatgtaattaggacacatttaaaatttggcaaataatgcatataatgaaatcaatattgtaaggcctgcttttgtaatgaaaatggagagaatgaagagcgctgtgccagtaaatactccccttcacctttctaattatta

SEQ ID NO: 11997 - DNA, 918 bp, Homo sapiens
  source 1..918: mol_type = unassigned DNA
cagctccattttcctctctttctcttcccctttccttcgcgcccaagagcgcctcccagcctcgtagggtggtcacggagcccctgcgccttttccttgctcgggtcctgcgtccgcgcctgccccgccatgaatgaggagtacgacgtgatcgtgctgggcaccggcctgacggaatgtatcctgtcaggtataatgtcagtgaatggcaagaaagttcttcatatggatcgaaacccttactacggaggagagagtgcatctataacaccattggaagatttatacaaaagatttaaaataccaggatcaccacccgagtcaatggggagaggaagagactggaatgttgacttgattcccaagttccttatggctaatgaggtaactcgctatctggattttaaagtgactgaagggagctttgtctataagggtggaaaaatctacaaggttccttccactgaagcagaagccctggcatctagcctaatgggattgtttgaaaaacgtcgcttcaggaaattcctagtgtatgttgccaacttcgatgaaaaagatccaagaacttttgaaggcattgatcctaagaagaccacaatgcgagatgtgtataagaaatttgatttgggtcaagacgttatagattttactggtcatgctcttgcactttacagaactgatgattacttagatcaaccgtgttatgaaaccattaatagaattaaactttacagtgaatctttggcaagatatggcaaaagcccatacctttatccactctatggccttggagaactgccccaaggatttgcaaggctaagtgctatttatggaggtacctatatgctgaataaacccattgaagaaatcattgtacagaatggaaaagtaattggtgtaaaatctgaaggagaa

SEQ ID NO: 11998 - DNA, 1752 bp, Homo sapiens
  source 1..1752: mol_type = unassigned DNA
gacgcgaatgacgctgcgccagtcaggccgcagccccgctgcttggcccgtcgggcccgccttggccggctcggcccgcccccggccctccctgcacggcctcccgtgcgcccctgtcagactgtggcggccggtcgcgcggtgcgctctccctccctgcccgcagcctggagaggcgcttcgtgctgcacacccccgcgttcctgccggcaccgcgcctgccctctgccgcgctccgccctgccgccgaccgcacgcccgccgcgggacatggcacacgcaccggcacgctgccccagcgcccggggctccggggacggcgagatgggcaagcccaggaacgtggcgctcatcaccggtatcacaggccaggatggttcctacctggctgagttcctgctggagaaaggctatgaggtccatggaattgtacggcggtccagttcatttaatacgggtcgaattgagcatctgtataagaatccccaggctcacattgaaggaaacatgaagttgcactatggcgatctcactgacagtacctgccttgtgaagatcattaatgaagtaaagcccacagagatctacaaccttggagcccagagccacgtcaaaatttcctttgacctcgctgagtacactgcggacgttgacggagttggcactctacgacttctagatgcagttaagacttgtggccttatcaactctgtgaagttctaccaagcctcaacaagtgaactttatgggaaagtgcaggaaataccccagaaggagaccacccctttctatccccggtcaccctatggggcagcaaaactctatgcctattggattgtggtgaacttccgtgaggcgtataatctctttgcagtgaacggcattctcttcaatcatgagagtcccagaagaggagctaatttcgttactcgaaaaattagccggtcagtagctaagatttaccttggacaactggaatgtttcagtttgggaaatctggatgccaaacgagattggggccatgccaaggactatgtggaggctatgtggttgatgttgcagaatgatgagccggaggacttcgttatagctactggggaggtccatagtgtccgggaatttgtcgagaaatcattcttgcacattggaaaaaccattgtgtgggaaggaaagaatgaaaatgaagtgggcagatgtaaagagaccggcaaagttcacgtgactgtggatctcaagtactaccggccaactgaagtggactttctgcagggcgactgcaccaaagcgaaacagaagctgaactggaagccccgggtcgctttcgatgagctggtgagggagatggtgcacgccgacgtggagctcatgaggacaaaccccaatgcctgagcagcgcctcggagcccggcccgccctccggctacaatccccgcagagtctccggtgcagacgcgctgcggggatggggagcggcgtgccaatctgcgggtcccctgcggcccctgctgccgctgcgctgtcccggccgcaagagcggggccgccccgccgaggtttgtagcagccgggatgtgaccctccagggtttgggtcgctttgcgtttgtcgaagcctcctctgaatggctttgtgaaatcaagatgttttaatcacattcactttacttgaaattatgttgttacacaacaaattgtggggccttcaaattgtttttctcttttcatattaaaaatggtctttctgtgaactagca

SEQ ID NO: 11999 - DNA, 1440 bp, Homo sapiens
  source 1..1440: mol_type = unassigned DNA
tgtacacaggcagtttgttgggagcgttaccattgcctctggttcctcatgtgtaaaatggatggttcctacctggctgagttcctgctggagaaaggctatgaggtccatggaattgtacggcggtccagttcatttaatacgggtcgaattgagcatctgtataagaatccccaggctcacattgaaggaaacatgaagttgcactatggcgatctcactgacagtacctgccttgtgaagatcattaatgaagtaaagcccacagagatctacaaccttggagcccagagccacgtcaaaatttcctttgacctcgctgagtacactgcggacgttgacggagttggcactctacgacttctagatgcagttaagacttgtggccttatcaactctgtgaagttctaccaagcctcaacaagtgaactttatgggaaagtgcaggaaataccccagaaggagaccacccctttctatccccggtcaccctatggggcagcaaaactctatgcctattggattgtggtgaacttccgtgaggcgtataatctctttgcagtgaacggcattctcttcaatcatgagagtcccagaagaggagctaatttcgttactcgaaaaattagccggtcagtagctaagatttaccttggacaactggaatgtttcagtttgggaaatctggatgccaaacgagattggggccatgccaaggactatgtggaggctatgtggttgatgttgcagaatgatgagccggaggacttcgttatagctactggggaggtccatagtgtccgggaatttgtcgagaaatcattcttgcacattggaaaaaccattgtgtgggaaggaaagaatgaaaatgaagtgggcagatgtaaagagaccggcaaagttcacgtgactgtggatctcaagtactaccggccaactgaagtggactttctgcagggcgactgcaccaaagcgaaacagaagctgaactggaagccccgggtcgctttcgatgagctggtgagggagatggtgcacgccgacgtggagctcatgaggacaaaccccaatgcctgagcagcgcctcggagcccggcccgccctccggctacaatccccgcagagtctccggtgcagacgcgctgcggggatggggagcggcgtgccaatctgcgggtcccctgcggcccctgctgccgctgcgctgtcccggccgcaagagcggggccgccccgccgaggtttgtagcagccgggatgtgaccctccagggtttgggtcgctttgcgtttgtcgaagcctcctctgaatggctttgtgaaatcaagatgttttaatcacattcactttacttgaaattatgttgttacacaacaaattgtggggccttcaaattgtttttctcttttcatattaaaaatggtctttctgtgaactagca

SEQ ID NO: 12000 - DNA, 2655 bp, Homo sapiens
  source 1..2655: mol_type = unassigned DNA
tcccgcccgcgccctgcccaccccggccgcgcgcaccacaacgcccccgccccgccgcccggaaccagctgagcgcagctggacccagcagccgctgtctccagtgccgcagcagcaggtagtgctcatagctctctttgtccagtgcttcggccttggtcccagcgccttcccacggagcagcactcttcaccctgcacagccttgttagcccaacagcatggtggtggaacaccccgagttcctcaaggcagggaaggagcctggcctgcagatctggcgtgtggagaagttcgatctggtgcccgtgcccaccaacctttatggagacttcttcacgggcgacgcctacgtcatcctgaagacagtgcagctgaggaacggaaatctgcagtatgacctccactactggctgggcaatgagtgcagccaggatgagagcggggcggccgccatctttaccgtgcagctggatgactacctgaacggccgggccgtgcagcaccgtgaggtccagggcttcgagtcggccaccttcctaggctacttcaagtctggcctgaagtacaagaaaggaggtgtggcatcaggattcaagcacgtggtacccaacgaggtggtggtgcagagactcttccaggtcaaagggcggcgtgtggtccgtgccaccgaggtacctgtgtcctgggagagcttcaacaatggcgactgcttcatcctggacctgggcaacaacatccaccagtggtgtggttccaacagcaatcggtatgaaagactgaaggccacacaggtgtccaagggcatccgggacaacgagcggagtggccgggcccgagtgcacgtgtctgaggagggcactgagcccgaggcgatgctccaggtgctgggccccaagccggctctgcctgcaggtaccgaggacaccgccaaggaggatgcggccaaccgcaagctggccaagctctacaaggtctccaatggtgcagggaccatgtccgtctccctcgtggctgatgagaaccccttcgcccagggggccctgaagtcagaggactgcttcatcctggaccacggcaaagatgggaaaatctttgtctggaaaggcaagcaggcaaacacggaggagaggaaggctgccctcaaaacagcctctgacttcatcaccaagatggactaccccaagcagactcaggtctcggtccttcctgagggcggtgagaccccactgttcaagcagttcttcaagaactggcgggacccagaccagacagatggcctgggcttgtcctacctttccagccatatcgccaacgtggagcgggtgcccttcgacgccgccaccctgcacacctccactgccatggccgcccagcacggcatggatgacgatggcacaggccagaaacagatctggagaatcgaaggttccaacaaggtgcccgtggaccctgccacatatggacagttctatggaggcgacagctacatcattctgtacaactaccgccatggtggccgccaggggcagataatctataactggcagggtgcccagtctacccaggatgaggtcgctgcatctgccatcctgactgctcagctggatgaggagctgggaggtacccctgtccagagccgtgtggtccaaggcaaggagcccgcccacctcatgagcctgtttggtgggaagcccatgatcatctacaagggcggcacctcccgcgagggcgggcagacagcccctgccagcacccgcctcttccaggtccgcgccaacagcgctggagccacccgggctgttgaggtattgcctaaggctggtgcactgaactccaacgatgcctttgttctgaaaaccccctcagccgcctacctgtgggtgggtacaggagccagcgaggcagagaagacgggggcccaggagctgctcagggtgctgcgggcccaacctgtgcaggtggcagaaggcagcgagccagatggcttctgggaggccctgggcgggaaggctgcctaccgcacatccccacggctgaaggacaagaagatggatgcccatcctcctcgcctctttgcctgctccaacaagattggacgttttgtgatcgaagaggttcctggtgagctcatgcaggaagacctggcaacggatgacgtcatgcttctggacacctgggaccaggtctttgtctgggttggaaaggattctcaagaagaagaaaagacagaagccttgacttctgctaagcggtacatcgagacggacccagccaatcgggatcggcggacgcccatcaccgtggtgaagcaaggctttgagcctccctcctttgtgggctggttccttggctgggatgatgattactggtctgtggaccccttggacagggccatggctgagctggctgcctgaggaggggcagggcccacccatgtcaccggtcagtgccttttggaactgtccttccctcaaagaggccttagagcgagcagagcagctctgctatgagtgtgtgtgtgtgtgtgtgttgtttcttttttttttttttacagtatccaaaaatagccctgcaaaaattcagagtccttgcaaaattgtctaaaatgtcagtgtttgggaaattaaatccaataaaaacattttgaagtgtg

SEQ ID NO: 12001 - DNA, 2562 bp, Homo sapiens
  source 1..2562: mol_type = unassigned DNA
tcccgcccgcgccctgcccaccccggccgcgcgcaccacaacgcccccgccccgccgcccggaaccagctgagcgcagctggacccagcagccgctgtctccagtgccgcagcagcagcccaacagcatggtggtggaacaccccgagttcctcaaggcagggaaggagcctggcctgcagatctggcgtgtggagaagttcgatctggtgcccgtgcccaccaacctttatggagacttcttcacgggcgacgcctacgtcatcctgaagacagtgcagctgaggaacggaaatctgcagtatgacctccactactggctgggcaatgagtgcagccaggatgagagcggggcggccgccatctttaccgtgcagctggatgactacctgaacggccgggccgtgcagcaccgtgaggtccagggcttcgagtcggccaccttcctaggctacttcaagtctggcctgaagtacaagaaaggaggtgtggcatcaggattcaagcacgtggtacccaacgaggtggtggtgcagagactcttccaggtcaaagggcggcgtgtggtccgtgccaccgaggtacctgtgtcctgggagagcttcaacaatggcgactgcttcatcctggacctgggcaacaacatccaccagtggtgtggttccaacagcaatcggtatgaaagactgaaggccacacaggtgtccaagggcatccgggacaacgagcggagtggccgggcccgagtgcacgtgtctgaggagggcactgagcccgaggcgatgctccaggtgctgggccccaagccggctctgcctgcaggtaccgaggacaccgccaaggaggatgcggccaaccgcaagctggccaagctctacaaggtctccaatggtgcagggaccatgtccgtctccctcgtggctgatgagaaccccttcgcccagggggccctgaagtcagaggactgcttcatcctggaccacggcaaagatgggaaaatctttgtctggaaaggcaagcaggcaaacacggaggagaggaaggctgccctcaaaacagcctctgacttcatcaccaagatggactaccccaagcagactcaggtctcggtccttcctgagggcggtgagaccccactgttcaagcagttcttcaagaactggcgggacccagaccagacagatggcctgggcttgtcctacctttccagccatatcgccaacgtggagcgggtgcccttcgacgccgccaccctgcacacctccactgccatggccgcccagcacggcatggatgacgatggcacaggccagaaacagatctggagaatcgaaggttccaacaaggtgcccgtggaccctgccacatatggacagttctatggaggcgacagctacatcattctgtacaactaccgccatggtggccgccaggggcagataatctataactggcagggtgcccagtctacccaggatgaggtcgctgcatctgccatcctgactgctcagctggatgaggagctgggaggtacccctgtccagagccgtgtggtccaaggcaaggagcccgcccacctcatgagcctgtttggtgggaagcccatgatcatctacaagggcggcacctcccgcgagggcgggcagacagcccctgccagcacccgcctcttccaggtccgcgccaacagcgctggagccacccgggctgttgaggtattgcctaaggctggtgcactgaactccaacgatgcctttgttctgaaaaccccctcagccgcctacctgtgggtgggtacaggagccagcgaggcagagaagacgggggcccaggagctgctcagggtgctgcgggcccaacctgtgcaggtggcagaaggcagcgagccagatggcttctgggaggccctgggcgggaaggctgcctaccgcacatccccacggctgaaggacaagaagatggatgcccatcctcctcgcctctttgcctgctccaacaagattggacgttttgtgatcgaagaggttcctggtgagctcatgcaggaagacctggcaacggatgacgtcatgcttctggacacctgggaccaggtctttgtctgggttggaaaggattctcaagaagaagaaaagacagaagccttgacttctgctaagcggtacatcgagacggacccagccaatcgggatcggcggacgcccatcaccgtggtgaagcaaggctttgagcctccctcctttgtgggctggttccttggctgggatgatgattactggtctgtggaccccttggacagggccatggctgagctggctgcctgaggaggggcagggcccacccatgtcaccggtcagtgccttttggaactgtccttccctcaaagaggccttagagcgagcagagcagctctgctatgagtgtgtgtgtgtgtgtgtgttgtttcttttttttttttttacagtatccaaaaatagccctgcaaaaattcagagtccttgcaaaattgtctaaaatgtcagtgtttgggaaattaaatccaataaaaacattttgaagtgtg

SEQ ID NO: 12002 - DNA, 2657 bp, Homo sapiens
  source 1..2657: mol_type = unassigned DNA
gggcggctacttaaggtcggcgacccgaggccgcggctgccgactgggtcccctgccgctgtcgccaccatggctccgcaccgccccgcgcccgcgctgctttgcgcgctgtccctggcgctgtgcgcgctgtcgctgcccgtccgcgcggccactgcgtcgcggggggcgtcccaggcgggggcgccccaggggcgggtgcccgaggcgcggcccaacagcatggtggtggaacaccccgagttcctcaaggcagggaaggagcctggcctgcagatctggcgtgtggagaagttcgatctggtgcccgtgcccaccaacctttatggagacttcttcacgggcgacgcctacgtcatcctgaagacagtgcagctgaggaacggaaatctgcagtatgacctccactactggctgggcaatgagtgcagccaggatgagagcggggcggccgccatctttaccgtgcagctggatgactacctgaacggccgggccgtgcagcaccgtgaggtccagggcttcgagtcggccaccttcctaggctacttcaagtctggcctgaagtacaagaaaggaggtgtggcatcaggattcaagcacgtggtacccaacgaggtggtggtgcagagactcttccaggtcaaagggcggcgtgtggtccgtgccaccgaggtacctgtgtcctgggagagcttcaacaatggcgactgcttcatcctggacctgggcaacaacatccaccagtggtgtggttccaacagcaatcggtatgaaagactgaaggccacacaggtgtccaagggcatccgggacaacgagcggagtggccgggcccgagtgcacgtgtctgaggagggcactgagcccgaggcgatgctccaggtgctgggccccaagccggctctgcctgcaggtaccgaggacaccgccaaggaggatgcggccaaccgcaagctggccaagctctacaaggtctccaatggtgcagggaccatgtccgtctccctcgtggctgatgagaaccccttcgcccagggggccctgaagtcagaggactgcttcatcctggaccacggcaaagatgggaaaatctttgtctggaaaggcaagcaggcaaacacggaggagaggaaggctgccctcaaaacagcctctgacttcatcaccaagatggactaccccaagcagactcaggtctcggtccttcctgagggcggtgagaccccactgttcaagcagttcttcaagaactggcgggacccagaccagacagatggcctgggcttgtcctacctttccagccatatcgccaacgtggagcgggtgcccttcgacgccgccaccctgcacacctccactgccatggccgcccagcacggcatggatgacgatggcacaggccagaaacagatctggagaatcgaaggttccaacaaggtgcccgtggaccctgccacatatggacagttctatggaggcgacagctacatcattctgtacaactaccgccatggtggccgccaggggcagataatctataactggcagggtgcccagtctacccaggatgaggtcgctgcatctgccatcctgactgctcagctggatgaggagctgggaggtacccctgtccagagccgtgtggtccaaggcaaggagcccgcccacctcatgagcctgtttggtgggaagcccatgatcatctacaagggcggcacctcccgcgagggcgggcagacagcccctgccagcacccgcctcttccaggtccgcgccaacagcgctggagccacccgggctgttgaggtattgcctaaggctggtgcactgaactccaacgatgcctttgttctgaaaaccccctcagccgcctacctgtgggtgggtacaggagccagcgaggcagagaagacgggggcccaggagctgctcagggtgctgcgggcccaacctgtgcaggtggcagaaggcagcgagccagatggcttctgggaggccctgggcgggaaggctgcctaccgcacatccccacggctgaaggacaagaagatggatgcccatcctcctcgcctctttgcctgctccaacaagattggacgttttgtgatcgaagaggttcctggtgagctcatgcaggaagacctggcaacggatgacgtcatgcttctggacacctgggaccaggtctttgtctgggttggaaaggattctcaagaagaagaaaagacagaagccttgacttctgctaagcggtacatcgagacggacccagccaatcgggatcggcggacgcccatcaccgtggtgaagcaaggctttgagcctccctcctttgtgggctggttccttggctgggatgatgattactggtctgtggaccccttggacagggccatggctgagctggctgcctgaggaggggcagggcccacccatgtcaccggtcagtgccttttggaactgtccttccctcaaagaggccttagagcgagcagagcagctctgctatgagtgtgtgtgtgtgtgtgtgttgtttcttttttttttttttacagtatccaaaaatagccctgcaaaaattcagagtccttgcaaaattgtctaaaatgtcagtgtttgggaaattaaatccaataaaaacattttgaagtgtg

SEQ ID NO: 12003 - DNA, 3018 bp, Homo sapiens
  source 1..3018: mol_type = unassigned DNA
caggctggagtgcaatggcacgatatcagctcactgaagcctccacctcctgggctcaagcactcctcccacctcagccccccaggtagctgagactacaggtagaatggataaagcacggagaggaaccaagaatgtgctcagaaaaaaatccttcctcactgaaaccaggactaaggaaaggagattcccttctaccatccatggactcaggctgacggagcacgctgcctgtctgtgtctctccgtttctctctctggaacgttgtcagatgtcacggcggagggaaaagagacctggaatgacttgccgaatttttagcccataaccaggcactgtgtaaaccgctttacctcattcagtctttgcaattataccacaaggtcacactgtttagaaggagaaagaagagctcgctgtgaaaaacgctccacaatgctgcagagccttgtgaaggtggaagagtactctcatcagcaaacggcattccttccatggaaaatgtcattgggaggaaagcaggttcaagtgattctcctgcctcagcctcctgagtagctgggattacagagcccaacagcatggtggtggaacaccccgagttcctcaaggcagggaaggagcctggcctgcagatctggcgtgtggagaagttcgatctggtgcccgtgcccaccaacctttatggagacttcttcacgggcgacgcctacgtcatcctgaagacagtgcagctgaggaacggaaatctgcagtatgacctccactactggctgggcaatgagtgcagccaggatgagagcggggcggccgccatctttaccgtgcagctggatgactacctgaacggccgggccgtgcagcaccgtgaggtccagggcttcgagtcggccaccttcctaggctacttcaagtctggcctgaagtacaagaaaggaggtgtggcatcaggattcaagcacgtggtacccaacgaggtggtggtgcagagactcttccaggtcaaagggcggcgtgtggtccgtgccaccgaggtacctgtgtcctgggagagcttcaacaatggcgactgcttcatcctggacctgggcaacaacatccaccagtggtgtggttccaacagcaatcggtatgaaagactgaaggccacacaggtgtccaagggcatccgggacaacgagcggagtggccgggcccgagtgcacgtgtctgaggagggcactgagcccgaggcgatgctccaggtgctgggccccaagccggctctgcctgcaggtaccgaggacaccgccaaggaggatgcggccaaccgcaagctggccaagctctacaaggtctccaatggtgcagggaccatgtccgtctccctcgtggctgatgagaaccccttcgcccagggggccctgaagtcagaggactgcttcatcctggaccacggcaaagatgggaaaatctttgtctggaaaggcaagcaggcaaacacggaggagaggaaggctgccctcaaaacagcctctgacttcatcaccaagatggactaccccaagcagactcaggtctcggtccttcctgagggcggtgagaccccactgttcaagcagttcttcaagaactggcgggacccagaccagacagatggcctgggcttgtcctacctttccagccatatcgccaacgtggagcgggtgcccttcgacgccgccaccctgcacacctccactgccatggccgcccagcacggcatggatgacgatggcacaggccagaaacagatctggagaatcgaaggttccaacaaggtgcccgtggaccctgccacatatggacagttctatggaggcgacagctacatcattctgtacaactaccgccatggtggccgccaggggcagataatctataactggcagggtgcccagtctacccaggatgaggtcgctgcatctgccatcctgactgctcagctggatgaggagctgggaggtacccctgtccagagccgtgtggtccaaggcaaggagcccgcccacctcatgagcctgtttggtgggaagcccatgatcatctacaagggcggcacctcccgcgagggcgggcagacagcccctgccagcacccgcctcttccaggtccgcgccaacagcgctggagccacccgggctgttgaggtattgcctaaggctggtgcactgaactccaacgatgcctttgttctgaaaaccccctcagccgcctacctgtgggtgggtacaggagccagcgaggcagagaagacgggggcccaggagctgctcagggtgctgcgggcccaacctgtgcaggtggcagaaggcagcgagccagatggcttctgggaggccctgggcgggaaggctgcctaccgcacatccccacggctgaaggacaagaagatggatgcccatcctcctcgcctctttgcctgctccaacaagattggacgttttgtgatcgaagaggttcctggtgagctcatgcaggaagacctggcaacggatgacgtcatgcttctggacacctgggaccaggtctttgtctgggttggaaaggattctcaagaagaagaaaagacagaagccttgacttctgctaagcggtacatcgagacggacccagccaatcgggatcggcggacgcccatcaccgtggtgaagcaaggctttgagcctccctcctttgtgggctggttccttggctgggatgatgattactggtctgtggaccccttggacagggccatggctgagctggctgcctgaggaggggcagggcccacccatgtcaccggtcagtgccttttggaactgtccttccctcaaagaggccttagagcgagcagagcagctctgctatgagtgtgtgtgtgtgtgtgtgttgtttcttttttttttttttacagtatccaaaaatagccctgcaaaaattcagagtccttgcaaaattgtctaaaatgtcagtgtttgggaaattaaatccaataaaaacattttgaagtgtgt

SEQ ID NO: 12004 - DNA, 2570 bp, Homo sapiens
  source 1..2570: mol_type = unassigned DNA
acaacgcccccgccccgccgcccggaaccagctgagcgcagctggacccagcagccgctgtctccagtgccgcagcagcaggtagtgctcatagctctctttgtccagtgcttcggccttggtcccagcgccttcccacggagcagcactcttcaccctgcacagccttgttagcccaacagcatggtggtggaacaccccgagttcctcaaggcagggaaggagcctggcctgcagatctggcgtgtggagaagttcgacgcctacgtcatcctgaagacagtgcagctgaggaacggaaatctgcagtatgacctccactactggctgggcaatgagtgcagccaggatgagagcggggcggccgccatctttaccgtgcagctggatgactacctgaacggccgggccgtgcagcaccgtgaggtccagggcttcgagtcggccaccttcctaggctacttcaagtctggcctgaagtacaagaaaggaggtgtggcatcaggattcaagcacgtggtacccaacgaggtggtggtgcagagactcttccaggtcaaagggcggcgtgtggtccgtgccaccgaggtacctgtgtcctgggagagcttcaacaatggcgactgcttcatcctggacctgggcaacaacatccaccagtggtgtggttccaacagcaatcggtatgaaagactgaaggccacacaggtgtccaagggcatccgggacaacgagcggagtggccgggcccgagtgcacgtgtctgaggagggcactgagcccgaggcgatgctccaggtgctgggccccaagccggctctgcctgcaggtaccgaggacaccgccaaggaggatgcggccaaccgcaagctggccaagctctacaaggtctccaatggtgcagggaccatgtccgtctccctcgtggctgatgagaaccccttcgcccagggggccctgaagtcagaggactgcttcatcctggaccacggcaaagatgggaaaatctttgtctggaaaggcaagcaggcaaacacggaggagaggaaggctgccctcaaaacagcctctgacttcatcaccaagatggactaccccaagcagactcaggtctcggtccttcctgagggcggtgagaccccactgttcaagcagttcttcaagaactggcgggacccagaccagacagatggcctgggcttgtcctacctttccagccatatcgccaacgtggagcgggtgcccttcgacgccgccaccctgcacacctccactgccatggccgcccagcacggcatggatgacgatggcacaggccagaaacagatctggagaatcgaaggttccaacaaggtgcccgtggaccctgccacatatggacagttctatggaggcgacagctacatcattctgtacaactaccgccatggtggccgccaggggcagataatctataactggcagggtgcccagtctacccaggatgaggtcgctgcatctgccatcctgactgctcagctggatgaggagctgggaggtacccctgtccagagccgtgtggtccaaggcaaggagcccgcccacctcatgagcctgtttggtgggaagcccatgatcatctacaagggcggcacctcccgcgagggcgggcagacagcccctgccagcacccgcctcttccaggtccgcgccaacagcgctggagccacccgggctgttgaggtattgcctaaggctggtgcactgaactccaacgatgcctttgttctgaaaaccccctcagccgcctacctgtgggtgggtacaggagccagcgaggcagagaagacgggggcccaggagctgctcagggtgctgcgggcccaacctgtgcaggtggcagaaggcagcgagccagatggcttctgggaggccctgggcgggaaggctgcctaccgcacatccccacggctgaaggacaagaagatggatgcccatcctcctcgcctctttgcctgctccaacaagattggacgttttgtgatcgaagaggttcctggtgagctcatgcaggaagacctggcaacggatgacgtcatgcttctggacacctgggaccaggtctttgtctgggttggaaaggattctcaagaagaagaaaagacagaagccttgacttctgctaagcggtacatcgagacggacccagccaatcgggatcggcggacgcccatcaccgtggtgaagcaaggctttgagcctccctcctttgtgggctggttccttggctgggatgatgattactggtctgtggaccccttggacagggccatggctgagctggctgcctgaggaggggcagggcccacccatgtcaccggtcagtgccttttggaactgtccttccctcaaagaggccttagagcgagcagagcagctctgctatgagtgtgtgtgtgtgtgtgtgttgtttcttttttttttttttacagtatccaaaaatagccctgcaaaaattcagagtccttgcaaaattgtctaaaatgtcagtgtttgggaaattaaatccaataaaaacattttgaagtgtg

SEQ ID NO: 12005 - DNA, 2717 bp, Homo sapiens
  source 1..2717: mol_type = unassigned DNA
tcccgcccgcgccctgcccaccccggccgcgcgcaccacaacgcccccgccccgccgcccggaaccagctgagcgcagctggacccagcagccgctgtctccagtgccgcagcagcaggtagtgctcatagctctctttgtccagtgcttcggccttggtcccagcgccttcccacggagcagcactcttcaccctgcacagccttgttagatacagcgctaggaaaaggggagtaattcaggtctagaatggaaaaactgttttgttgctttcccaacagcatggtggtggaacaccccgagttcctcaaggcagggaaggagcctggcctgcagatctggcgtgtggagaagttcgatctggtgcccgtgcccaccaacctttatggagacttcttcacgggcgacgcctacgtcatcctgaagacagtgcagctgaggaacggaaatctgcagtatgacctccactactggctgggcaatgagtgcagccaggatgagagcggggcggccgccatctttaccgtgcagctggatgactacctgaacggccgggccgtgcagcaccgtgaggtccagggcttcgagtcggccaccttcctaggctacttcaagtctggcctgaagtacaagaaaggaggtgtggcatcaggattcaagcacgtggtacccaacgaggtggtggtgcagagactcttccaggtcaaagggcggcgtgtggtccgtgccaccgaggtacctgtgtcctgggagagcttcaacaatggcgactgcttcatcctggacctgggcaacaacatccaccagtggtgtggttccaacagcaatcggtatgaaagactgaaggccacacaggtgtccaagggcatccgggacaacgagcggagtggccgggcccgagtgcacgtgtctgaggagggcactgagcccgaggcgatgctccaggtgctgggccccaagccggctctgcctgcaggtaccgaggacaccgccaaggaggatgcggccaaccgcaagctggccaagctctacaaggtctccaatggtgcagggaccatgtccgtctccctcgtggctgatgagaaccccttcgcccagggggccctgaagtcagaggactgcttcatcctggaccacggcaaagatgggaaaatctttgtctggaaaggcaagcaggcaaacacggaggagaggaaggctgccctcaaaacagcctctgacttcatcaccaagatggactaccccaagcagactcaggtctcggtccttcctgagggcggtgagaccccactgttcaagcagttcttcaagaactggcgggacccagaccagacagatggcctgggcttgtcctacctttccagccatatcgccaacgtggagcgggtgcccttcgacgccgccaccctgcacacctccactgccatggccgcccagcacggcatggatgacgatggcacaggccagaaacagatctggagaatcgaaggttccaacaaggtgcccgtggaccctgccacatatggacagttctatggaggcgacagctacatcattctgtacaactaccgccatggtggccgccaggggcagataatctataactggcagggtgcccagtctacccaggatgaggtcgctgcatctgccatcctgactgctcagctggatgaggagctgggaggtacccctgtccagagccgtgtggtccaaggcaaggagcccgcccacctcatgagcctgtttggtgggaagcccatgatcatctacaagggcggcacctcccgcgagggcgggcagacagcccctgccagcacccgcctcttccaggtccgcgccaacagcgctggagccacccgggctgttgaggtattgcctaaggctggtgcactgaactccaacgatgcctttgttctgaaaaccccctcagccgcctacctgtgggtgggtacaggagccagcgaggcagagaagacgggggcccaggagctgctcagggtgctgcgggcccaacctgtgcaggtggcagaaggcagcgagccagatggcttctgggaggccctgggcgggaaggctgcctaccgcacatccccacggctgaaggacaagaagatggatgcccatcctcctcgcctctttgcctgctccaacaagattggacgttttgtgatcgaagaggttcctggtgagctcatgcaggaagacctggcaacggatgacgtcatgcttctggacacctgggaccaggtctttgtctgggttggaaaggattctcaagaagaagaaaagacagaagccttgacttctgctaagcggtacatcgagacggacccagccaatcgggatcggcggacgcccatcaccgtggtgaagcaaggctttgagcctccctcctttgtgggctggttccttggctgggatgatgattactggtctgtggaccccttggacagggccatggctgagctggctgcctgaggaggggcagggcccacccatgtcaccggtcagtgccttttggaactgtccttccctcaaagaggccttagagcgagcagagcagctctgctatgagtgtgtgtgtgtgtgtgtgttgtttcttttttttttttttacagtatccaaaaatagccctgcaaaaattcagagtccttgcaaaattgtctaaaatgtcagtgtttgggaaattaaatccaataaaaacattttgaagtgtg

SEQ ID NO: 12006 - DNA, 2734 bp, Homo sapiens
  source 1..2734: mol_type = unassigned DNA
tcccgcccgcgccctgcccaccccggccgcgcgcaccacaacgcccccgccccgccgcccggaaccagctgagcgcagctggacccagcagccgctgtctccagtgccgcagcagcaggtagtgctcatagctctctttgtccagtgcttcggccttggtcccagcgccttcccacggagcagcactcttcaccctgcacagccttgttaggccttggttgctattctgtagaagagcagagtccccataaagaggaggtgcaggaattcttcccagaggctttggagagcccaacagcatggtggtggaacaccccgagttcctcaaggcagggaaggagcctggcctgcagatctggcgtgtggagaagttcgatctggtgcccgtgcccaccaacctttatggagacttcttcacgggcgacgcctacgtcatcctgaagacagtgcagctgaggaacggaaatctgcagtatgacctccactactggctgggcaatgagtgcagccaggatgagagcggggcggccgccatctttaccgtgcagctggatgactacctgaacggccgggccgtgcagcaccgtgaggtccagggcttcgagtcggccaccttcctaggctacttcaagtctggcctgaagtacaagaaaggaggtgtggcatcaggattcaagcacgtggtacccaacgaggtggtggtgcagagactcttccaggtcaaagggcggcgtgtggtccgtgccaccgaggtacctgtgtcctgggagagcttcaacaatggcgactgcttcatcctggacctgggcaacaacatccaccagtggtgtggttccaacagcaatcggtatgaaagactgaaggccacacaggtgtccaagggcatccgggacaacgagcggagtggccgggcccgagtgcacgtgtctgaggagggcactgagcccgaggcgatgctccaggtgctgggccccaagccggctctgcctgcaggtaccgaggacaccgccaaggaggatgcggccaaccgcaagctggccaagctctacaaggtctccaatggtgcagggaccatgtccgtctccctcgtggctgatgagaaccccttcgcccagggggccctgaagtcagaggactgcttcatcctggaccacggcaaagatgggaaaatctttgtctggaaaggcaagcaggcaaacacggaggagaggaaggctgccctcaaaacagcctctgacttcatcaccaagatggactaccccaagcagactcaggtctcggtccttcctgagggcggtgagaccccactgttcaagcagttcttcaagaactggcgggacccagaccagacagatggcctgggcttgtcctacctttccagccatatcgccaacgtggagcgggtgcccttcgacgccgccaccctgcacacctccactgccatggccgcccagcacggcatggatgacgatggcacaggccagaaacagatctggagaatcgaaggttccaacaaggtgcccgtggaccctgccacatatggacagttctatggaggcgacagctacatcattctgtacaactaccgccatggtggccgccaggggcagataatctataactggcagggtgcccagtctacccaggatgaggtcgctgcatctgccatcctgactgctcagctggatgaggagctgggaggtacccctgtccagagccgtgtggtccaaggcaaggagcccgcccacctcatgagcctgtttggtgggaagcccatgatcatctacaagggcggcacctcccgcgagggcgggcagacagcccctgccagcacccgcctcttccaggtccgcgccaacagcgctggagccacccgggctgttgaggtattgcctaaggctggtgcactgaactccaacgatgcctttgttctgaaaaccccctcagccgcctacctgtgggtgggtacaggagccagcgaggcagagaagacgggggcccaggagctgctcagggtgctgcgggcccaacctgtgcaggtggcagaaggcagcgagccagatggcttctgggaggccctgggcgggaaggctgcctaccgcacatccccacggctgaaggacaagaagatggatgcccatcctcctcgcctctttgcctgctccaacaagattggacgttttgtgatcgaagaggttcctggtgagctcatgcaggaagacctggcaacggatgacgtcatgcttctggacacctgggaccaggtctttgtctgggttggaaaggattctcaagaagaagaaaagacagaagccttgacttctgctaagcggtacatcgagacggacccagccaatcgggatcggcggacgcccatcaccgtggtgaagcaaggctttgagcctccctcctttgtgggctggttccttggctgggatgatgattactggtctgtggaccccttggacagggccatggctgagctggctgcctgaggaggggcagggcccacccatgtcaccggtcagtgccttttggaactgtccttccctcaaagaggccttagagcgagcagagcagctctgctatgagtgtgtgtgtgtgtgtgtgttgtttcttttttttttttttacagtatccaaaaatagccctgcaaaaattcagagtccttgcaaaattgtctaaaatgtcagtgtttgggaaattaaatccaataaaaacattttgaagtgtg

SEQ ID NO: 12007 - DNA, 1042 bp, Homo sapiens
  source 1..1042: mol_type = unassigned DNA
ctcccccacccgcctgcccggccgccccgccccgagggcggctcccgcccgcgccctgcccaccccggccgcgcgcaccacaacgcccccgccccgccgcccggaaccagctgagcgcagctggacccagcagccgctgtctccagtgccgcagcagcaggtagtgctcatagctctctttgtccagtgcttcggccttggtcccagcgccttcccacggagcagcactcttcaccctgcacagccttgttagcccaacagcatggtggtggaacaccccgagttcctcaaggcagggaaggagcctggcctgcagatctggcgtgtggagaagttcgatctggtgcccgtgcccaccaacctttatggagacttcttcacgggcgacgcctacgtcatcctgaagacagtgcagctgaggaacggaaatctgcagtatgacctccactactggctgggcaatgagtgcagccaggatgagagcggggcggccgccatctttaccgtgcagctggatgactacctgaacggccgggccgtgcagcaccgtgaggtccagggcttcgagtcggccaccttcctaggctacttcaagtctggcctgaagtacaagaaaggaggtgtggcatcaggattcaagcacgtggtacccaacgaggtggtggtgcagagactcttccaggtcaaagggcggcgtgtggtccgtgccaccgaggtacctgtgtcctgggagagcttcaacaatggcgactgcttcatcctggacctgggcaacaacatccaccagtggtgtggttccaacagcaatcggtatgaaagactgaaggccacacaggtgtccaagggcatccgggacaacgagcggagtggccgggcccgagtgcacgtgtctgaggagggcactgagcccgaggcgatgctccaggtgctgggccccaagccggctctgcctgcaggtaccgaggacaccgccaaggaggatgcggccaaccgcaagctggccaagctctacaaggtctccaatggtgcagggaccatgtcc

SEQ ID NO: 12008 - DNA, 2726 bp, Homo sapiens
  source 1..2726: mol_type = unassigned DNA
tcccgcccgcgccctgcccaccccggccgcgcgcaccacaacgcccccgccccgccgcccggaaccagctgagcgcagctggacccagcagccgctgtctccagtgccgcagcagcaggtagtgctcatagctctctttgtccagtgcttcggccttggtcccagcgccttcccacggagcagcactcttcaccctgcacagccttgttagttcttgcagatacagcgctaggaaaaggggagtaattcaggtctagaatggaaaaactgttttgttgctttcccaacagcatggtggtggaacaccccgagttcctcaaggcagggaaggagcctggcctgcagatctggcgtgtggagaagttcgatctggtgcccgtgcccaccaacctttatggagacttcttcacgggcgacgcctacgtcatcctgaagacagtgcagctgaggaacggaaatctgcagtatgacctccactactggctgggcaatgagtgcagccaggatgagagcggggcggccgccatctttaccgtgcagctggatgactacctgaacggccgggccgtgcagcaccgtgaggtccagggcttcgagtcggccaccttcctaggctacttcaagtctggcctgaagtacaagaaaggaggtgtggcatcaggattcaagcacgtggtacccaacgaggtggtggtgcagagactcttccaggtcaaagggcggcgtgtggtccgtgccaccgaggtacctgtgtcctgggagagcttcaacaatggcgactgcttcatcctggacctgggcaacaacatccaccagtggtgtggttccaacagcaatcggtatgaaagactgaaggccacacaggtgtccaagggcatccgggacaacgagcggagtggccgggcccgagtgcacgtgtctgaggagggcactgagcccgaggcgatgctccaggtgctgggccccaagccggctctgcctgcaggtaccgaggacaccgccaaggaggatgcggccaaccgcaagctggccaagctctacaaggtctccaatggtgcagggaccatgtccgtctccctcgtggctgatgagaaccccttcgcccagggggccctgaagtcagaggactgcttcatcctggaccacggcaaagatgggaaaatctttgtctggaaaggcaagcaggcaaacacggaggagaggaaggctgccctcaaaacagcctctgacttcatcaccaagatggactaccccaagcagactcaggtctcggtccttcctgagggcggtgagaccccactgttcaagcagttcttcaagaactggcgggacccagaccagacagatggcctgggcttgtcctacctttccagccatatcgccaacgtggagcgggtgcccttcgacgccgccaccctgcacacctccactgccatggccgcccagcacggcatggatgacgatggcacaggccagaaacagatctggagaatcgaaggttccaacaaggtgcccgtggaccctgccacatatggacagttctatggaggcgacagctacatcattctgtacaactaccgccatggtggccgccaggggcagataatctataactggcagggtgcccagtctacccaggatgaggtcgctgcatctgccatcctgactgctcagctggatgaggagctgggaggtacccctgtccagagccgtgtggtccaaggcaaggagcccgcccacctcatgagcctgtttggtgggaagcccatgatcatctacaagggcggcacctcccgcgagggcgggcagacagcccctgccagcacccgcctcttccaggtccgcgccaacagcgctggagccacccgggctgttgaggtattgcctaaggctggtgcactgaactccaacgatgcctttgttctgaaaaccccctcagccgcctacctgtgggtgggtacaggagccagcgaggcagagaagacgggggcccaggagctgctcagggtgctgcgggcccaacctgtgcaggtggcagaaggcagcgagccagatggcttctgggaggccctgggcgggaaggctgcctaccgcacatccccacggctgaaggacaagaagatggatgcccatcctcctcgcctctttgcctgctccaacaagattggacgttttgtgatcgaagaggttcctggtgagctcatgcaggaagacctggcaacggatgacgtcatgcttctggacacctgggaccaggtctttgtctgggttggaaaggattctcaagaagaagaaaagacagaagccttgacttctgctaagcggtacatcgagacggacccagccaatcgggatcggcggacgcccatcaccgtggtgaagcaaggctttgagcctccctcctttgtgggctggttccttggctgggatgatgattactggtctgtggaccccttggacagggccatggctgagctggctgcctgaggaggggcagggcccacccatgtcaccggtcagtgccttttggaactgtccttccctcaaagaggccttagagcgagcagagcagctctgctatgagtgtgtgtgtgtgtgtgtgttgtttcttttttttttttttacagtatccaaaaatagccctgcaaaaattcagagtccttgcaaaattgtctaaaatgtcagtgtttgggaaattaaatccaataaaaacattttgaagtgtg

SEQ ID NO: 12009 - DNA, 2767 bp, Homo sapiens
  source 1..2767: mol_type = unassigned DNA
tcccgcccgcgccctgcccaccccggccgcgcgcaccacaacgcccccgccccgccgcccggaaccagctgagcgcagctggacccagcagccgctgtctccagtgccgcagcagcaggtagtgctcatagctctctttgtccagtgcttcggccttggtcccagcgccttcccacggagcagcactcttcaccctgcacagccttgttaggagaaggggatgaatgaatacaggacttacgcgtctgctgtggcccagctggcttccagatggtgacatgagccacccacagccggagctgttcctctttcccaaagctcagcccaacagcatggtggtggaacaccccgagttcctcaaggcagggaaggagcctggcctgcagatctggcgtgtggagaagttcgatctggtgcccgtgcccaccaacctttatggagacttcttcacgggcgacgcctacgtcatcctgaagacagtgcagctgaggaacggaaatctgcagtatgacctccactactggctgggcaatgagtgcagccaggatgagagcggggcggccgccatctttaccgtgcagctggatgactacctgaacggccgggccgtgcagcaccgtgaggtccagggcttcgagtcggccaccttcctaggctacttcaagtctggcctgaagtacaagaaaggaggtgtggcatcaggattcaagcacgtggtacccaacgaggtggtggtgcagagactcttccaggtcaaagggcggcgtgtggtccgtgccaccgaggtacctgtgtcctgggagagcttcaacaatggcgactgcttcatcctggacctgggcaacaacatccaccagtggtgtggttccaacagcaatcggtatgaaagactgaaggccacacaggtgtccaagggcatccgggacaacgagcggagtggccgggcccgagtgcacgtgtctgaggagggcactgagcccgaggcgatgctccaggtgctgggccccaagccggctctgcctgcaggtaccgaggacaccgccaaggaggatgcggccaaccgcaagctggccaagctctacaaggtctccaatggtgcagggaccatgtccgtctccctcgtggctgatgagaaccccttcgcccagggggccctgaagtcagaggactgcttcatcctggaccacggcaaagatgggaaaatctttgtctggaaaggcaagcaggcaaacacggaggagaggaaggctgccctcaaaacagcctctgacttcatcaccaagatggactaccccaagcagactcaggtctcggtccttcctgagggcggtgagaccccactgttcaagcagttcttcaagaactggcgggacccagaccagacagatggcctgggcttgtcctacctttccagccatatcgccaacgtggagcgggtgcccttcgacgccgccaccctgcacacctccactgccatggccgcccagcacggcatggatgacgatggcacaggccagaaacagatctggagaatcgaaggttccaacaaggtgcccgtggaccctgccacatatggacagttctatggaggcgacagctacatcattctgtacaactaccgccatggtggccgccaggggcagataatctataactggcagggtgcccagtctacccaggatgaggtcgctgcatctgccatcctgactgctcagctggatgaggagctgggaggtacccctgtccagagccgtgtggtccaaggcaaggagcccgcccacctcatgagcctgtttggtgggaagcccatgatcatctacaagggcggcacctcccgcgagggcgggcagacagcccctgccagcacccgcctcttccaggtccgcgccaacagcgctggagccacccgggctgttgaggtattgcctaaggctggtgcactgaactccaacgatgcctttgttctgaaaaccccctcagccgcctacctgtgggtgggtacaggagccagcgaggcagagaagacgggggcccaggagctgctcagggtgctgcgggcccaacctgtgcaggtggcagaaggcagcgagccagatggcttctgggaggccctgggcgggaaggctgcctaccgcacatccccacggctgaaggacaagaagatggatgcccatcctcctcgcctctttgcctgctccaacaagattggacgttttgtgatcgaagaggttcctggtgagctcatgcaggaagacctggcaacggatgacgtcatgcttctggacacctgggaccaggtctttgtctgggttggaaaggattctcaagaagaagaaaagacagaagccttgacttctgctaagcggtacatcgagacggacccagccaatcgggatcggcggacgcccatcaccgtggtgaagcaaggctttgagcctccctcctttgtgggctggttccttggctgggatgatgattactggtctgtggaccccttggacagggccatggctgagctggctgcctgaggaggggcagggcccacccatgtcaccggtcagtgccttttggaactgtccttccctcaaagaggccttagagcgagcagagcagctctgctatgagtgtgtgtgtgtgtgtgtgttgtttcttttttttttttttacagtatccaaaaatagccctgcaaaaattcagagtccttgcaaaattgtctaaaatgtcagtgtttgggaaattaaatccaataaaaacattttgaagtgtg

SEQ ID NO: 12010 - DNA, 2453 bp, Homo sapiens
  source 1..2453: mol_type = unassigned DNA
agctggacccagcagccgctgtctccagtgccgcagcagcaggtagtgctcatagctctctttgtccagtgcttcggccttggtcccagcgccttcccacggagcagcactcttcaccctgcacagccttgttagcatggtggtggaacaccccgagttcctcaaggcagggaaggagcctggcctgcagatctggcgtgtggagaagttcgatctggtgcccgtgcccaccaacctttatggagacttcttcacgggcgacgcctacgtcatcctgaagacagtgcagctgaggaacggaaatctgcagtatgacctccactactggctgggcaatgagtgcagccaggatgagagcggggcggccgccatctttaccgtgcagctggatgactacctgaagtacaagaaaggaggtgtggcatcaggattcaagcacgtggtacccaacgaggtggtggtgcagagactcttccaggtcaaagggcggcgtgtggtccgtgccaccgaggtacctgtgtcctgggagagcttcaacaatggcgactgcttcatcctggacctgggcaacaacatccaccagtggtgtggttccaacagcaatcggtatgaaagactgaaggccacacaggtgtccaagggcatccgggacaacgagcggagtggccgggcccgagtgcacgtgtctgaggagggcactgagcccgaggcgatgctccaggtgctgggccccaagccggctctgcctgcaggtaccgaggacaccgccaaggaggatgcggccaaccgcaagctggccaagctctacaaggtctccaatggtgcagggaccatgtccgtctccctcgtggctgatgagaaccccttcgcccagggggccctgaagtcagaggactgcttcatcctggaccacggcaaagatgggaaaatctttgtctggaaaggcaagcaggcaaacacggaggagaggaaggctgccctcaaaacagcctctgacttcatcaccaagatggactaccccaagcagactcaggtctcggtccttcctgagggcggtgagaccccactgttcaagcagttcttcaagaactggcgggacccagaccagacagatggcctgggcttgtcctacctttccagccatatcgccaacgtggagcgggtgcccttcgacgccgccaccctgcacacctccactgccatggccgcccagcacggcatggatgacgatggcacaggccagaaacagatctggagaatcgaaggttccaacaaggtgcccgtggaccctgccacatatggacagttctatggaggcgacagctacatcattctgtacaactaccgccatggtggccgccaggggcagataatctataactggcagggtgcccagtctacccaggatgaggtcgctgcatctgccatcctgactgctcagctggatgaggagctgggaggtacccctgtccagagccgtgtggtccaaggcaaggagcccgcccacctcatgagcctgtttggtgggaagcccatgatcatctacaagggcggcacctcccgcgagggcgggcagacagcccctgccagcacccgcctcttccaggtccgcgccaacagcgctggagccacccgggctgttgaggtattgcctaaggctggtgcactgaactccaacgatgcctttgttctgaaaaccccctcagccgcctacctgtgggtgggtacaggagccagcgaggcagagaagacgggggcccaggagctgctcagggtgctgcgggcccaacctgtgcaggtggcagaaggcagcgagccagatggcttctgggaggccctgggcgggaaggctgcctaccgcacatccccacggctgaaggacaagaagatggatgcccatcctcctcgcctctttgcctgctccaacaagattggacgttttgtgatcgaagaggttcctggtgagctcatgcaggaagacctggcaacggatgacgtcatgcttctggacacctgggaccaggtctttgtctgggttggaaaggattctcaagaagaagaaaagacagaagccttgacttctgctaagcggtacatcgagacggacccagccaatcgggatcggcggacgcccatcaccgtggtgaagcaaggctttgagcctccctcctttgtgggctggttccttggctgggatgatgattactggtctgtggaccccttggacagggccatggctgagctggctgcctgaggaggggcagggcccacccatgtcaccggtcagtgccttttggaactgtccttccctcaaagaggccttagagcgagcagagcagctctgctatgagtgtgtgtgtgtgtgtgtgttgtttcttttttttttttttacagtatccaaaaatagccctgcaaaaattcagagtccttgcaaaattgtctaaaatgtcagt

SEQ ID NO: 12011 - DNA, 2428 bp, Homo sapiens
  source 1..2428: mol_type = unassigned DNA
gtgctcccagggcccacaactgcttgaatgactattggtgttcctgtttgtgtgccctctgggccgggaagtcagagaaagaaaggagacaatttgtgattgaacagccactgtggccatcattctccttacctgtctgatgagagctgatcttcatgccactgtgtacacccaacagcatggtggtggaacaccccgagttcctcaaggcagggaaggagcctggcctgcagatctggcgtgtggagaagttcgatctggtgcccgtgcccaccaacctttatggagacttcttcacgggcgacgcctacgtcatcctgaagacagtgcagctgaggaacggaaatctgcagtatgacctccactactggctgggcaatgagtgcagccaggatgagagcggggcggccgccatctttaccgtgcagctggatgactacctgaacggccgggccgtgcagcaccgtgaggtccagggcttcgagtcggccaccttcctaggctacttcaagtctggcctgaagtacaagaaaggaggtgtggcatcaggattcaagcacgtggtacccaacgaggtggtggtgcagagactcttccaggtcaaagggcggcgtgtggtccgtgccaccgaggtacctgtgtcctgggagagcttcaacaatggcgactgcttcatcctggacctgggcaacaacatccaccagtggtgtggttccaacagcaatcggtatgaaagactgaaggccacacaggtgtccaagggcatccgggacaacgagcggagtggccgggcccgagtgcacgtgtctgaggagggcactgagcccgaggcgatgctccaggtgctgggccccaagccggctctgcctgcaggtaccgaggacaccgccaaggaggatgcggccaaccgcaagctggccaagctctacaaggtctccaatggtgcagggaccatgtccgtctccctcgtggctgatgagaaccccttcgcccagggggccctgaagtcagaggactgcttcatcctggaccacggcaaagatgggaaaatctttgtctggaaaggcaagcaggcaaacacggaggagaggaaggctgccctcaaaacagcctctgacttcatcaccaagatggactaccccaagcagactcaggtctcggtccttcctgagggcggtgagaccccactgttcaagcagttcttcaagaactggcgggacccagaccagacagatggcctgggcttgtcctacctttccagccatatcgccaacgtggagcgggtgcccttcgacgccgccaccctgcacacctccactgccatggccgcccagcacggcatggatgacgatggcacaggccagaaacagatctggagaatcgaaggttccaacaaggtgcccgtggaccctgccacatatggacagttctatggaggcgacagctacatcattctgtacaactaccgccatggtggccgccaggggcagataatctataactggcagggtgcccagtctacccaggatgaggtcgctgcatctgccatcctgactgctcagctggatgaggagctgggaggtacccctgtccagagccgtgtggtccaaggcaaggagcccgcccacctcatgagcctgtttggtgggaagcccatgatcatctacaagggcggcacctcccgcgagggcgggcagacagcccctgccagcacccgcctcttccaggtccgcgccaacagcgctggagccacccgggctgttgaggtattgcctaaggctggtgcactgaactccaacgatgcctttgttctgaaaaccccctcagccgcctacctgtgggtgggtacaggagccagcgaggcagagaagacgggggcccaggagctgctcagggtgctgcgggcccaacctgtgcaggtggcagaaggcagcgagccagatggcttctgggaggccctgggcgggaaggctgcctaccgcacatccccacggctgaaggacaagaagatggatgcccatcctcctcgcctctttgcctgctccaacaagattggacgttttgtgatcgaagaggttcctggtgagctcatgcaggaagacctggcaacggatgacgtcatgcttctggacacctgggaccaggtctttgtctgggttggaaaggattctcaagaagaagaaaagacagaagccttgacttctgctaagcggtacatcgagacggacccagccaatcgggatcggcggacgcccatcaccgtggtgaagcaaggctttgagcctccctcctttgtgggctggttccttggctgggatgatgattactggtctgtggaccccttggacagggccatggctgagctggctgcctgaggaggggcagggcccacccatgtcaccggtcagtgccttttggaactgtcctt

SEQ ID NO: 12012 - DNA, 5397 bp, Homo sapiens
  source 1..5397: mol_type = unassigned DNA
cccgctccctacctaaggcgtgaggctacgagcggtcggctgtggcagcttctcttgtctctgacggcttgtagttatggggcaggagccgcggacgctgccgccctcccccaactggtactgcgcccgctgcagcgatgccgtgcccgggggcctctttggcttcgccgcgcggacctccgtcttccttgtccgcgtgggcccgggcgcaggcgagagtccagggacacccccgtttcgagtcataggagagttggtgggacacaccgaaagggtctctggcttcacattttctcatcaccctggtcagtacaacctctgtgccaccagctccgacgatgggactgtgaaaatatgggatgtagagacaaaaacagttgtgacagaacatgcactccatcagcatacgatatcaacattacattggtctcctcgagtaaaggacttaatagtatctggggatgaaaaaggagtagttttctgttactggtttaacagaaatgacagccagcacctctttatagaacccaggacaattttctgtcttacttgttcacctcatcatgaagatttagtagccattggctacaaggatggcatagtggtgataattgacatcagtaagaaaggagaagttattcataggcttcgaggccatgatgatgaaatccactccatagcctggtgtcccctgcctggtgaagattgtttatctataaaccaagaggaaacttcagaagaagctgaaattaccaacgggaatgctgtagcacaagctccagtaacaaaaggttgctacttagccactggaagcaaagatcaaaccattcgaatctggagctgttctagaggccgaggggtgatgattttgaaattgccctttctgaagagaagaggagggggtatagacccaactgttaaagagcgcctttggttgacactccattggcccagcaatcaaccaacacagctggtatctagctgttttggaggtgaactgttgcaatgggatctcactcaatcttggagacggaaatacaccctcttcagtgcctcatcagaagggcaaaatcattcaagaattgtgtttaatttatgtcctttacaaacagaggatgacaaacagctattactttctacatcaatggatagagatgtaaaatgttgggacatagccaccttggagtgcagctggacccttccttcccttggtgggtttgcatacagcctggctttctcttctgtggacataggctctttggccataggtgttggggatggcatgatccgtgtatggaatacactctccataaagaacaactatgatgtgaaaaatttttggcaaggcgtgaagtccaaggttacagcgctgtgctggcacccaaccaaggaaggttgcttagcttttggaactgatgatggaaaagtgggattgtatgacacctactccaacaagcctccacagatttctagcacatatcataagaagactgtatatactttagcctgggggccaccagtaccccccatgtcacttggaggagaaggagacagaccttcccttgctttatacagctgtggaggagaagggattgtcttacagcataatccctggaagcttagtggagaagcctttgacatcaacaaactcatcagggacaccaattcaatcaaatacaaattgcctgtacacacagagataagttggaaagcagatggcaaaatcatggctcttggcaatgaagatggatcaatagaaatatttcagattcccaacctgaaactgatctgtactatccaacagcatcacaagcttgtgaataccattagctggcatcatgagcatggcagccagccagaattgagctatctgatggcctctggctccaacaatgcagtcatttacgtgcacaacctgaagactgtcatagagagcagccctgagtctccagtgaccattacagagccctaccggaccctctcagggcatacggccaagattaccagtgtggcgtggagcccacatcatgatggaaggctggtatctgcttcctatgatggtacagcccaggtgtgggatgctctccgggaagagcccctgtgcaatttccgaggacatcgaggtcgactgctttgtgtggcatggtctcctttggatccagactgcatctattcaggggcagatgacttttgtgtgcacaagtggctcacttccatgcaagatcattcccggcctcctcaaggcaaaaaaagtattgaattggagaaaaaacggctctctcaacctaaggcaaagcccaaaaagaagaaaaagcccaccttgagaactcctgtaaagctggaatcgattgatggaaatgaagaagaaagcatgaaggagaactcaggacctgttgagaatggtgtgtcagaccaagaaggggaggagcaagcacgggagccggaattaccctgtggccttgctccagcggtttctagagaaccagttatctgcactccagtttcctcaggctttgaaaagtcaaaagtcaccattaataacaaagtcattttactgaaaaaggagccaccaaaagagaagccagaaaccttaatcaagaagagaaaagctcgttccttgcttcccctgagtacaagcctggaccacagatccaaagaggagcttcatcaggactgtttggtactagcaactgcaaagcactccagagagctgaatgaagatgtgtctgctgatgttgaggaaagatttcatctggggcttttcacagacagggctaccctgtatagaatgattgatattgaaggaaaaggtcacttagaaaatggccaccctgagttatttcaccagcttatgctttggaaaggagatctcaaaggtgttctccagactgcagcagaaagaggggagctgacagacaaccttgtggctatggcaccagcagctggctaccatgtgtggctatgggctgtggaagcttttgccaaacagctgtgttttcaggatcagtatgtcaaggctgcttctcacctactttccatccacaaagtgtatgaagcggtggagctgctcaagtcaaaccatttttacagggaagctattgcgattgccaaggcccggctgcgcccggaggacccagtcctgaaggacttgtacctcagctggggaaccgtcctagaaagagatggccactatgctgtagctgccaaatgctatttaggggccacttgtgcttatgatgcagccaaagttttggccaaaaagggggatgcggcatcacttagaacggctgcagagttggctgccatcgtaggagaggatgagttgtctgcttccctggctctcagatgtgcccaagagctgcttctggccaacaactgggtgggagcccaggaagccctgcagctgcatgaaagtctacagggtcagagattggtgttttgccttctggagctactgtccaggcatctggaggaaaagcagctttcagagggcaaaagctcctcctcttaccacacttggaacacgggcaccgaagggcctttcgtggagagggtgactgcagtgtggaagagcatcttcagccttgacacccctgagcagtatcaggaagcctttcagaagctgcagaacatcaagtacccatctgctacaaataacacacctgccaaacagctcctgcttcacatttgccatgacttgaccctggcagtgctgagccaacagatggcctcctgggacgaggctgtgcaggcgctccttcgggcggtggtccggagctatgactcagggagcttcaccatcatgcaggaagtgtactcagcctttctccctgacggctgtgaccacctaagagacaagttgggggaccatcaatcccctgccacaccagctttcaaaagtttggaggccttttttctttatgggcgtctgtatgaattctggtggtctctctccagaccttgcccaaattccagtgtctgggtaagggctggtcacagaacactctctgttgagccaagccagcagttagacactgccagcactgaagaaacggaccctgaaacttctcagccagagccaaacaggccttcagaactagacttgagactcacagaagaaggtgagcgaatgctgagtacttttaaggagctcttttcagaaaagcatgccagtctccaaaactcacagagaactgttgctgaagtccaagagaccttggcagaaatgatccgacaacaccaaaagagtcaactctgtaaatccacagcaaatggtcctgataagaatgaaccggaagtagaagcagagcagcccctctgcagttctcagagccagtgtaaagaagaaaaaaatgagccactttctctgcctgagttaaccaaaaggcttaccgaggcaaatcagagaatggcgaaatttcctgagagcattaaggcctggcccttcccagatgtgctggagtgctgcctcgtcctgcttctcatcaggtcccactttcctggctgtctggcccaggaaatgcagcagcaggcccaagagctccttcagaaatacggcaacacgaaaacttacagaagacactgccagaccttctgtatgtgaattttcacacaccttgaagaaactgccaaattgaaaatgtttgacatctttcacctctgcagttatgcctcaccagacattcactctggtccctagatgtttttgcagtaatccaaaagaatacaaacaaggattaagtttgaatcaaccctgcctacccatagacaacggtggatctgactttagactcaattgtggtctcctactggagggaagatcatgaaaagcccacagtagttattcagaactaacacctgcagagtgttggtcatctctacagccttaggcaggtttcacccaaagaggagaaacttctgtcgtcacccaaagtgttacatgcttaaaacacaagctacctttgtaaatacttcatctgatcagaagtgtgtcatgcttgtttgagatggagttgctgcattttaggactattgatacctttttttaattgtttttataatatttaatttgaaagaggagacccttctctctctactctttcatagactgaagtttgaatatgaaataggccttaaccatcatgttgactctcctgtcagaattttaggttggaaatttggttttattctttcatgtaattgcttatttgaacagatcacttactaaagctttagaagaagtgattcaaatgtgtgttttcccttcagttttataacaaatggattgatggcagtcaaatagctcaggaataaattactgtttcaatggttcttaaactttcttggatcataggatccttttgagaatcagattaaagccaaagatactctttggag

SEQ ID NO: 12013 - DNA, 1647 bp, Homo sapiens
  source 1..1647: mol_type = unassigned DNA
ggacctcggtgagtacaaggtggtggggggtcgccagcaggttccctctccccggccccagctctggacgctcaccccagtgcaacgccctgagtgacggaaagaggtctggcggcttctctgttgacaactcagctggttccacaccctggcaattgtgaagagttggccaaatgtttgtccactgagctgatctcctctctggagcaccggggccaccaggagggagccaagacaatgcaaactccagtgaacattcccgtgcctgtgctccggctgccccggggccctgatggcttcagccgtggctttgcccctgatggacgcagagcccccttgaggccagaggttcctgaaatccaggagtgtcccatagctcaagaatccctggaatcccaggagcagcgggcacgagccgcccttcgggagcgttacctccgcagcctgctggccatggtgggtcatcaggtgagcttcacgttgcacgagggtgtgcgtgtggccgcccactttggagccaccgacctggatgtggccaacttctacgtgtcacagctgcagactcccataggtgtgcaagcagaggcgctgctccgatgtagtgacattatttcatataccttcaagccataaagatattgtgttcacttttctgcttgaggctaaggcactgtatcccaggcctcccaatgttcccgagccaggaactctgggccccatggagttatgagctcccttggaattttgagccaagctttaagcaagtctggactcctgagacctcctgggtctagtcagtaaaattctgcaactctaggaattctaagatcccattggaaggaatgctctacctcacagaactctgaaccctacagaaatatgggcctgctgccatttcctgaagaccggggcatcggggtggggtgataaaggatacaacctgcacagggggaagttattaaagaggctgcaaagtccagccaccctgaagatactccccagtgctcccctcctgctaaagaaccagttaccccaggaaaattcgactcctgtttttctttaattaactataccgacggggatggagtcatctttaggggctggtagggtggttatccaagggctgaatccagtggagctgggccaagtacgacaggagtccagataaaggtgtaggggctgcacggccgcaagtctcctggaaaggctggagtgaccggcatgccgggattgggagattaggatttgatttcattttggggcgggcggtggctcgtgctgggtcacgtggtcgtgcccaagcgctcctcctgttgccccacctgtggttgctgtggactgcacacgacagcagattcgctgtcccctcgttggaggcgaatggtcggaccccgagtggcggcgcccctgataaaaggccgaggattcgcgatcagggtgcaacttcactccctcctcttttctctccagccttgcagcgtggccgttcacatcacgcgcttcactaagcctcctatcactagtaacctttcagcgcattgtttaaaaagaaagcagtttctgtccctttctgtagttcctttaagttcaggatgtaagcgaagccttccattaagtaaaggtgagtgtcgtttcgtctcagtcgcg

SEQ ID NO: 12014 - DNA, 1524 bp, Homo sapiens
  source 1..1524: mol_type = unassigned DNA
ggacctcggtgagtacaaggtggtggggggtcgccagcaggttccctctccccggccccagctctggacgctcaccccagtgcaacgccctgagtgacggaaagagccaagacaatgcaaactccagtgaacattcccgtgcctgtgctccggctgccccggggccctgatggcttcagccgtggctttgcccctgatggacgcagagcccccttgaggccagaggttcctgaaatccaggagtgtcccatagctcaagaatccctggaatcccaggagcagcgggcacgagccgcccttcgggagcgttacctccgcagcctgctggccatggtgggtcatcaggtgagcttcacgttgcacgagggtgtgcgtgtggccgcccactttggagccaccgacctggatgtggccaacttctacgtgtcacagctgcagactcccataggtgtgcaagcagaggcgctgctccgatgtagtgacattatttcatataccttcaagccataaagatattgtgttcacttttctgcttgaggctaaggcactgtatcccaggcctcccaatgttcccgagccaggaactctgggccccatggagttatgagctcccttggaattttgagccaagctttaagcaagtctggactcctgagacctcctgggtctagtcagtaaaattctgcaactctaggaattctaagatcccattggaaggaatgctctacctcacagaactctgaaccctacagaaatatgggcctgctgccatttcctgaagaccggggcatcggggtggggtgataaaggatacaacctgcacagggggaagttattaaagaggctgcaaagtccagccaccctgaagatactccccagtgctcccctcctgctaaagaaccagttaccccaggaaaattcgactcctgtttttctttaattaactataccgacggggatggagtcatctttaggggctggtagggtggttatccaagggctgaatccagtggagctgggccaagtacgacaggagtccagataaaggtgtaggggctgcacggccgcaagtctcctggaaaggctggagtgaccggcatgccgggattgggagattaggatttgatttcattttggggcgggcggtggctcgtgctgggtcacgtggtcgtgcccaagcgctcctcctgttgccccacctgtggttgctgtggactgcacacgacagcagattcgctgtcccctcgttggaggcgaatggtcggaccccgagtggcggcgcccctgataaaaggccgaggattcgcgatcagggtgcaacttcactccctcctcttttctctccagccttgcagcgtggccgttcacatcacgcgcttcactaagcctcctatcactagtaacctttcagcgcattgtttaaaaagaaagcagtttctgtccctttctgtagttcctttaagttcaggatgtaagcgaagccttccattaagtaaaggtgagtgtcgtttcgtctcagtcgcg

SEQ ID NO: 12015 - DNA, 3514 bp, Homo sapiens
  source 1..3514: mol_type = unassigned DNA
cgacgcggaaccgaggcggcggcggcggctgcggcggcaggaaatcggggctcggccccgccggcgcgcgaccccatccccatcccggtccctgcagagcgatccccgggcccagatatggacgcagcagagccgggactccccccaggtcctgagggcaggaagaggtacagtgacatcttccggagcctggacaacctcgaaatctcactggggaacgtgacccttgagatgctggctggagaccctctactctcagaagacccagaacctgacaagacccctacagccactgttaccaacgaagccagctgttggagcggcccctccccagagggtcctgtacccctcacaggggaggaactggacttgcggctcattcggacaaaggggggtgtggacgcagccctggaatatgccaagacctggagccgctatgccaaggaactgcttgcctggactgaaaagagagccagctatgagctggagtttgctaagagcaccatgaagatcgctgaagctggcaaggtgtccattcaacagcagagccacatgcctctgcagtacatctacaccctgtttctggagcacgatctcagcctgggaaccctggccatggagacagtggcccagcagaaaagagactactaccagcccctcgccgccaaacggactgagattgagaagtggcggaaggagttcaaggagcagtggatgaaggagcagaagcggatgaatgaggcggtgcaggcactgcggcgcgcccagctgcagtatgtgcaacgcagcgaggacctgcgggcacgctcccaggggtcccctgaggactcggccccccaggcctcgccgggacctagcaagcagcaggagcggcggcggcgctcgcgagaggaggcccaggccaaggcgcaggaggccgaggcgctgtaccaggcctgtgtccgcgaggccaacgcgcggcagcaggacctggagatcgccaagcagcgaatcgtgtcgcacgtgcgcaagctggtgtttcagggggatgaagtgctgaggcgggtgacgctgagtctcttcgggctgcggggggcgcaggcagagcgtggcccccgcgccttcgccgccctggccgagtgctgtgcgccctttgagccgggccagcgctaccaggagtttgtacgggcgctgcggcccgaggccccgccgcccccgccgcccgccttctccttccaggagttccttccctccttgaacagctcccctctggacatcagaaagaagctctctgggcctcttcctccaaggctggatgagaattcagctgagccaggcccttgggaggatccgggcacaggctggcgctggcaagggactccaggccccactccgggcagcgatgtggacagcgtgggtggcggcagcgagtctcggtccctggactcacccacttccagcccaggcgctggcacgaggcagctggtgaaggcttcgtccacaggcactgagtcctcagatgactttgaggagcgagaccctgacctgggagacgggctggagaatgggctgggcagccccttcgggaagtggacactgtccagcgcggctcagacccaccagctgcggcgactgcggggcccagccaagtgccgcgagtgcgaagccttcatggtcagcgggacggagtgtgaggagtgctttctgacctgccacaagcgctgcctggagactctcctgatcctctgtggacacaggcggctcccagcccggacacccctttttggggttgacttcctgcagctacccagggacttcccggaggaggtaccctttgtggtcacgaagtgcacggctgagatagaacaccgtgccctggatgtgcagggcatttaccgggtcagcgggtcccgggtccgtgtggagcggctgtgccaggctttcgagaatggccgagcgttggtggagctgtcggggaactcgcctcatgacgtctcgagtgtcctcaagcgatttcttcaggagctcaccgagcccgtgatccccttccacctctacgacgccttcatctctctggctaagaccttgcatgcagaccctggggacgaccctgggacccccagccccagccctgaggttatccgctcgctgaagaccctcttggtacagctgcctgactctaactacaacaccctgcggcacctggtggcccatctgttcagggtggctgcacgatttatggaaaacaagatgtctgccaacaacctgggcattgtgtttgggccgacactgctgcggccgccggacggcccgcgggcagccagcgccatccctgtcacctgcctgctggactctgggcatcaggcccagcttgtggagttcctcatcgtgcactacgagcagatctttgggatggatgagctcccccaggccactgagcccccgccccaagactccagcccagcccctgggcccctcacaaccagctcccaaccgccacccccgcaccttgacccagactcccagcccccagtcctagcctcagaccccggcccagacccccagcaccacagtaccctggagcagcatcccacggccacacctaccgagattccaactccacagagtgaccagagagaggacgtggctgaagacaccaaagatgggggaggggaagtgtccagccaaggcccagaggactcactcctggggacacagtctcgtggccacttcagccgccagccagtgaagtatccccggggcggtgtgaggcctgtaacccaccagctgtccagtctggccctggtggcttccaagctgtgcgaggagacccccatcacatcagtgcccagagggagtttgcgggggcgggggcccagccctgcagctgcctcccctgagggcagccccctgcgccgcaccccgctgcccaagcattttgagattacccaggagacagcccggctactctcgaaattggacagcgaggctgtgcccagggccacctgctgcccggacgtccagcctgaggaagccgaggaccatctctgaccaccctggcaccttaaataaggaagaggcccagattgtgaagacggacccatatatccctacctcccaccacctagtggccaaacaccccgccaggagttcaatgctgggagaggtccagagggttcctataaggaaaaactatttaatacatgacctaggggaggcctaaaacccttttggggataatgtcccagagtccccccactagacacaggtcactgccaagcatcagggccactcgggctcagaggtcactcagggtcaatactcagggtcagtgcaggttatgagatccttggggtccaccctagtctctgacacctgggacaggggtgcttttgctactttggttgtggtcactcccccacacctgcctgcctccttcacggactcgaagtgaccttcctggaggaggtgggcagctcagactccacatgctggtggtgcctgaggtctgatggcctctaataaactgtgtcct

SEQ ID NO: 12016 - DNA, 3034 bp, Homo sapiens
  source 1..3034: mol_type = unassigned DNA
aaatcggggctcggccccgccggcgcgcgaccccatccccatcccggtccctgcagagcgatccccgggcccagatatggacgcagcagagccgggactccccccaggtcctgagggcaggaagaggtacagtgacatcttccggagcctggacaacctcgaaatctcactggggaacgtgacccttgagatgctggctggagaccctctactctcagaagacccagaacctgacaagacccctacagccactgttaccaacgaagccagctgttggagcggcccctccccagagggtcctgtacccctcacaggggaggaactggacttgcggctcattcggacaaaggggggtgtggacgcagccctggaatatgccaagacctggagccgctatgccaaggaactgcttgcctggactgaaaagagagccagctatgagctggagtttgctaagagcaccatgaagatcgctgaagctggcaaggtgtccattcaacagcagagccacatgcctctgcagtacatctacaccctgtttctggagcacgatctcagcctgggaaccctggccatggagacagtggcccagcagaaaagagactactaccagcccctcgccgccaaacggactgagattgagaagtggcggaaggagttcaaggagcagtggatgaaggagcagaagcggatgaatgaggcggtgcaggcactgcggcgcgcccagctgcagtatgtgcaacgcagcgaggacctgcgggcacgctcccaggggtcccctgaggactcggccccccaggcctcgccgggacctagcaagcagcaggagcggcggcggcgctcgcgagaggaggcccaggccaaggcgcaggaggccgaggcgctgtaccaggcctgtgtccgcgaggccaacgcgcggcagcaggacctggagatcgccaagcagcgaatcgtgtcgcacgtgcgcaagctggtgtttcagggggatgaagtgctgaggcgggtgacgctgagtctcttcgggctgcggggggcgcaggcagagcgtggcccccgcgccttcgccgccctggccgagtgctgtgcgccctttgagccgggccagcgctaccaggagtttgtacgggcgctgcggcccgaggccccgccgcccccgccgcccgccttctccttccaggagttccttccctccttgaacagctcccctctggacatcagaaagaagctctctgggcctcttcctccaaggctggatgagaattcagctgagccaggcccttgggaggatccgggcacaggctggcgctggcaaggccccactccgggcagcgatgtggacagcgtgggtggcggcagcgagtctcggtccctggactcacccacttccagcccagacctgggagacgggctggagaatgggctgggcagccccttcgggaagtggacactgtccagcgcggctcagacccaccagctgcggcgactgcggggcccagccaagtgccgcgagtgcgaagccttcatggtcagcgggacggagtgtgaggagtgctttctgacctgccacaagcgctgcctggagactctcctgatcctctgtggacacaggcggctcccagcccggacacccctttttggggttgacttcctgcagctacccagggacttcccggaggaggtaccctttgtggtcacgaagtgcacggctgagatagaacaccgtgccctggatgtgcagggcatttaccgggtcagcgggtcccgggtccgtgtggagcggctgtgccaggctttcgagaatggccgagcgttggtggagctgtcggggaactcgcctcatgacgtctcgagtgtcctcaagcgatttcttcaggagctcaccgagcccgtgatccccttccacctctacgacgccttcatctctctggctaagaccttgcatgcagaccctggggacgaccctgggacccccagccccagccctgaggttatccgctcgctgaagaccctcttggtacagctgcctgactctaactacaacaccctgcggcacctggtggcccatctgttcagggtggctgcacgatttatggaaaacaagatgtctgccaacaacctgggcattgtgtttgggccgacactgctgcggccgccggacggcccgcgggcagccagcgccatccctgtcacctgcctgctggactctgggcatcaggcccagcttgtggagttcctcatcgtgcactacgagcagatctttgggatggatgagctcccccaggccactgagcccccgccccaagactccagcccagcccctgggcccctcacaaccagctcccaaccgccacccccgcaccttgacccagactcccagcccccagtcctagcctcagaccccggcccagacccccagcaccacagtaccctggagcagcatcccacggccacacctaccgagattccaactccacagagtgaccagagagaggacgtggctgaagacaccaaagatgggggaggggaagtgtccagccaaggcccagaggactcactcctggggacacagtctcgtggccacttcagccgccagccagtgaagtatccccggggcggtgtgaggcctgtaacccaccagctgtccagtctggccctggtggcttccaagctgtgcgaggagacccccatcacatcagtgcccagagggagtttgcgggggcgggggcccagccctgcagctgcctcccctgagggcagccccctgcgccgcaccccgctgcccaagcattttgagattacccaggagacagcccggctactctcgaaattggacagcgaggctgtgcccagggccacctgctgcccggacgtccagcctgaggaagccgaggaccatctctgaccaccctggcaccttaaataaggaagaggcccagattgtgaagacggacccatatatccctacctcccaccacctagtggccaaacaccccgccaggagttcaatgctgggagaggtccagagggttcctat

SEQ ID NO: 12017 - DNA, 3422 bp, Homo sapiens
  source 1..3422: mol_type = unassigned DNA
atgaacaccattctgccttgccaagaccagtactttgtaggaggccagagctataattgcccgtattccactacaacgtcagaatctagtgttgacgtttccacggagacttgggtctctttctgggctgctggtctcctggacaacagagagctccaacaagcaccacaggcacaggaatcattcagtgactcaaattttcctcttccggacttgtgctcatgggaagaggctcagctttcctctcagctctacagaaataagcagctgcaagataccctggtgcagaaggaagaagaactcgccaggttacacgaagagaataatcacctcagacaatacctgaattctgctttggttaaatgtcttgaagaaaaggccaagaaattgctctcatctgatgagttctccaaagcatatggaaaattcaggaaggggaagagaaaatccaaagagcaaagatactctcctgctgagattccccatcccaaaaatgccaaaagaaacctctctagtgaatttgctaactgtgaagaacaagctgggccccctgtggatccctgggtccttcaaacacttgggttaaaagaccttgacactatcgatgacacctcatcagctaactacagtgccctcgcatctcatcccagaagagtcgccagcacattttcccagtttccggatgatgcagttgattataaaaatatccccagagaggatatgccaattgactatagaggtgacagaacaacccccttgcacagcactgccactcatggagaagatttccacatcctttctcaactttcaaatcccccagtggggctgaaaactcttccttactatactgctcatgtgtcacccaacaagacagagatggcattttccacatccctgagccctcattgtaatgtgaaaactcattccttccaccagggacaagcctttgtgcgtcgagatgaggagggaggctggaagtttacctgggtccctaagcagtcttagtgacccctcttttatcacaaagcactgccacgaactctgtttacaaagacctctcttgcacttgaatttgactatgtggaacacagaagctgttgcttagactgtctcctgccactttaaatgtcactctcaattacccacttaaatctgcagggaatggcttccaagaatccataatgaaacgtgtccgcgcttcttttacctaaatttgacttgtttacacaccaatacctgctattgacatcctctctttgccctatacttgataaggtattttccactcacttctatattcctttaagacctagatacatttttccaattttaaccagtttaacagattttcctcttttaagtagttgaaatattcacagcccttttacttttctccctttgtcatttctgaaaactgtctttagaatgagccctatttttgcttcaagtacttgctactgcatgttcaaatagctgagggtggggttgaaacaagtgtctttgcccatcaccactactcctgaagacataatgtggatgtgtgtagcattatgttcatggcagttcaaaaagttcagtgccccatagtggcattgacaaagcctcttaaaacaactgtaactccactaataatcaatatcacagataaactttaaaattacaaagaatttaaattatttttaaatgcctcatgatgtatcagcttctatatgtacccagcatcatttctttaaccaacatgactccaagaagaacattttgagggactgtggtaacaaaactagtcatcatctgcaactacccagatgctgacaaactcctattgctgaaaatagactaacctagctcagccattgtctcattcattcattcattcgcgtattcattttttcattgatcagtccacccaagaaatctgtagaatacctaatgcctactttgtaccaggcactatgctatgtgatggtgataaaatacaagcaatttagacactgtggccaccatcatgagacttagacctactcatctgctatgactttgcgaaaacgacttcccttttgtgaaggttcagtttcccaactgtagaatacagaagttggactagataattactaatattctatgaattgaggctgggtcctatcagatttactccaacatggcagtttcaggtcactgaagaaactaaagagaagtctttagataggcactgcaagtattaggtagggtaaactttatgtacaattaataaaattcaaaaacataagtcatttgaagttaacattagaaatcattgctctgatcacagtactctttttctagagcccattttgcagttaactcggcgtaactgtgtaagaataatttgcctctaaaaatagatacatattaatttttaaataagtgcggatagattgcatataaatattgctatcaaggacttcatatttctaaatttgaaacaatatattttcagtgcttgtgctagttttcttctttcccatctctcaagacccctatcattcccagaataatttgcacatcctgcatgtgcacctatgttttttggacaaacttcaattaatgatgaaatctttcatgttgaaacctgttctcatttttctcttttccacatctcaataagtcatcttgcacaatcaatatctcgtaggtcaactgtgttggttaggattctttgtaacagagacatgcctttcattgttgtttctgtttggttgttgctttattttggtgatgtaagcaaagggtctgttttataaagttttgttgccacccacttttaaaaataatttatgaagaaaatccaatatagtaattaatattactctctggagtactttaagaagtagaacacattccattttctaaaaaataaaataaaataaataactgtgccttttacattctggtatctgggcccctggtcggtgaaatttgtcgctttttagaataagagatttaaggattcgaattattgtactttatgacactaggaattgagaaagtaatataactaattttgaaagtctaataatcaagctgtaaaaggaaatgtatgagttaacaaatatttattttgcattctttgtgtgccttatcatgtgttaagtaccatgagggtacacccaggcttagcacaatgcatttggtatacaaaaccatgtaaaatgtcatagcttttgatagcttttaaatgaaacttaattttggcccagtttaaagatattaccgaacatttgggataaaatgtgatggtttcctggcttctatcatggacgatgttatggaagacaattaccacgtttttgaaatcatgtctataaatatttaatatccatttaaattatgtatagaaaattattttgttcatgttttagaaattaaacatttctttcacctga

SEQ ID NO: 12018 - DNA, 5722 bp, Homo sapiens
  source 1..5722: mol_type = unassigned DNA
gcagttgcggggtttcgcgccgccggagtctgagaggccggaagtgccccttagcgggtgggggaagctggtaggcacgggcggctccgcagtgaccggactcgggggagcagataatcaccagaatgggagtgaatgacttgtggcaaattttggagcctgttaagcaacacatccccttgcgtaatcttggtgggaaaaccattgcagttgatctgagtctctgggtgtgtgaggcacagacagtcaaaaaaatgatgggcagcgtcatgaagccccacctcaggaacttattttttcgtatctcatatttaacacaaatggatgtaaaactggtatttgttatggaaggggaaccaccaaagctgaaagctgatgtcataagcaagaggaatcagtctcggtatgggtcttctggaaaatcgtggtctcagaaaacagggagatcacattttaaatcagtcttaagagagtgcctccatatgctcgaatgcttaggaatcccctgggttcaggctgctggggaagctgaagccatgtgtgcttatctcaatgctggtggtcatgtcgatggctgcctcaccaatgatggagatactttcctttatggggcccagactgtttacaggaatttcactatgaatacaaaggacccacatgttgactgttacacaatgtcatctatcaagagtaaactaggtttggatagagatgctctggttggattagcaatacttcttggctgtgattatctcccaaagggagtccctggagttggaaaagagcaagcattaaaacttatacagattttgaaagggcaaagtttacttcagaggtttaatcggtggaatgaaacatcttgtaactctagtccacaactgctagtcactaaaaaactggctcattgttccgtatgttcccatccaggttcacctaaggatcatgaacgtaatggatgcagattatgtaaaagtgataaatattgtgagccacatgactatgaatactgctgtccttgtgagtggcaccgtacagaacatgataggcaactcagtgaagtagagaacaatattaagaagaaagcttgctgttgtgagggattcccattccatgaggttattcaagaattccttttaaacaaggataaattggtgaaggttatcaggtaccaaagacctgatttgttattgtttcagagatttactcttgaaaaaatggagtggcccaatcactatgcatgtgagaaattgctggtacttttgacccattatgacatgatagaaagaaagcttggtagcagaaactctaatcaactacagccaattcgaattgttaagactcgaatcagaaatggagttcattgttttgaaatagaatgggaaaagcctgaacattatgctatggaagataaacaacatggagaatttgctttattaacaattgaggaagaatcattgtttgaagcagcatatcctgagatcgttgctgtttaccaaaaacaaaagttagaaattaaagggaagaaacaaaaacgtattaagcctaaagaaaacaatttgccagaaccagatgaagtaatgagctttcagtcacacatgactttaaaacccacatgtgaaatctttcataagcagaattccaagttaaattcggggatttcccctgatcctacattaccacaggaatctatttctgcctcattgaatagcttgcttttacctaaaaatactccatgtttgaatgcacaagaacagttcatgtcttctctaagacctttggctatacagcaaattaaagctgtcagtaagtctctaatttcagaatctagtcaacccaatacctcatctcataatatatccgtgattgctgatctacacttgagcactattgactgggaaggtacttcttttagtaattctccagctattcaaaggaatactttttctcatgatttaaaatcagaagttgaatcagagctatcagccatccctgatggctttgaaaatatcccagaacaactgtcctgtgaatcagaaaggtacactgcaaacataaagaaagtgttggatgaggattctgatgggattagtcctgaagagcatctactttctggcattactgatttatgtcttcaggatttgcctttaaaggaacgaatatttacaaaattatcatatcctcaggataatctacaaccagatgtcaacctgaaaactttgtccatacttagtgtaaaagaatcttgtattgctaacagtggttctgattgtacatcacatctttcaaaggatcttccaggaattcccttgcaaaatgaatccagagactctaaaattctaaaaggagaccagctgcttcaagaagactataaagtcaatacttctgtcccttattctgtcagtaacacagtggtaaagacctgcaatgttagaccaccaaatactgctttagatcatagtagaaaagttgatatgcaaaccactcggaaaattttaatgaagaagagtgtttgccttgacagacattcctctgatgaacaaagtgccccagtgtttgggaaagctaagtacacaactcaaagaatgaagcacagttctcaaaagcataattcatcccatttcaaagaaagtggccataacaagttgagtagccctaagatacatattaaagaaactgaacagtgtgtcagatcttatgaaacagctgaaaatgaagaaagctgtttcccagattcaacaaaaagttctctgagttctctacaatgtcataagaaagaaaacaactctggtacttgtttggatagccctcttcctttacgccagagattaaaactaagattccaaagcacttgaaatttaaaacacttaggtataacttaactattttagtactatcagcaatagcagagacagagggaaggtatctagttcatgtgtggtaaaaattttaatgttctctgtgtcatgaaacacttgccattttaatcaaagttgtaatttttaaaaagtcacctaaaactctggttttaaaagatcctctgtattgaaaacttctgataatgtatgtcattatgtccttactattccttaattgtagttttaaaatattggtatagtacttgacagagtaaatacttcatctgattgttcatttttactttttcttccacaagcctctaaagtatttatattccagcttgttcccaagaggataattctttatacttctcttcattcttttaaggccttgcaaggtcttccgttataactcgctttcctaaaagctattttctccctcagtgtgaagatacctttagtgtgctcttccactttggaaggccatgcaaggtgttccattataactctttttcctaagagttatattctccctcagtttgaagatacctttagtgtgctcttccacttttggtgtcttagtctcttttgaggggcaaaaatagaaaaggagagaagatgtcagtatgtttagtaaaaatcatgctcgtaatggctgaataaactgagcaaagtaactccttatgtatccccagaagttcacaggtatatcgggtggaaaaagatttggaaaatcaaatgtataaccaaaaggattagaaactagcccaggatcacgtagctaactaataatcctgtgggaatcagttttcttgcctgctaatttttttatttttctattttttccttctatagcacttttcccccttttgttttgaatctatgcaatattgactttaataccaccaaatattaagtcatgcattaatttaggtcgcactcaaaaattctagagaggcatccagattgaaaaggaaaatggtgtctgcagatgacaagattgtatgcatcaaaaattctaagaaatccactagaaaactattaaaactgataaagcgagttcatccaggtcgtagaatacaagaccaatgtgcaatgatcattgcattttgtttttgtttgtttgtttttttttgagacagagtctcactcttgtcgagactggggtgtagtggcgccatcttggctcactgcaacctctgcctcccaggttcacgcaattcacatgcctcagccacctgagtagcagggattacaggtgtgtgccaccatgcctggctaatttttagtatttttagtagagatgggattttcccttgttggtcaggctagtcatgaactcctggcctcaagcgatccacccatcttggcctcccagagtgctgggattacaggtgtgaatcaccatactcagcctcaattgtatttctgtacacctctaaataaatggaaatacattccatgttcatgaatcagaagacataagatgaccatactccccaaactgatctacaggttaaatgtaattcccattaattccagctggtttctttgctgattctaaaattcatatggaaatttcaggaacacagaatattaggaagaatcttgaaagagtttgaatgacccacccttcctgattttaagtatacagaactacagtaatgaatgtgttgtactggtataaaggtagacatataggtcaatatagatcaatggcatagaattgagaattcagaaaaaaagccttcacgtttatggtcagttgattttaaaccagagtgccaagacaattcaatgggaaaaggaaacagtctttgaaccaactgtcttctggatctattggatatctatgtaaaaaagagtgacatttgattcctacttcacatgatatttaagaagtaacttaagatggatcaaatacctaaatgtaagctaaagctataaaactcttagaagaaaacatagacgtaaatctttgtgactttggattaggcaaggatttcttaaatatacccaaagcataggcaacaaaagagaatacacaaactggacttcatcaaaactaaaaactgttgtttgaaatgacaccatcaagaaagtgaaaagacagcttacagaatgggagaaaatatttgcaaatcataaatgtgataagggacttgtatcttggtggtatataaagaactcgtaactcaattataaaaagacaactttgaaatgggcaaaatagctcaacaggcttttctgcaaagaagaaatacaaatgaccaagaagcacatttaaaaattttcagtactattactcatcaggaaaatgcaaatcaaaaccacaagacacccaatgtctacaatcaaaaagataataactagtattgatgaggatgtggagaaattgaaattctcataacatgctggtaggaatgtaaaatggggcagccactttggaaaaagtctggtagttcttcaaatggttaaatgtagagttacgatatgatccagcaattcctctcccaggtatatacccaagataaatgaaaacttatatccacataaaaacctgtgcacaaatgtccatagcagcgttattcataatagcctaaaagtggaaacaatcccagttccagaatgaggaaggggagaaactaatgtgtattagctattgtgtgctaagcattcaactagattatttacaaaccttgtatcatctcaactctttaaggactgtattgcaatgttttgaatattcagagagaaaaaagtcgttgctaaaacattttccaaggttctgcttattctgatttgttcagtcgtggctgtgatagttcaggaccatctagaccaggtaaataaaatatctagaggca

SEQ ID NO: 12019 - DNA, 6367 bp, Homo sapiens
  source 1..6367: mol_type = unassigned DNA
gaaacgcttcctggtgctcctgggcctggcggttgagcccggggagctagtctttgcttgggtaaagaaagaggactttcctttttttttttccttttgagaaaattcagaaatttggaggcacagtagttaggattcaggccaaactggtaaatgacgaaggggcttcttccagagccaaggaggaagggttgtccggcagataatcaccagaatgggagtgaatgacttgtggcaaattttggagcctgttaagcaacacatccccttgcgtaatcttggtgggaaaaccattgcagttgatctgagtctctgggtgtgtgaggcacagacagtcaaaaaaatgatgggcagcgtcatgaagccccacctcaggaacttattttttcgtatctcatatttaacacaaatggatgtaaaactggtatttgttatggaaggggaaccaccaaagctgaaagctgatgtcataagcaagaggaatcagtctcggtatgggtcttctggaaaatcgtggtctcagaaaacagggagatcacattttaaatcagtcttaagagagtgcctccatatgctcgaatgcttaggaatcccctgggttcaggctgctggggaagctgaagccatgtgtgcttatctcaatgctggtggtcatgtcgatggctgcctcaccaatgatggagatactttcctttatggggcccagactgtttacaggaatttcactatgaatacaaaggacccacatgttgactgttacacaatgtcatctatcaagagtaaactaggtttggatagagatgctctggttggattagcaatacttcttggctgtgattatctcccaaagggagtccctggagttggaaaagagcaagcattaaaacttatacagattttgaaagggcaaagtttacttcagaggtttaatcggtggaatgaaacatcttgtaactctagtccacaactgctagtcactaaaaaactggctcattgttccgtatgttcccatccaggttcacctaaggatcatgaacgtaatggatgcagattatgtaaaagtgataaatattgtgagccacatgactatgaatactgctgtccttgtgagtggcaccgtacagaacatgataggcaactcagtgaagtagagaacaatattaagaagaaagcttgctgttgtgagggattcccattccatgaggttattcaagaattccttttaaacaaggataaattggtgaaggttatcaggtaccaaagacctgatttgttattgtttcagagatttactcttgaaaaaatggagtggcccaatcactatgcatgtgagaaattgctggtacttttgacccattatgacatgatagaaagaaagcttggtagcagaaactctaatcaactacagccaattcgaattgttaagactcgaatcagaaatggagttcattgttttgaaatagaatgggaaaagcctgaacattatgctatggaagataaacaacatggagaatttgctttattaacaattgaggaagaatcattgtttgaagcagcatatcctgagatcgttgctgtttaccaaaaacaaaagttagaaattaaagggaagaaacaaaaacgtattaagcctaaagaaaacaatttgccagaaccagatgaagtaatgagctttcagtcacacatgactttaaaacccacatgtgaaatctttcataagcagaattccaagttaaattcggggatttcccctgatcctacattaccacaggaatctatttctgcctcattgaatagcttgcttttacctaaaaatactccatgtttgaatgcacaagaacagttcatgtcttctctaagacctttggctatacagcaaattaaagctgtcagtaagtctctaatttcagaatctagtcaacccaatacctcatctcataatatatccgtgattgctgatctacacttgagcactattgactgggaaggtacttcttttagtaattctccagctattcaaaggaatactttttctcatgatttaaaatcagaagttgaatcagagctatcagccatccctgatggctttgaaaatatcccagaacaactgtcctgtgaatcagaaaggtacactgcaaacataaagaaagtgttggatgaggattctgatgggattagtcctgaagagcatctactttctggcattactgatttatgtcttcaggatttgcctttaaaggaacgaatatttacaaaattatcatatcctcaggataatctacaaccagatgtcaacctgaaaactttgtccatacttagtgtaaaagaatcttgtattgctaacagtggttctgattgtacatcacatctttcaaaggatcttccaggaattcccttgcaaaatgaatccagagactctaaaattctaaaaggagaccagctgcttcaagaagactataaagtcaatacttctgtcccttattctgtcagtaacacagtggtaaagacctgcaatgttagaccaccaaatactgctttagatcatagtagaaaagttgatatgcaaaccactcggaaaattttaatgaagaagagtgtttgccttgacagacattcctctgatgaacaaagtgccccagtgtttgggaaagctaagtacacaactcaaagaatgaagcacagttctcaaaagcataattcatcccatttcaaagaaagtggccataacaagttgagtagccctaagatacatattaaagaaactgaacagtgtgtcagatcttatgaaacagctgaaaatgaagaaagctgtttcccagattcaacaaaaagttctctgagttctctacaatgtcataagaaagaaaacaactctggtacttgtttggatagccctcttcctttacgccagagattaaaactaagattccaaagcacttgaaatttaaaacacttaggtataacttaactattttagtactatcagcaatagcagagacagagggaaggtatctagttcatgtgtggtaaaaattttaatgttctctgtgtcatgaaacacttgccattttaatcaaagttgtaatttttaaaaagtcacctaaaactctggttttaaaagatcctctgtattgaaaacttctgataatgtatgtcattatgtccttactattccttaattgtagttttaaaatattggtatagtacttgacagagtaaatacttcatctgattgttcatttttactttttcttccacaagcctctaaagtatttatattccagcttgttcccaagaggataattctttatacttctcttcattcttttaaggccttgcaaggtcttccgttataactcgctttcctaaaagctattttctccctcagtgtgaagatacctttagtgtgctcttccactttggaaggccatgcaaggtgttccattataactctttttcctaagagttatattctccctcagtttgaagatacctttagtgtgctcttccacttttggtgtcttagtctcttttgaggggcaaaaatagaaaaggagagaagatgtcagtatgtttagtaaaaatcatgctcgtaatggctgaataaactgagcaaagtaactccttatgtatccccagaagttcacaggtatatcgggtggaaaaagatttggaaaatcaaatgtataaccaaaaggattagaaactagcccaggatcacgtagctaactaataatcctgtgggaatcagttttcttgcctgctaatttttttatttttctattttttccttctatagcacttttcccccttttgttttgaatctatgcaatattgactttaataccaccaaatattaagtcatgcattaatttaggtcgcactcaaaaattctagagaggcatccagattgaaaaggaaaatggtgtctgcagatgacaagattgtatgcatcaaaaattctaagaaatccactagaaaactattaaaactgataaagcgagttcatccaggtcgtagaatacaagaccaatgtgcaatgatcattgcattttgtttttgtttgtttgtttttttttgagacagagtctcactcttgtcgagactggggtgtagtggcgccatcttggctcactgcaacctctgcctcccaggttcacgcaattcacatgcctcagccacctgagtagcagggattacaggtgtgtgccaccatgcctggctaatttttagtatttttagtagagatgggattttcccttgttggtcaggctagtcatgaactcctggcctcaagcgatccacccatcttggcctcccagagtgctgggattacaggtgtgaatcaccatactcagcctcaattgtatttctgtacacctctaaataaatggaaatacattccatgttcatgaatcagaagacataagatgaccatactccccaaactgatctacaggttaaatgtaattcccattaattccagctggtttctttgctgattctaaaattcatatggaaatttcaggaacacagaatattaggaagaatcttgaaagagtttgaatgacccacccttcctgattttaagtatacagaactacagtaatgaatgtgttgtactggtataaaggtagacatataggtcaatatagatcaatggcatagaattgagaattcagaaaaaaagccttcacgtttatggtcagttgattttaaaccagagtgccaagacaattcaatgggaaaaggaaacagtctttgaaccaactgtcttctggatctattggatatctatgtaaaaaagagtgacatttgattcctacttcacatgatatttaagaagtaacttaagatggatcaaatacctaaatgtaagctaaagctataaaactcttagaagaaaacatagacgtaaatctttgtgactttggattaggcaaggatttcttaaatatacccaaagcataggcaacaaaagagaatacacaaactggacttcatcaaaactaaaaactgttgtttgaaatgacaccatcaagaaagtgaaaagacagcttacagaatgggagaaaatatttgcaaatcataaatgtgataagggacttgtatcttggtggtatataaagaactcgtaactcaattataaaaagacaactttgaaatgggcaaaatagctcaacaggcttttctgcaaagaagaaatacaaatgaccaagaagcacatttaaaaattttcagtactattactcatcaggaaaatgcaaatcaaaaccacaagacacccaatgtctacaatcaaaaagataataactagtattgatgaggatgtggagaaattgaaattctcataacatgctggtaggaatgtaaaatggggcagccactttggaaaaagtctggtagttcttcaaatggttaaatgtagagttacgatatgatccagcaattcctctcccaggtatatacccaagataaatgaaaacttatatccacataaaaacctgtgcacaaatgtccatagcagcgttattcataatagcctaaaagtggaaacaatcccagttccagaatgaggaaggggagaaactaatgtgtattagctattgtgtgctaagcattcaactagattatttacaaaccttgtatcatctcaactctttaaggactgtattgcaatgttttgaatattcagagagaaaaaagtcgttgctaaaacattttccaaggttctgcttattctgatttgttcagtcgtggctgtgatagttcaggaccatctagaccaggtaaataaaatatctagaggcattcttgagattgtatgagatgaaaataacaaaattagttgggagtggccagtctgagttcattttgctatatagctcaggagtccccaacccctgggctatggacaggtaccagtccatcacctgtcaggaaccggcctgcacagcaggtgttgagcggcatgcaagcgagaattaccgcctgagctctgcctcctgtcagatcagcggtggcattagagtctcataggagcatgaaccctattgtgaactacgcatgcgaggatctagtttgtgcactcctactgagaatctaatgcctgatgatataaggtggaacagcttcatcccacagccatctccccctcatcatccgtggaaaaactgttttccacgaaagtggtcctcggtgccagaaaggttggggactgctgatatacctaatataggcataagtgtaaaattatagttcctcctcctcaaggatttctctgttttcattgtccaggttataccaattctttttaaagcattccatgttcttgttccttgatgtggtcatgttatcacttgtaaat

SEQ ID NO: 12020 - DNA, 593 bp, Homo sapiens
  source 1..593: mol_type = unassigned DNA
gaaacgcttcctggtgctcctgggcctggcggttgagcccggggagctagtctttgcttgggtaaagaaagaggactttcctttttttttttccttttgagaaaattcagaaatttggaggcacagtagttaggattcaggccaaactggtaaatgacgaaggggcttcttccagagccaaggaggaagggttgtccggcagataatcaccagaatgggagtgaatgacttgtggcaaattttggagcctgttaagcaacacatccccttgcgtaatcttggtgggaaaaccattgcagttgatctgagtctctgggtgtgtgaggcacagacagtcaaaaaaatgatgggcagcgtcatgaagccccacctcaggaacttattttttcgtatctcatatttaacacaaatggatgtaaaactggtatttgttatggaaggggaaccaccaaagctgaaagctgatgtcataagcaagaggaatcagtctcggtatgggtcttctggaaaatcgtggtctcagaaaacagggagatcacattttaaatcagtcttaagagagtgcctccatatgctcgaatgcttaggaatcc

SEQ ID NO: 12021 - DNA, 498 bp, Homo sapiens
  source 1..498: mol_type = unassigned DNA
gtgctcctgggcctggcggttgagcccggggagctagtctttgcttgggtaaagaaagaggactttcctttttttttttccttttgagaaaattcagaaatttggaggcacagtagttaggattcaggccaaactggtaaatgacgaaggggcttcttccagagccaaggaggaagggttgtccggtgtgtttcacataacagcagataatcaccagaatgggagtgaatgacttgtggcaaattttggagcctgttaagcaacacatccccttgcgtaatcttggtgggaaaaccattgcagttgatctgagtctctgggtgtgtgaggcacagacagtcaaaaaaatgatgggcagcgtcatgaagccccacctcaggaacttattttttcgtatctcatatttaacacaaatggatgtaaaactggtatttgttatggaaggggaaccaccaaagctgaaagctgatgtcataagcaagaggaatcagtctcggt

SEQ ID NO: 12022 - DNA, 2158 bp, Homo sapiens
  source 1..2158: mol_type = unassigned DNA
gataaatattgtgagccacatgactatgaatactgctgtccttgtgagtggcaccgtacagaacatgataggcaactcagtgaagtagagaacaatattaagaagaaagcttgctgttgtgagggattcccattccatgaggttattcaagaattccttttaaacaaggataaattggtgaaggttatcaggtaccaaagacctgatttgttattgtttcagagatttactcttgaaaaaatggagtggcccaatcactatgcatgtgagaaattgctggtacttttgacccattatgacatgatagaaagaaagcttggtagcagaaactctaatcaactacagccaattcgaattgttaagactcgaatcagaaatggagttcattgttttgaaatagaatgggaaaagcctgaacattatgctatggaagataaacaacatggagaatttgctttattaacaattgaggaagaatcattgtttgaagcagcatatcctgagatcgttgctgtttaccaaaaacaaaagttagaaattaaagggaagaaacaaaaacgtattaagcctaaagaaaacaatttgccagaaccagatgaagtaatgagctttcagtcacacatgactttaaaacccacatgtgaaatctttcataagcagaattccaagttaaattcggggatttcccctgatcctacattaccacaggaatctatttctgcctcattgaatagcttgcttttacctaaaaatactccatgtttgaatgcacaagaacagttcatgtcttctctaagacctttggctatacagcaaattaaagctgtcagtaagtctctaatttcagaatctagtcaacccaatacctcatctcataatatatccgtgattgctgatctacacttgagcactattgactgggaaggtacttcttttagtaattctccagctattcaaaggaatactttttctcatgatttaaaatcagaagttgaatcagagctatcagccatccctgatggctttgaaaatatcccagaacaactgtcctgtgaatcagaaaggtacactgcaaacataaagaaagtgttggatgaggattctgatgggattagtcctgaagagcatctactttctggcattactgatttatgtcttcaggatttgcctttaaaggaacgaatatttacaaaattatcatatcctcaggataatctacaaccagatgtcaacctgaaaactttgtccatacttagtgtaaaagaatcttgtattgctaacagtggttctgattgtacatcacatctttcaaaggatcttccaggaattcccttgcaaaatgaatccagagactctaaaattctaaaaggagaccagctgcttcaagaagactataaagtcaatacttctgtcccttattctgtcagtaacacagtggtaaagacctgcaatgttagaccaccaaatactgctttagatcatagtagaaaagttgatatgcaaaccactcggaaaattttaatgaagaagagtgtttgccttgacagacattcctctgatgaacaaagtgccccagtgtttgggaaagctaagtacacaactcaaagaatgaagcacagttctcaaaagcataattcatcccatttcaaagaaagtggccataacgagtagccctaagatacatattaaagaaactgaacagtgtgtcagatcttatgaaacagctgaaaatgaagaaagctgtttcccagattcaacaaaaagttctctgagttctctacaatgtcataagaaagaaaacaactctggtacttgtttggatagccctcttcctttacgccagagattaaaactaagattccaaagcacttgaaatttaaaacacttaggtataacttaactattttagtactatcagcaatagcagagacagagggaaggtatctagttcatgtgtggtaaaaattttaatgttctctgtgtcatgaaacacttgccattttaatcaaagttgtaatttttaaaaagtcacctaaaactctggttttaaaagatcctctgtattgaaaacttctgataatgtatgtcattatgtccttactattccttaattgtagttttaaaatattggtatagtacttgacagagtaaatacttc

SEQ ID NO: 12023 - DNA, 1639 bp, Homo sapiens
  source 1..1639: mol_type = unassigned DNA
gcgcaggcgcaaagggccaggtgctggaggtgctgtcatggcctgcctcaacccggtgcctaaactctacagatctgtaattgaagatgtaattgaaggagttcggaatctatttgctgaagaaggtatagaggaacaagttttaaaagacttgaagcagctctgggaaaccaaggttttgcagtctaaagcaacagaagacttcttcagaaatagcatccaatcacctctgtttactcttcagttgccgcacagcttgcaccaaacattgcaatcgtcaacagcatcattagttattcctgctggtagaactcttccaagttttaccacagcagaactgggcacttcaaactccagtgcaaactttacttttcctggttatcccattcatgtaccagcaggtgtgacactacagactgtatctggtcacctttataaagtcaatgtaccaattatggtgacagagacttctggaagagcaggtattcttcagcatccaattcagcaagtatttcaacagcttggccagccttcagtaatacaaactagtgttccacaattgaatccatggtctcttcaagcaactactgaaaaatcacagagaattgaaaccgtgctacagcaacccgcaattctaccttctgggccagtagataggaaacacttagaaaatgccaccagtgatatacttgtatctcctggaaatgagcataaaatcgtgcctgaagctttgttgtgtcatcaggaaagttctcactatatcagtcttccaggtgttgtattttctccacaggtctctcaaacaaattctaatgtggagtcagtgctcagtggttcagctagcatggctcaaaatctgcatgatgagtccctctccacaagccctcatggggctctccaccagcacgtgactgatattcagcttcatattcttaaaaataggatgtatggatgtgattctgtaaagcaaccaagaaatatagaggaacccagcaacatacctgtatcagagaaggattctaattctcaggtggatttaagcattcgggttactgatgatgatattggtgaaataattcaagtagatggaagcggtgatacatcttccaatgaagaaataggaagtacaagagatgcagatgagaatgaatttctagggaatattgacgggggagatctgaaggtacctgaagaagaagctgacagtatttcaaatgaggattcagccacaaacagtagtgataatgaagaccctcaagtaaacattgtagaagaggaccctttaaattctggagatgatgttagtgaacaggatgtgccagacctgtttgacacggataatgttattgtctgtcagtatgataagattcatcgaagcaagaacaaatggaaattctatttgaaagatggtgttatgtgttttggagggagagactatgtatttgcaaaagccattggtgatgcagagtggtaaaccttgtgagctcagtacatctattttgtgaacatcagttggattatattgcatattgtgaattcatttttattttgaatatagtccagcacagagctgttcaaatttttagttcactgtatggaatttaataaaattataattcagatgcagatacaattacac

SEQ ID NO: 12024 - DNA, 1573 bp, Homo sapiens
  source 1..1573: mol_type = unassigned DNA
aaaacgtgcccagtgtttccctccgagggcactgcgtgccgcgcaggcgcaaagggccaggtgctggaggtgctgtcatggcctgcctcaacccggtgctctgggaaaccaaggttttgcagtctaaagcaacagaagacttcttcagaaatagcatccaatcacctctgtttactcttcagttgccgcacagcttgcaccaaacattgcaatcgtcaacagcatcattagttattcctgctggtagaactcttccaagttttaccacagcagaactgggcacttcaaactccagtgcaaactttacttttcctggttatcccattcatgtaccagcaggtgtgacactacagactgtatctggtcacctttataaagtcaatgtaccaattatggtgacagagacttctggaagagcaggtattcttcagcatccaattcagcaagtatttcaacagcttggccagccttcagtaatacaaactagtgttccacaattgaatccatggtctcttcaagcaactactgaaaaatcacagagaattgaaaccgtgctacagcaacccgcaattctaccttctgggccagtagataggaaacacttagaaaatgccaccagtgatatacttgtatctcctggaaatgagcataaaatcgtgcctgaagctttgttgtgtcatcaggaaagttctcactatatcagtcttccaggtgttgtattttctccacaggtctctcaaacaaattctaatgtggagtcagtgctcagtggttcagctagcatggctcaaaatctgcatgatgagtccctctccacaagccctcatggggctctccaccagcacgtgactgatattcagcttcatattcttaaaaataggatgtatggatgtgattctgtaaagcaaccaagaaatatagaggaacccagcaacatacctgtatcagagaaggattctaattctcaggtggatttaagcattcgggttactgatgatgatattggtgaaataattcaagtagatggaagcggtgatacatcttccaatgaagaaataggaagtacaagagatgcagatgagaatgaatttctagggaatattgacgggggagatctgaaggtacctgaagaagaagctgacagtatttcaaatgaggattcagccacaaacagtagtgataatgaagaccctcaagtaaacattgtagaagaggaccctttaaattctggagatgatgttagtgaacaggatgtgccagacctgtttgacacggataatgttattgtctgtcagtatgataagattcatcgaagcaagaacaaatggaaattctatttgaaagatggtgttatgtgttttggagggagagactatgtatttgcaaaagccattggtgatgcagagtggtaaaccttgtgagctcagtacatctattttgtgaacatcagttggattatattgcatattgtgaattcatttttattttgaatatagtccagcacagagctgttcaaatttttagttcactgtatggaatttaataaaattataattcagatgcagatacaatt

SEQ ID NO: 12025 - DNA, 1351 bp, Homo sapiens
  source 1..1351: mol_type = unassigned DNA
acgactgcgtgggtgagtcgtctataaaaactcatctctgcgcgtctcttcgccacattcgcttcctgctttcggtgtgtctgttgtgtcttgttgcgggcaccgcagtcgccgtgaagatggcgtctaccagccgtttggatgctcttccaagagtcacatgtccaaaccatccagatgcgattttagtggaggactacagagccggtgatatgatctgtcctgaatgtggcttggttgtaggtgaccgggttattgatgtgggatctgaatggcgaactttcagcaatgacaaagcaacaaaagatccatctcgagttggagattctcagaatcctcttctgagtgatggagatttgtctaccatgattggcaagggcacaggagctgcaagttttgacgaatttggcaattctaagtaccagaatcggagaacaatgagcagttctgatcgggcaatgatgaatgcattcaaagaaatcactaccatggcagacagaatcaatctacctcgaaatatagttgatcgaacaaataatttattcaagcaagtatatgaacagaagagcctgaagggaagagctaatgatgctatagcttctgcttgtctctatattgcctgtagacaagaaggggttcctaggacatttaaagaaatatgtgccgtatcacgaatttctaagaaagaaattggtcggtgttttaaacttattttgaaagcgctagaaaccagtgtggatttgattacaactggggacttcatgtccaggttctgttccaacctttgtcttcctaaacaagtacagatggcagctacacatatagcccgtaaagctgtggaactggacttggttcctgggaggagccccatctctgtggcagcggcagctatttacatggcctcacaggcatcagctgaaaagaggacccaaaaagaaattggagatattgctggtgttgctgatgttacaatcagacagtcctatagactgatctatcctcgagccccagatctgtttcctacagacttcaaatttgacaccccagtggacaaactaccacagctataaattgaggcagctaacgtcaaattcttgaatacaaaactttgcctgttgtacatagcctatacaaaatgctgggttgagcctttcatgaggaaaaacaaaagacatggtacgcattccagggctgaatactattgcttggcattctgtatgtatatactagtgaaacatatttaatgatttaaatttcttatcaaatttcttttgtagcaatctaggaaactgtattttggaagatatttgaaattatgtaattcttgaataaaacatttttcaaaactcaa

SEQ ID NO: 12026 - DNA, 783 bp, Homo sapiens
  source 1..783: mol_type = unassigned DNA
actcatctctgcgcgtctcttcgccacattcgcttcctgctttcggtgtgtctgttgtgtcttgttgcgggcaccgcagtcgccgtgaagatggcgtctaccagccgtttggatgctcttccaagagtcacatgtccaaaccatccagatgcgattttagtggaggactacagagccggtgatatgatctgtcctgaatgtgaccgggttattgatgtgggatctgaatggcgaactttcagcaatgacaaagcaacaaaagatccatctcgagttggagattctcagaatcctcttctgagtgatggagatttgtctaccatgattggcaagggcacaggagctgcaagttttgacgaatttggcaattctaagtaccagaatcggagaacaatgagcagttctgatcgggcaatgatgaatgcattcaaagaaatcactaccatggcagacagaatcaatctacctcgaaatatagttgatcgaacaaataatttattcaagcaagtatatgaacagaagagcctgaagggaagagctaatgatgctatagcttctgcttgtctctatattgcctgtagacaagaaggggttcctaggacatttaaagaaatatgtgccgtatcacgaatttctaagaaagaaattggtcggtgttttaaacttattttgaaagcgctagaaaccagtgtggatttgattacaactggggacttcatgtccaggttctgttccaacctttgtcttcctaaacaagtacagatggcagctacacatatagcc

SEQ ID NO: 12027 - DNA, 770 bp, Homo sapiens
  source 1..770: mol_type = unassigned DNA
gcgtctaccagccgtttggatgctcttccaagagtcacatgtccaaaccatccagatgcgattttagtggaggactacagagccggtgatatgatctgtcctgaatgtggcttggttgtaggtgaccgggttattgatgtgggatctgaatggcgaactttcagcaatgacaaagcaacaaaagatccatctcgagttggagattctcagaatcctcttctgagtgatggagatttgtctaccatgattggcaagggcacaggagctgcaagttttgacgaatttggcaattctaagtaccagaatcggagaacaatgagcagttctgatcgggcaatgatgaatgcattcaaagaaatcactaccatggcagacagaatcaatctacctcgaaatatagttgatcgaacaaataatttattcaagcaagtatatgaacagaagagcctgaagggaagagctaatgatgctatagcttctgcttgtctctatattgcctgtagacaagaaggggttcctaggacatttaaagaaatatgtgccgtatcacgaatttctaagaaagaaattggtcggtgttttaaacttattttgaaagcgctagaaaccagtgtggatttgattacaactggggacttcatgtccagaaattggagatattgctggtgttgctgatgttacaatcagacagtcctatagactgatctatcctcgagccccagatctgtttcctacagacttcaaatttgacaccccagtggacaaactac

SEQ ID NO: 12028 - DNA, 1762 bp, Homo sapiens
  source 1..1762: mol_type = unassigned DNA
gcggtggctgccgggactgagctcctagcacccgatcgggaagtggcgggcggagtcccgggtccagtcgccgcctcagctaccgccgctgccgccgccgccgccgccaccgccagtggtgagaccccgacctggcgggtcagcgctgggcgtgcgtgcgggcaggcgggggcgctgacgagaagcaggaagagggtgcagtgccggcgtgggcggccggccgaggcggaggcgcaggaagggggcggcgagtcgtgcgaggctgcccttctcactcagcattatggatccaagcctgttgagagaaagggagctgttcaaaaaacgagctctttctactcctgtagtagaaaaacgttcagcatcttctgagtcatcatcatcatcgtcaaagaagaagaaaacaaaggtagaacatggaggatcgtcaggctctaaacaaaattctgatcatagcaatggatcatttaacttgaaagctttgtcaggaagctctggatataagtttggtgttcttgctaagattgtgaattacatgaagacacggcatcagcgaggagatacgcatcctctaaccttagatgaaattttggatgaaacacaacatttagatattggactcaagcagaaacaatggctaatgactgaggctttagtcaacaatcccaaaattgaagtaatagatgggaagtatgctttcaagcccaagtacaacgtgagagataagaaggccctacttaggctcttagatcagcatgaccagcgaggattaggaggaattcttttagaagacatagaagaagcactgcccaattcccagaaagctgtcaaggctttgggggaccagatactatttgtaaatcgtcccgataagaagaaaatacttttcttcaatgataagagctgtcagttttctgtggatgaagaatttcagaaactgtggaggagtgtcactgtagattccatggacgaggagaaaattgaagaatatctgaagcgacagggtatttcttccatgcaggaatctggaccaaagaaagtggcccctattcagagaaggaaaaagcctgcttcacagaaaaagcgacgctttaagactcataacgaacacttggctggagtgctgaaggattactctgacattacttccagcaaatagggaacagttttgccctggaacagagttacagatacacaatcaagagtgttcttgctgatgctcggggtctgaagactgtcttcctatctgcttcttgcggctgaggagaggagcagttcagtttacaaaacaagtgcaaattaccaaactcaaagcttatttgagtagaatgggctcatgggcaatgtgatgttccctgttaaccttctgttactccctgggagaaaggcgctgagcgtggcatgcaggtgtctttgctgtgtttttctccacttctaaatggttcctggttcctttcttcctcgtttgttactttagagcaagtttgcccatagtcttgaatgcaatatttgtttattccaaaagaacatatttataataaaatcactgtagaaggatttttaagatgttagtgaattctgtttcttttcattctcggaaatggcaggaagcagctccagtctctgatttccatgggtcacgtgctggggatgtgatgaagcctgcagtctgcactgtgttgctgagcacatggatttcaccactggaacacaggtgtgctgcttgttagcaagcagagcaataaagatgtgctggatgtca

SEQ ID NO: 12029 - DNA, 426 bp, Homo sapiens
  source 1..426: mol_type = unassigned DNA
tgctcatacgcggactgctttctaggctaccttttggagatttgcattatggatccaagcctgttgagagaaagggagctgttcaaaaaacgagctctttctactcctgtagtagaaaaacgttcagcatcttctgagtcatcatcatcatcgtcaaagaagaagaaaacaaaggtagaacatggaggatcgtcaggctctaaacaaaattctgatcatagcaatggatcatttaacttgaaagctttgtcaggaagctctggatataagtttggtgttcttgctaagattgtgaattacatgaagacacggcatcagcgaggagatacgcatcctctaaccttagatgaaattttggatgaaacacaacatttagatattggactcaagcagaaacaatggctaatgactgaggctttagtcaac

SEQ ID NO: 12030 - DNA, 737 bp, Homo sapiens
  source 1..737: mol_type = unassigned DNA
gtcaggaggtttggttcctggccctggctcttccatctgtgcgaccttaaccagacagcttcacttcagatttcacgtattaaaataggaataacactaatacctgtttgctcctagagttgcgagggtcaaatactcattatggatccaagcctgttgagagaaagggagctgttcaaaaaacgagctctttctactcctgtagtagaaaaacgttcagcatcttctgagtcatcatcatcatcgtcaaagaagaagaaaacaaaggtagaacatggaggatcgtcaggctctaaacaaaattctgatcatagcaatggatcatttaacttgaaagctttgtcaggaagctctggatataagtttggtgttcttgctaagattgtgaattacatgaagacacggcatcagcgaggagatacgcatcctctaaccttagatgaaattttggatgaaacacaacatttagatattggactcaagcagaaacaatggctaatgactgaggctttagtcaacaatcccaaaattgaagtaatagatgggaagtatgctttcaagcccaagtacaacgtgagagataagaaggccctacttaggctcttagatcagcatgaccagcgaggattaggaggaattcttttagaagacatagaagaagcactgcccaattcccagaaagctgtcaaggctttgggggaccagatactatttgtaaatcgtcccgataagaagaa

SEQ ID NO: 12031 - DNA, 2731 bp, Homo sapiens
  source 1..2731: mol_type = unassigned DNA
gggtgctgacgtcacgagagagggcggtcccccatttgatgaagttaaccgcgttatatacaagagcgccagcgacagaggcccgttagtttatctcagactcggcctaggtttgctgagtctaaaaagggaccgcggtggaccttttgaggtgaccatagccgccgaggagcataagtgactgcgcactgaggtggccacagtcgctaagaaggttgccatcgcgacgcggctgctcgagggtttcgcttccgggttaggcggccgcagaagcgtagaccgagtagcttgagcgcctcttccggttaccttttcccagcgccagaggcgcctagggttggggtcctcgctcaggcacagagacccgacaccgagcggcggcttccccgggatcgagggacgcgcacgccagaggagacgaaaggaacccgggtcggaccagatcggaaccactgaccattgcccatggcggccctaggccctagcagccagaatgtcactgaatacgtcgttcgagttcctaagaatacaaccaaaaaatataacatcatggcttttaatgcagccgacaaagtcaactttgctacgtggaatcaggctcggctggagcgggacttgagcaacaagaaaatctaccaagaggaggagatgcccgaatcgggcgcgggcagtgagttcaaccgcaagcttcgggaggaggctcggaggaagaagtacggcatcgtcctcaaggagttccggcccgaggaccagccctggctgctccgggtcaacggcaaatcaggcaggaagttcaagggcatcaagaagggaggcgtaacagagaacacgtcctactacatcttcacccagtgccccgacggggccttcgaggccttccccgtgcacaactggtacaatttcacaccgctggcccggcatcgcacgctcactgccgaggaggccgaggaggagtgggagaggaggaacaaggtgctgaaccacttcagcatcatgcagcagcggcggctcaaggatcaggaccaggacgaggatgaggaggagaaggagaaacgtggccgcaggaaggcgagcgagctgcgcatccacgacctggaggacgacctggagatgtcgtccgatgccagtgatgccagtggtgaggaggggggcagagtccccaaggccaagaagaaggcgccgctggccaagggcggcaggaaaaagaagaagaagaagggttcagacgacgaggccttcgaggacagcgatgatggggacttcgagggccaagaggtggactacatgtcagacggctccagtagctcccaagaagagcctgagagcaaggccaaggcgccgcagcaggaggaggggcccaagggtgtcgatgagcagagcgacagtagtgaggagagtgaggaggagaagccgcctgaggaggacaaggaggaggaggaggagaagaaggcacccaccccgcaggagaagaagcgcaggaaagacagcagcgaggagtcggacagctcagaggagagcgacattgacagcgaggcctcctcagccctcttcatggcgaagaagaagacgccacccaagagagagcggaagccgtcgggagggagctcaaggggcaacagccgcccaggcacgcccagcgcagagggtggcagcacctcctccaccctgcgggcggctgccagcaaactcgagcaagggaagcgggtgagcgagatgcctgcagccaagcggttgcggctggacacgggaccccagagcctgtctgggaagtcgacaccccagccaccatcaggcaagacaacacccaacagcggcgacgtgcaggtgactgaggatgccgtgcgccgctacctgacacggaagcccatgaccactaaggacctgctgaaaaagttccagaccaagaagacagggctgagcagcgagcagacagtgaacgtgttggcccagatcctcaagcgactcaaccccgagcgcaagatgatcaacgacaaaatgcacttctccctcaaggagtgaggcttggtccaatacatggctctgccccccagaacttaaggctctcactgccccttcgccatcctagagtgaggctctgtccaatacatggctctgccctccagaacttcaggctctcagtgacccttcgacatcctgcttgctccctgactcccagggccccgtagttagcaattctggaaaagttaagccatctcctcctctggcccttccttctggaatcttcagatgcctgttaggccttcttattgtcctcctcctcctggctcggcctccctcacactgaccaagggcctgtgctgcccactgggtaacttctacagttctcccttccacttccctaagtctctcttcagctgtgacttatccaccacatagcccagtaagtcttcagttttggctgggcatgatggtgagcgcctgcagtcccagctacttgggaggctaagcccagttcaaggctgcagtgaactatgatggtgccactgcattccagcctgggtgacagaatgaaatcctggcacaaaaaaaaaaaaaaagtagccaggcatggtggcgggagcctgttgtcccagctgttccgtaggctgaggcacgagattcacttgaacctgggaggtggaggttgctgtgagctgacaccacgccactgcactccagcctgggtgacagtgagactctgtctcaataaataaaaaataataataaattg

SEQ ID NO: 12032 - DNA, 1705 bp, Homo sapiens
  source 1..1705: mol_type = unassigned DNA
atcatggcttttaatgcagccgacaaagtcaactttgctacgtggaatcaggctcggctggagcgggacttgagcaacaagaaaatctaccaagaggaggagatgcccgaatcgggcgcgggcagtgagttcaaccgcaagcttcgggaggaggctcggaggaagaagtacggcatcgtcctcaaggagttccggcccgaggaccagccctggctgctccgggtcaacggcaaatcaggcaggaagaggaacaaggtgctgaaccacttcagcatcatgcagcagcggcggctcaaggatcaggaccaggacgaggatgaggaggagaaggagaaacgtggccgcaggaaggcgagcgagctgcgcatccacgacctggaggacgacctggagatgtcgtccgatgccagtgatgccagtggtgaggaggggggcagagtccccaaggccaagaagaaggcgccgctggccaagggcggcaggaaaaagaagaagaagaagggttcagacgacgaggccttcgaggacagcgatgatggggacttcgagggccaagaggtggactacatgtcagacggctccagtagctcccaagaagagcctgagagcaaggccaaggcgccgcagcaggaggaggggcccaagggtgtcgatgagcagagcgacagtagtgaggagagtgaggaggagaagccgcctgaggaggacaaggaggaggaggaggagaagaaggcacccaccccgcaggagaagaagcgcaggaaagacagcagcgaggagtcggacagctcagaggagagcgacattgacagcgaggcctcctcagccctcttcatggcgaagaagaagacgccacccaagagagagcggaagccgtcgggagggagctcaaggggcaacagccgcccaggcacgcccagcgcagagggtggcagcacctcctccaccctgcgggcggctgccagcaaactcgagcaagggaagcgggtgagcgagatgcctgcagccaagcggttgcggctggacacgggaccccagagcctgtctgggaagtcgacaccccagccaccatcaggcaagacaacacccaacagcggcgacgtgcaggtgactgaggatgccgtgcgccgctacctgacacggaagcccatgaccactaaggacctgctgaaaaagttccagaccaagaagacagggctgagcagcgagcagacagtgaacgtgttggcccagatcctcaagcgactcaaccccgagcgcaagatgatcaacgacaaaatgcacttctccctcaaggagtgaggcttggtccaatacatggctctgccccccagaacttaaggctctcactgccccttcgccatcctagagtgaggctctgtccaatacatggctctgccctccagaacttcaggctctcagtgacccttcgacatcctgcttgctccctgactcccagggccccgtagttagcaattctggaaaagttaagccatctcctcctctggcccttccttctggaatcttcagatgcctgttaggccttcttattgtcctcctcctcctggctcggcctccctcacactgaccaagggcctgtgctgcccactgggtaacttctacagttctcccttccacttccctaagtctctcttcagctgtgacttatccaccacatagcccagtaagtcttcagttttggctg

SEQ ID NO: 12033 - DNA, 568 bp, Homo sapiens
  source 1..568: mol_type = unassigned DNA
tactgccatgattcgggggatgtgtgcatgcctggaacgggcgccagaggcgcctagggttggggtcctcgctcaggcacagagacccgacaccgagcggcggcttccccgggatcgagggacgcgcacgccagaggagacgaaaggaacccgggtcggaccagatcggaaccactgaccattgcccatggcggccctaggccctagcagccagaatgtcactgaatacgtcgttcgagttcctaagaatacaaccaaaaaatataacatcatggcttttaatgcagccgacaaagtcaactttgctacgtggaatcaggctcggctggagcgggacttgagcaacaagaaaatctaccaagaggaggagatgcccgaatcgggcgcgggcagtgagttcaaccgcaagcttcgggaggaggctcggaggaagaagtacggcatcgtcctcaaggagttccggcccgaggaccagccctggctgctccgggtcaacggcaaatcaggcaggaagttcaagggcatcaagaagggaggcgtaacagagaacacgtcctactacatcttc

SEQ ID NO: 12034 - DNA, 2982 bp, Homo sapiens
  source 1..2982: mol_type = unassigned DNA
gaccccctagtaacagaggcggtggctactgctgcggccactgggtttcggcctcttcccagcagcggctctaagaagcgcagcggaactcgaccggatccaacccagttagttacttcctgtctagagttgtagcttccacctgcaccttctagccaccatggcaacctcatctgaagaagttttgctgattgtaaagaaagtgcgtcaaaagaagcaggatggagctctgtacctcatggcagaaagaattgcttgggcacctgaaggcaaagatagatttacaatcagccatatgtatgcagatattaaatgccagaaaattagtccagaaggaaaagctaaaattcagcttcagctggtcctacatgcaggggacacaactaacttccatttttccaatgaaagcacagcagtgaaagagcgagatgcagtaaaagaccttcttcagcagctgctgcccaaattcaagaggaaagcaaataaagaactggaagagaagaacagaatgctgcaagaagatcctgttttgtttcagctttataaagaccttgttgtgagtcaagtgatcagtgctgaggaattctgggccaatcgtttaaatgtgaatgcaacagatagttcttccacatccaatcataagcaggatgttggcatttctgctgcatttctggctgatgtccggccccaaactgatggctgtaacggtctaagatataatttaacttctgatatcattgagtccatatttaggacctatccagcagtaaaaatgaaatatgcagaaaatgttccccacaacatgacagagaaggaattctggacacgttttttccagtcccattattttcacagggatcggctgaatacagggtcaaaggatctctttgcagaatgtgccaaaatagatgaaaaaggcctaaaaacaatggtttcattaggagtgaaaaacccactactagatttaacagctttggaagataaaccattagatgagggctatggcatttcctctgtgccatctgcttccaattctaaatccataaaagagaatagtaatgctgccatcatcaagagatttaaccatcacagtgccatggtcctggcagctggactcagaaaacaagaagcacaaaatgaacaaactagtgagcccagcaacatggatggaaattccggagatgcagactgctttcagccagcagtcaaaagggcgaaattacaagagtccattgaatatgaagacttggggaaaaataattctgtaaaaacgattgcactaaacctcaagaagtcagataggtattatcatggtccaactccaatccagtcactacagtatgcaacaagtcaggacattattaattcttttcaaagtattagacaagaaatggaagcttatacacccaagttaactcaggttctctcaagtagtgctgccagtagtaccatcacagcactgtcacctggaggggcacttatgcagggaggaacacagcaagccataaaccagatggtgccaaatgatattcaatctgaattgaaacacttatatgtagctgttggagaacttctacgacatttctggtcctgctttcctgttaatacgccattcctagaagaaaaggtagtgaaaatgaaaagtaatttggaacgattccaagttacgaagctctgtccattccaagaaaagattcggagacagtatttaagcacaaatttggtaagtcacatagaagagatgctccagacagcctacaacaagctccacacatggcagtcacggcgtctgatgaagaaaacgtgaggtggccatgatgcttacaggttttgtgagattgagagaactatgacctgcagcaactctggaaacctggcctgacagacaagcagatgacctcacaggagtgataagaaacatctgctccacgccaactcccagagctgatgctattgtacttgcacattggagactgaaaggaaagaagggactaaatgctggggaggtaaattaagacagaaccaaatgagctaagttgcaaatatatatatatacacacacacacatatatgtacatgtgtatgtacatatatattttaaaagactgtttactgcagttgctcaggaactgcttttgattcacattaagctgctttcagaaattaaaaaaacactttttaaagggtgcattgataaaatctgaggttttttggttgtcgtttttttctgtgtacatttttttcctaagtttatggcacagggtagaccttaagtattcctcctccatccttcattcttcaccctccattggatcctcaagttttaatgaattccaattataccttacatcagcaagttaaaaaaagtactttaaaataaagcaaagggagactgttgctcaaccatcaggaaacagttgtcagaagacatcattggttctgtgtttcctacggaaataagaaacgataaatattgcactgaatgtttgtggtttggagtccctgaataataaagagggaatatatttgcagaaagtcgcatagggttttttaatgcagaattttgtcagaagacaatggcgctgcatgtttttctttgagtgcaaatgtacattgctaagatttttttaagatggcatgtgctttgaaaagaagatattgcatttttaagagtttaaaaatcttatgagtgagaaatattaaaaaaatcttattttcacctctttagaagaaataaaagatgtttctcctatctccttttctctagtatttgactgttactgtccttggcgaatcgataatcattgcatagtgactgaaaagcctaagtgcaaaaaaaaaaaaaaaagatgttcttgtttctgaacttcgtgccatattttgttcctgatgggatcaacttaatgtttaagactttagatgtcttgtattaaaaattacacaaaaaaagtaaaactttttatacttacccttttaactcta

SEQ ID NO: 12035 - DNA, 2707 bp, Homo sapiens
  source 1..2707: mol_type = unassigned DNA
aggccgcggtcgcgattacgctctctacggcctgcgaccgcagggccgttgcgggctggagacacggcgccgactggaaccggaggagctctaggccaaatggttgggccagccaggatcccaggacccttcgccgctcgagaccggagagaggaaacgaaacaggcgggaacccgtgggggagggagggaactagcggaaggtgtcatggcggccgcgctcttgagtcacgtgcccagggcccgccttgctacttccggtcacgtgccctcagactcctcgcagccagcgatggaggcgagaccccctagtaacagaggcggtggctactgctgcggccactgggtttcggcctcttcccagcagcggctctaagaagcgcagcggaactcgaccggatccaacccagttagttacttcctgtctagagttgtagcttccacctgagttctcctgggaagaagtgtttgccactcaaggaatacactcaagaaaaacctggaaatcacagaaggcattgtaagatagctacagtgattctgttaaacctcctgaaattggtccttgaacaattaagaggtgctacagatgaccaggaaaatttaccaggcaaattagctgtgagacaattgaccatttgtgcccaatgttcgcaccttctagccaccatggcaacctcatctgaagaagttttgctgattgtaaagaaagtgcgtcaaaagaagcaggatggagctctgtacctcatggcagaaagaattgcttgggcacctgaaggcaaagatagatttacaatcagccatatgtatgcagatattaaatgccagaaaattagtccagaaggaaaagctaaaattcagcttcagctggtcctacatgcaggggacacaactaacttccatttttccaatgaaagcacagcagtgaaagagcgagatgcagtaaaagaccttcttcagcagctgctgcccaaattcaagaggaaagcaaataaagaactggaagagaagaacagaatgctgcaagaagatcctgttttgtttcagctttataaagaccttgttgtgagtcaagtgatcagtgctgaggaattctgggccaatcgtttaaatgtgaatgcaacagatagttcttccacatccaatcataagcaggatgttggcatttctgctgcatttctggctgatgtccggccccaaactgatggctgtaacggtctaagatataatttaacttctgatatcattgagtccatatttaggacctatccagcagtaaaaatgaaatatgcagaaaatgttccccacaacatgacagagaaggaattctggacacgttttttccagtcccattattttcacagggatcggctgaatacagggtcaaaggatctctttgcagaatgtgccaaaatagatgaaaaaggcctaaaaacaatggtttcattaggagtgaaaaacccactactagatttaacagctttggaagataaaccattagatgagggctatggcatttcctctgtgccatctgcttccaattctaaatccataaaagagaatagtaatgctgccatcatcaagagatttaaccatcacagtgccatggtcctggcagctggactcagaaaacaagaagcacaaaatgaacaaactagtgagcccagcaacatggatggaaattccggagatgcagactgctttcagccagcagtcaaaagggcgaaattacaagagtccattgaatatgaagacttggggaaaaataattctgtaaaaacgattgcactaaacctcaagaagtcagataggtattatcatggtccaactccaatccagtcactacagtatgcaacaagtcaggacattattaattcttttcaaagtattagacaagaaatggaagcttatacacccaagttaactcaggttctctcaagtagtgctgccagtagtaccatcacagcactgtcacctggaggggcacttatgcagggaggaacacagcaagccataaaccagatggtgccaaatgatattcaatctgaattgaaacacttatatgtagctgttggagaacttctacgacatttctggtcctgctttcctgttaatacgccattcctagaagaaaaggtagtgaaaatgaaaagtaatttggaacgattccaagttacgaagctctgtccattccaagaaaagattcggagacagtatttaagcacaaatttggtaagtcacatagaagagatgctccagacagcctacaacaagctccacacatggcagtcacggcgtctgatgaagaaaacgtgaggtggccatgatgcttacaggttttgtgagattgagagaactatgacctgcagcaactctggaaacctggcctgacagacaagcagatgacctcacaggagtgataagaaacatctgctccacgccaactcccagagctgatgctattgtacttgcacattggagactgaaaggaaagaagggactaaatgctggggaggtaaattaagacagaaccaaatgagctaagttgcaaatatatatatatacacacacacacatatatgtacatgtgtatgtacatatatattttaaaagactgtttactgcagttgctcaggaactgcttttgattcacattaagctgctttcagaaattaaaaaaacactttttaaagggtgcattgataaaa

SEQ ID NO: 12036 - DNA, 545 bp, Homo sapiens
  source 1..545: mol_type = unassigned DNA
actcctcgcagccagcgatggaggcgagaccccctagtaacagaggcggtggctactgctgcggccactgggtttcggcctcttcccagcagcggctctaagaagcgcagcggaactcgaccggatccaacccagttagttacttcctgtctagagttgtagcttccacctgagttctcctgggaagaagtgtttgccactcaaggaatacactcaagaaaaacctggaaatcacagaaggcattcaccttctagccaccatggcaacctcatctgaagaagttttgctgattgtaaagaaagtgcgtcaaaagaagcaggatggagctctgtacctcatggcagaaagaattgcttgggcacctgaaggcaaagatagatttacaatcagccatatgtatgcagatattaaatgccagaaaattagtccagaaggaaaagctaaaattcagcttcagctggtcctacatgcaggggacacaactaacttccatttttccaatgaaagcacagcagtgaaagagcgagatgcagtaaaagacctt

SEQ ID NO: 12037 - DNA, 2587 bp, Homo sapiens
  source 1..2587: mol_type = unassigned DNA
agactcctcgcagccagcgatggaggcgagaccccctagtaacagaggcggtggctactgctgcggccactgggtttcggcctcttcccagcagcggctctaagaagcgcagcggaactcgaccggatccaacccagttagttacttcctgtctagagttgtagcttccacctgcaccttctagccaccatggcaacctcatctgaagaagttttgctgattgtaaagaaagtgcgtcaaaagaagcaggatggagctctgtacctcatggcagaaagaattgcttgggcacctgaaggcaaagatagatttacaatcagccatatgtatgcagatattaaataatgctgcaagaagatcctgttttgtttcagctttataaagaccttgttgtgagtcaagtgatcagtgctgaggaattctgggccaatcgtttaaatgtgaatgcaacagatagttcttccacatccaatcataagcaggatgttggcatttctgctgcatttctggctgatgtccggccccaaactgatggctgtaacggtctaagatataatttaacttctgatatcattgagtccatatttaggacctatccagcagtaaaaatgaaatatgcagaaaatgttccccacaacatgacagagaaggaattctggacacgttttttccagtcccattattttcacagggatcggctgaatacagggtcaaaggatctctttgcagaatgtgccaaaatagatgaaaaaggcctaaaaacaatggtttcattaggagtgaaaaacccactactagatttaacagctttggaagataaaccattagatgagggctatggcatttcctctgtgccatctgcttccaattctaaatccataaaagagaatagtaatgctgccatcatcaagagatttaaccatcacagtgccatggtcctggcagctggactcagaaaacaagaagcacaaaatgaacaaactagtgagcccagcaacatggatggaaattccggagatgcagactgctttcagccagcagtcaaaagggcgaaattacaagagtccattgaatatgaagacttggggaaaaataattctgtaaaaacgattgcactaaacctcaagaagtcagataggtattatcatggtccaactccaatccagtcactacagtatgcaacaagtcaggacattattaattcttttcaaagtattagacaagaaatggaagcttatacacccaagttaactcaggttctctcaagtagtgctgccagtagtaccatcacagcactgtcacctggaggggcacttatgcagggaggaacacagcaagccataaaccagatggtgccaaatgatattcaatctgaattgaaacacttatatgtagctgttggagaacttctacgacatttctggtcctgctttcctgttaatacgccattcctagaagaaaaggtagtgaaaatgaaaagtaatttggaacgattccaagttacgaagctctgtccattccaagaaaagattcggagacagtatttaagcacaaatttggtaagtcacatagaagagatgctccagacagcctacaacaagctccacacatggcagtcacggcgtctgatgaagaaaacgtgaggtggccatgatgcttacaggttttgtgagattgagagaactatgacctgcagcaactctggaaacctggcctgacagacaagcagatgacctcacaggagtgataagaaacatctgctccacgccaactcccagagctgatgctattgtacttgcacattggagactgaaaggaaagaagggactaaatgctggggaggtaaattaagacagaaccaaatgagctaagttgcaaatatatatatatacacacacacacatatatgtacatgtgtatgtacatatatattttaaaagactgtttactgcagttgctcaggaactgcttttgattcacattaagctgctttcagaaattaaaaaaacactttttaaagggtgcattgataaaatctgaggttttttggttgtcgtttttttctgtgtacatttttttcctaagtttatggcacagggtagaccttaagtattcctcctccatccttcattcttcaccctccattggatcctcaagttttaatgaattccaattataccttacatcagcaagttaaaaaaagtactttaaaataaagcaaagggagactgttgctcaaccatcaggaaacagttgtcagaagacatcattggttctgtgtttcctacggaaataagaaacgataaatattgcactgaatgtttgtggtttggagtccctgaataataaagagggaatatatttgcagaaagtcgcatagggttttttaatgcagaattttgtcagaagacaatggcgctgcatgtttttctttgagtgcaaatgtacattgctaagatttttttaagatggcatgtgctttgaaaagaagatattgcatttttaagagtttaaaaatcttatgagtgagaaatattaaaaaaatcttattttcacctctttagaagaaataaaagatgtttctcct

SEQ ID NO: 12038 - DNA, 2049 bp, Homo sapiens
  source 1..2049: mol_type = unassigned DNA
ctagctaggcggctgggagcgttttcgtggcggggaacggaggttgaattgccctgcctgggctcatagggaaggaggatgtgaaggagcttgtgaaggcagaggaagattattgaataataaaatacagttttgaaaaaaatggatgaagaacctgaaagaactaagcgatgggaaggaggctatgaaagaacatgggagattcttaaagaagatgaatctggatcacttaaagctacaatagaagacattctattcaaggcaaagagaaaaagagtatttgagcaccatggacaagttcgacttggaatgatgcgccacctttatgtggtagtagatggatcaagaacaatggaagaccaagatttaaagcctaatagactgacgtgtactttaaagttgttggaatactttgtagaggaatattttgatcaaaatcctattagtcagattggaataattgtaactaagagtaaaagagctgaaaaattgactgaactttcaggaaacccaagaaaacatataacgtctttgaagaaagctgtggatatgacctgccatggagagccatctctttataattccctaagcatagctatgcagactctaaaacacatgcctggacatacaagtcgagaagtactaatcatctttagcagccttacaacttgcgatccatctaatatttatgatctaatcaagaccctaaaggcagctaaaattagagtatctgttattggattgtctgcagaagttcgcgtttgcactgtacttgctcgtgaaactggtggcacgtaccatgttattttagatgaaagccattacaaagagttgctcacacatcatgttagtcctcctcctgctagctcaagttctgaatgctcacttattcgtatgggatttcctcagcacaccattgcttctttatctgaccaggatgcaaaaccctctttcagcatggcgcatttggatggcaatactgagccagggcttacattaggaggctatttctgcccacagtgtcgggcaaagtactgtgagctacctgttgagtgtaaaatctgtggtcttactttggtgtctgctccccacttggcacggtcttaccatcatttgtttcctttggatgcttttcaagaaattcccctagaagaatataatggagaaagattttgttatggatgtcagggggaattgaaagaccaacatgtttatgtttgtgctgtgtgccaaaatgttttctgtgtggactgtgatgtttttgttcatgattctctacactgttgccctggctgtattcataagattccagctccttcaggtgtttgattccagcatgtagtatacattgtatgtgttaaaaagaaatttgcaactgtgaataaaaggacttctttagaagaagcttcatttaaaacatgaaaggataatctgacttaagaaactttttgctaagaaaaggtaatattttattaaattttaaatttgtgttgtcacagaaatacctgaaattcagtagtacttcattcaattaattttgttttctattattttgagttatactgttttcaaagtcattatgcagtatgtataaacttataagaattaaattgatgtgataattttatgtttttataattaaatatagaatctttatgatttatgttaattcattaatttagtgtaagaagaaagttaagtctgaatgtaaattcagtgtaagatgaaaatttatcaatacttatgaaattaggctgggcgctgtggctcacacctgtaatcccaacactttgggaggctgaggtgggcagatcacctgaggtcaggagttcgagaccagcctggccaacatggtgaaaccccgtcactactaaaaatacaaaaaataattagccgggcatggtggttcacgcctggagtcccagctacttgggaggctgaggcaggagaatcgcttgaacccaggaggcggaggttgcagtgagccaagattgtgccactgcactccaccctagagtgagactccatctcaaaaaaaaaaaaagttat

SEQ ID NO: 12039 - DNA, 2174 bp, Homo sapiens
  source 1..2174: mol_type = unassigned DNA
ggcgcagaggtggggcaggccgtctggctagctaggcggctgggagcgttttcgtggcggggaacggaggttgaattgccctgcctgggctcatagggaaggaggatgtgaaggagcttgtgaaggcagaggaaggctggagtgcagtggcacaaccttggctcgctccagtgtctacctgccaggttcaagtgattctcctgcctcagcctcccgagtagctgggattacagattattgaataataaaatacagttttgaaaaaaatggatgaagaacctgaaagaactaagcgatgggaaggaggctatgaaagaacatgggagattcttaaagaagatgaatctggatcacttaaagctacaatagaagacattctattcaaggcaaagagaaaaagagtatttgagcaccatggacaagttcgacttggaatgatgcgccacctttatgtggtagtagatggatcaagaacaatggaagaccaagatttaaagcctaatagactgacgtgtactttaaagttgttggaatactttgtagaggaatattttgatcaaaatcctattagtcagattggaataattgtaactaagagtaaaagagctgaaaaattgactgaactttcaggaaacccaagaaaacatataacgtctttgaagaaagctgtggatatgacctgccatggagagccatctctttataattccctaagcatagctatgcagactctaaaacacatgcctggacatacaagtcgagaagtactaatcatctttagcagccttacaacttgcgatccatctaatatttatgatctaatcaagaccctaaaggcagctaaaattagagtatctgttattggattgtctgcagaagttcgcgtttgcactgtacttgctcgtgaaactggtggcacgtaccatgttattttagatgaaagccattacaaagagttgctcacacatcatgttagtcctcctcctgctagctcaagttctgaatgctcacttattcgtatgggatttcctcagcacaccattgcttctttatctgaccaggatgcaaaaccctctttcagcatggcgcatttggatggcaatactgagccagggcttacattaggaggctatttctgcccacagtgtcgggcaaagtactgtgagctacctgttgagtgtaaaatctgtggtcttactttggtgtctgctccccacttggcacggtcttaccatcatttgtttcctttggatgcttttcaagaaattcccctagaagaatataatggagaaagattttgttatggatgtcagggggaattgaaagaccaacatgtttatgtttgtgctgtgtgccaaaatgttttctgtgtggactgtgatgtttttgttcatgattctctacactgttgccctggctgtattcataagattccagctccttcaggtgtttgattccagcatgtagtatacattgtatgtgttaaaaagaaatttgcaactgtgaataaaaggacttctttagaagaagcttcatttaaaacatgaaaggataatctgacttaagaaactttttgctaagaaaaggtaatattttattaaattttaaatttgtgttgtcacagaaatacctgaaattcagtagtacttcattcaattaattttgttttctattattttgagttatactgttttcaaagtcattatgcagtatgtataaacttataagaattaaattgatgtgataattttatgtttttataattaaatatagaatctttatgatttatgttaattcattaatttagtgtaagaagaaagttaagtctgaatgtaaattcagtgtaagatgaaaatttatcaatacttatgaaattaggctgggcgctgtggctcacacctgtaatcccaacactttgggaggctgaggtgggcagatcacctgaggtcaggagttcgagaccagcctggccaacatggtgaaaccccgtcactactaaaaatacaaaaaataattagccgggcatggtggttcacgcctggagtcccagctacttgggaggctgaggcaggagaatcgcttgaacccaggaggcggaggttgcagtgagccaagattgtgccactgcactccaccctagagtgagactccatctcaaaaaaaaaaaaagttat

SEQ ID NO: 12040 - DNA, 1956 bp, Homo sapiens
  source 1..1956: mol_type = unassigned DNA
ggctagctaggcggctgggagcgttttcgtggcggggaacggaggttgaattgccctgcctgggctcatagggaaggaggatgtgaaggagcttgtgaaggcagaggaagattattgaataataaaatacagttttgaaaaaaatggatgaagaacctgaaagaactaagcgatgggaaggaggctatgaaagaacatgggagattcttaaagaagatgaatctggatcacttaaagctacaatagaagacattctattcaaggcaaagagaaaaagatgcgccacctttatgtggtagtagatggatcaagaacaatggaagaccaagatttaaagcctaatagactgacgtgtactttaaagttgttggaatactttgtagaggaatattttgatcaaaatcctattagtcagattggaataattgtaactaagagtaaaagagctgaaaaattgactgaactttcaggaaacccaagaaaacatataacgtctttgaagaaagctgtggatatgacctgccatggagagccatctctttataattccctaagcatagctatgcagactctaaaacacatgcctggacatacaagtcgagaagtactaatcatctttagcagccttacaacttgcgatccatctaatatttatgatctaatcaagaccctaaaggcagctaaaattagagtatctgttattggattgtctgcagaagttcgcgtttgcactgtacttgctcgtgaaactggtggcacgtaccatgttattttagatgaaagccattacaaagagttgctcacacatcatgttagtcctcctcctgctagctcaagttctgaatgctcacttattcgtatgggatttcctcagcacaccattgcttctttatctgaccaggatgcaaaaccctctttcagcatggcgcatttggatggcaatactgagccagggcttacattaggaggctatttctgcccacagtgtcgggcaaagtactgtgagctacctgttgagtgtaaaatctgtggtcttactttggtgtctgctccccacttggcacggtcttaccatcatttgtttcctttggatgcttttcaagaaattcccctagaagaatataatggagaaagattttgttatggatgtcagggggaattgaaagaccaacatgtttatgtttgtgctgtgtgccaaaatgttttctgtgtggactgtgatgtttttgttcatgattctctacactgttgccctggctgtattcataagattccagctccttcaggtgtttgattccagcatgtagtatacattgtatgtgttaaaaagaaatttgcaactgtgaataaaaggacttctttagaagaagcttcatttaaaacatgaaaggataatctgacttaagaaactttttgctaagaaaaggtaatattttattaaattttaaatttgtgttgtcacagaaatacctgaaattcagtagtacttcattcaattaattttgttttctattattttgagttatactgttttcaaagtcattatgcagtatgtataaacttataagaattaaattgatgtgataattttatgtttttataattaaatatagaatctttatgatttatgttaattcattaatttagtgtaagaagaaagttaagtctgaatgtaaattcagtgtaagatgaaaatttatcaatacttatgaaattaggctgggcgctgtggctcacacctgtaatcccaacactttgggaggctgaggtgggcagatcacctgaggtcaggagttcgagaccagcctggccaacatggtgaaaccccgtcactactaaaaatacaaaaaataattagccgggcatggtggttcacgcctggagtcccagctacttgggaggctgaggcaggagaatcgcttgaacccaggaggcggaggttgcagtgagccaaga

SEQ ID NO: 12041 - DNA, 1994 bp, Homo sapiens
  source 1..1994: mol_type = unassigned DNA
gaacggaggttgaattgccctgcctgggctcatagggaaggaggatgtgaaggagcttgtgaaggcagaggaaggctggagcgcagcggcgcgatctcggctcactgcaacctccacctcccgggttcaagcgattctccttcctcagcctcccgagtagctggaactacagattattgaataataaaatacagttttgaaaaaaatggatgaagaacctgaaagaactaagcgatgggaaggaggctatgaaagaacatgggagattcttaaagaagatgaatctggatcacttaaagctacaatagaagacattctattcaaggcaaagagaaaaagagtatttgagcaccatggacaagttcgacttggaatgatgcgccacctttatgtggtagtagatggatcaagaacaatggaagaccaagatttaaagcctaatagactgacgtgtactttaaagttgttggaatactttgtagaggaatattttgatcaaaatcctattagtcagattggaataattgtaactaagagtaaaagagctgaaaaattgactgaactttcaggaaacccaagaaaacatataacgtctttgaagaaagctgtggatatgacctgccatggagagccatctctttataattccctaagcatagctatgcagactctaaaacacatgcctggacatacaagtcgagaagtactaatcatctttagcagccttacaacttgcgatccatctaatatttatgatctaatcaagaccctaaaggcagctaaaattagagtatctgttattggattgtctgcagaagttcgcgtttgcactgtacttgctcgtgaaactggtggcacgtaccatgttattttagatgaaagccattacaaagagttgctcacacatcatgttagtcctcctcctgctagctcaagttctgaatgctcacttattcgtatgggatttcctcagcacaccattgcttctttatctgaccaggatgcaaaaccctctttcagcatggcgcatttggatggcaatactgagccagggcttacattaggaggctatttctgcccacagtgtcgggcaaagtactgtgagctacctgttgagtgtaaaatctgtggtcttactttggtgtctgctccccacttggcacggtcttaccatcatttgtttcctttggatgcttttcaagaaattcccctagaagaatataatggagaaagattttgttatggatgtcagggggaattgaaagaccaacatgtttatgtttgtgctgtgtgccaaaatgttttctgtgtggactgtgatgtttttgttcatgattctctacactgttgccctggctgtattcataagattccagctccttcaggtgtttgattccagcatgtagtatacattgtatgtgttaaaaagaaatttgcaactgtgaataaaaggacttctttagaagaagcttcatttaaaacatgaaaggataatctgacttaagaaactttttgctaagaaaaggtaatattttattaaattttaaatttgtgttgtcacagaaatacctgaaattcagtagtacttcattcaattaattttgttttctattattttgagttatactgttttcaaagtcattatgcagtatgtataaacttataagaattaaattgatgtgataattttatgtttttataattaaatatagaatctttatgatttatgttaattcattaatttagtgtaagaagaaagttaagtctgaatgtaaattcagtgtaagatgaaaatttatcaatacttatgaaattaggctgggcgctgtggctcacacctgtaatcccaacactttgggaggctgaggtgggcagatcacctgaggtcaggagttcgagaccagcctggccaacatggtgaaaccccgtcactactaaaaatacaaaaaataattagccgggcatggtggttcacgcctggagtcccagctact

SEQ ID NO: 12042 - DNA, 1735 bp, Homo sapiens
  source 1..1735: mol_type = unassigned DNA
attctcatcctcttcacttttccactcctccccttacctcccttctcttctgaattctccattctgggctcttgcctgtgaaatctttctttgctttccccatcttttcctcgcattttttcaccatctttccctcaatctccaggagccaatgcgagactttggctccgattaagcgacggcccgagactcggggtgcgcgaggaggatcgacagagtggtgatggagagcaccccttcaaggggactgaaccgagtacacctacaatgcaggaatctgcaggaattcttagggggcctgagccctggggtattggaccgattgtatgggcaccctgccacatgtctggctgtcttcagggagctcccatccttggctaagaactgggtgatgcggatgctctttctggagcagcctttgccacaggctgctgtagctctgtgggtaaagaaggaattcagcaaggctcaggaggaaagtacagggctgctgagcggcctccggatctggcacacacagctgctcccaggcgggctccagggcctcatcctcaaccccattttccgccagaacctccgcattgcccttctgggtggggggaaggcctggtctgatgacacaagtcagctgggaccagacaagcatgcccgggacgttccctcccttgacaagtacgccgaggagcgatgggaggtggtcttgcacttcatggtgggctcccccagtgcagctgtcagccaggacttggctcagctcctcagccaggctgggctcatgaagagtactgaacctggagagccgccctgcattacttccgctggcttccagttcctgttgctggacaccccggctcagctctggtactttatgttgcagtatttgcagacagcccagagccggggcatggacctggtagagattctctccttcctcttccagctcagcttctctactctgggcaaggattactctgtggaaggtatgagtgattctctgttgaacttcctgcaacatctgcgtgagtttgggcttgttttccagaggaagaggaaatctcggcgttactaccccacacgcctggccatcaatctctcatcaggtgtctctggagctgggggcactgtgcatcagccaggtttcattgtcgtggaaaccaattaccgactgtatgcctacacggagtcggagctgcagattgccctcattgccctcttctctgagatgctctatcggttccccaacatggtggtggcgcaggtgacccgggagagtgtgcagcaggcaatcgccagtggcatcacagcccagcagataatccatttcctaaggacaagagcccacccagtgatgctcaaacagacacctgtgctgccccccaccatcaccgaccagatccggctctgggagctggaaagggacagactccggttcactgagggtgtcctgtataaccagttcctgtcgcaagtggactttgagctgctgctggcccacgcgcgggagctgggcgtgctcgtgttcgagaactcggccaagcggctcatggtggtgaccccggccgggcacagcgacgtcaagcgcttttggaagcggcagaaacatagctcctgagagcgcgggacttggacacggacctcggcgggcgggactgggcggggcggggcatcagaactcaggtgttttttatttacgcgtcagggcttttcttgtttaataaagttatgatagctagca

SEQ ID NO: 12043 - DNA, 1673 bp, Homo sapiens
  source 1..1673: mol_type = unassigned DNA
ctcccttctcttctgaattctccattctgggctcttgcctgtgaaatctttctttgctttccccatcttttcctcgcattttttcaccatctttccctcaatctccaggagccaatgcgagactttggctccgattaagcgacggcccgagactcggggtgatggagagcaccccttcaaggggactgaaccgagtacacctacaatgcaggaatctgcaggaattcttagggggcctgagccctggggtattggaccgattgtatgggcaccctgccacatgtctggctgtcttcagggagctcccatccttggctaagaactgggtgatgcggatgctctttctggagcagcctttgccacaggctgctgtagctctgtgggtaaagaaggaattcagcaaggctcaggaggaaagtacagggctgctgagcggcctccggatctggcacacacagctgctcccaggcgggctccagggcctcatcctcaaccccattttccgccagaacctccgcattgcccttctgggtggggggaaggcctggtctgatgacacaagtcagctgggaccagacaagcatgcccgggacgttccctcccttgacaagtacgccgaggagcgatgggaggtggtcttgcacttcatggtgggctcccccagtgcagctgtcagccaggacttggctcagctcctcagccaggctgggctcatgaagagtactgaacctggagagccgccctgcattacttccgctggcttccagttcctgttgctggacaccccggctcagctctggtactttatgttgcagtatttgcagacagcccagagccggggcatggacctggtagagattctctccttcctcttccagctcagcttctctactctgggcaaggattactctgtggaaggtatgagtgattctctgttgaacttcctgcaacatctgcgtgagtttgggcttgttttccagaggaagaggaaatctcggcgttactaccccacacgcctggccatcaatctctcatcaggtgtctctggagctgggggcactgtgcatcagccaggtttcattgtcgtggaaaccaattaccgactgtatgcctacacggagtcggagctgcagattgccctcattgccctcttctctgagatgctctatcggttccccaacatggtggtggcgcaggtgacccgggagagtgtgcagcaggcaatcgccagtggcatcacagcccagcagataatccatttcctaaggacaagagcccacccagtgatgctcaaacagacacctgtgctgccccccaccatcaccgaccagatccggctctgggagctggaaagggacagactccggttcactgagggtgtcctgtataaccagttcctgtcgcaagtggactttgagctgctgctggcccacgcgcgggagctgggcgtgctcgtgttcgagaactcggccaagcggctcatggtggtgaccccggccgggcacagcgacgtcaagcgcttttggaagcggcagaaacatagctcctgagagcgcgggacttggacacggacctcggcgggcgggactgggcggggcggggcatcagaactcaggtgttttttatttacgcgtcagggcttttcttgtttaataaagttatgatagctagca

SEQ ID NO: 12044 - DNA, 1735 bp, Homo sapiens; identical to SEQ ID NO: 12042
  source 1..1735: mol_type = unassigned DNA

SEQ ID NO: 12045 - DNA, 1673 bp, Homo sapiens; identical to SEQ ID NO: 12043
  source 1..1673: mol_type = unassigned DNA

SEQ ID NO: 12046 - DNA, 1735 bp, Homo sapiens; identical to SEQ ID NO: 12042
  source 1..1735: mol_type = unassigned DNA

SEQ ID NO: 12047 - DNA, 598 bp, Homo sapiens
  source 1..598: mol_type = unassigned DNA
cccttctcttctgaattctccattctgggctcttgcctgtgaaatctttctttgctttccccatcttttcctcgcattttttcaccatctttccctcaatctccaggagccaatgcgagactttggctccgattaagcgacggcccgagactcggggtgcgcgaggaggatcgacagagtggtgatggagagcaccccttcaaggggactgaaccgagtacacctacaatgcaggaatctgcaggaattcttagggggcctgagccctggggtattggaccgattgtatgggcaccctgccacatgtctggctgtcttcagggagctcccatccttggctaagaactgggtgatgcggatgctctttctggagcagcctttgccacaggctgctgtagctctgtgggtaaagaaggaattcagcaaggctcaggaggaaagtacagggctgctgagcggcctccggatctggcacacacagctgctcccaggcgggctccagggcctcatcctcaaccccattttccgccagaacctccgcattgcccttctgggtggtacagggattacaggtgtgagccactgcgcctggccaggg

SEQ ID NO: 12048 - DNA, 1673 bp, Homo sapiens
  source 1..1673: mol_type = unassigned DNA
ctcccttctcttctgaattttccattctgggctcttgcctgtgaaatctttctttgctttccccatcttttcctcgcattttttcaccatctttccctcaatctccaggagccaatgcgagactttggctccgattaagcgacggcccgagactcggggtgatggagagcaccccttcaaggggactgaaccgagtacacctacaatgcaggaatctgcaggaattcttagggggcctgagccctggggtattggaccgattgtatgggcaccctgccacatgtctggctgtcttcagggagctcccatccttggctaagaactgggtgatgcggatgctctttctggagcagcctttgccacaggctgctgtagctctgtgggtaaagaaggaattcagcaaggctcaggaggaaagtacagggctgctgagcggcctccggatctggcacacacagctgctcccaggcgggctccagggcctcatcctcaaccccattttccgccagaacctccgcattgcccttctgggtggggggaaggcctggtctgatgacacaagtcagctgggaccagacaagcatgcccgggacgttccctcccttgacaagtacgccgaggagcgatgggaggtggtcttgcacttcatggtgggctcccccagtgcagctgtcagccaggacttggctcagctcctcagccaggctgggctcatgaagagtactgaacctggagagccgccctgcattacttccgctggcttccagttcctgttgctggacaccccggctcagctctggtactttatgttgcagtatttgcagacagcccagagccggggcatggacctggtagagattctctccttcctcttccagctcagcttctctactctgggcaaggattactctgtggaaggtatgagtgattctctgttgaacttcctgcaacatctgcgtgagtttgggcttgttttccagaggaagaggaaatctcggcgttactaccccacacgcctggccatcaatctctcatcaggtgtctctggagctgggggcactgtgcatcagccaggtttcattgtcgtggaaaccaattaccgactgtatgcctacacggagtcggagctgcagattgccctcattgccctcttctctgagatgctctatcggttccccaacatggtggtggcgcaggtgacccgggagagtgtgcagcaggcaatcgccagtggcatcacagcccagcagataatccatttcctaaggacaagagcccacccagtgatgctcaaacagacacctgtgctgccccccaccatcaccgaccagatccggctctgggagctggaaagggacagactccggttcactgagggtgtcctgtataaccagttcctgtcgcaagtggactttgagctgctgctggcccacgcgcgggagctgggcgtgctcgtgttcgagaactcggccaagcggctcatggtggtgaccccggccgggcacagcgacgtcaagcgcttttggaagcggcagaaacatagctcctgagagcgcgggacttggacacggacctcggcgggcgggactgggcggggcggggcatcagaactcaggtgttttttatttacgcgtcagggcttttcttgtttaataaagttatgatagctagca

SEQ ID NO: 12049 - DNA, 598 bp, Homo sapiens; identical to SEQ ID NO: 12047
  source 1..598: mol_type = unassigned DNA

SEQ ID NO: 12050 - DNA, 1673 bp, Homo sapiens; identical to SEQ ID NO: 12043
  source 1..1673: mol_type = unassigned DNA

SEQ ID NO: 12051 - DNA, 598 bp, Homo sapiens
  source 1..598: mol_type = unassigned DNA
cccttctcttctgaattctccattctgggctctttcctgtgaaatctttctttgctttccccatcttttcctcgcattttttcaccatctttccctcaatctccaggagccaatgcgagactttggctccgattaagcgacggcccgagacttggggtgcgcgaggaggatcgacagagtggtgatggagagcaccccttcaaggggactgaaccgagtacacctacaatgcaggaatctgcaggaattcttagggggcctgagccctggggtattggaccgattgtatgggcaccctgccacatgtctggctgtcttcagggagctcccatccttggctaagaactgggtgatgcggatgctctttctggagcagcctttgccacaggctgctgtagctctgtgggtaaagaaggaattcagcaaggctcaggaggaaagtacagggctgctgagcggcctccggatctggcacacccagctgctcccaggcgggctccagggcctcatcctcaaccccattttccgccagaacctccgcattgcccttctgggtggtacagggattacaggtgtgagccactgcgcctggccaggg

SEQ ID NO: 12052 - DNA, 1735 bp, Homo sapiens
  source 1..1735: mol_type = unassigned DNA
attctcatcctcttcacttttccactcctccccttacctcccttctcttctgaattttccattctgggctcttgcctgtgaaatctttctttgctttccccatcttttcctcgcattttttcaccatctttccctcaatctccaggagccaatgcgagactttggctccgattaagcgacggcccgagactcggggtgcgcgaggaggatcgacagagtggtgatggagagcaccccttcaaggggactgaaccgagtacacctacaatgcaggaatctgcaggaattcttagggggcctgagccctggggtattggaccgattgtatgggcaccctgccacatgtctggctgtcttcagggagctcccatccttggctaagaactgggtgatgcggatgctctttctggagcagcctttgccacaggctgctgtagctctgtgggtaaagaaggaattcagcaaggctcaggaggaaagtacagggctgctgagcggcctccggatctggcacacacagctgctcccaggcgggctccagggcctcatcctcaaccccattttccgccagaacctccgcattgcccttctgggtggggggaaggcctggtctgatgacacaagtcagctgggaccagacaagcatgcccgggacgttccctcccttgacaagtacgccgaggagcgatgggaggtggtcttgcacttcatggtgggctcccccagtgcagctgtcagccaggacttggctcagctcctcagccaggctgggctcatgaagagtactgaacctggagagccgccctgcattacttccgctggcttccagttcctgttgctggacaccccggctcagctctggtactttatgttgcagtatttgcagacagcccagagccggggcatggacctggtagagattctctccttcctcttccagctcagcttctctactctgggcaaggattactctgtggaaggtatgagtgattctctgttgaacttcctgcaacatctgcgtgagtttgggcttgttttccagaggaagaggaaatctcggcgttactaccccacacgcctggccatcaatctctcatcaggtgtctctggagctgggggcactgtgcatcagccaggtttcattgtcgtggaaaccaattaccgactgtatgcctacacggagtcggagctgcagattgccctcattgccctcttctctgagatgctctatcggttccccaacatggtggtggcgcaggtgacccgggagagtgtgcagcaggcaatcgccagtggcatcacagcccagcagataatccatttcctaaggacaagagcccacccagtgatgctcaaacagacacctgtgctgccccccaccatcaccgaccagatccggctctgggagctggaaagggacagactccggttcactgagggtgtcctgtataaccagttcctgtcgcaagtggactttgagctgctgctggcccacgcgcgggagctgggcgtgctcgtgttcgagaactcggccaagcggctcatggtggtgaccccggccgggcacagcgacgtcaagcgcttttggaagcggcagaaacatagctcctgagagcgcgggacttggacacggacctcggcgggcgggactgggcggggcggggcatcagaactcaggtgttttttatttacgcgtcagggcttttcttgtttaataaagttatgatagctagca

SEQ ID NO: 12053 - DNA, 1673 bp, Homo sapiens; identical to SEQ ID NO: 12043
  source 1..1673: mol_type = unassigned DNA

SEQ ID NO: 12054 - DNA, 1673 bp, Homo sapiens
  source 1..1673: mol_type = unassigned DNA
ctcccttctcttctgaattctccattctgggctctttcctgtgaaatctttctttgctttccccatcttttcctcgcattttttcaccatctttccctcaatctccaggagccaatgcgagactttggctccgattaagcgacggcccgagacttggggtgatggagagcaccccttcaaggggactgaaccgagtacacctacaatgcaggaatctgcaggaattcttagggggcctgagccctggggtattggaccgattgtatgggcaccctgccacatgtctggctgtcttcagggagctcccatccttggctaagaactgggtgatgcggatgctctttctggagcagcctttgccacaggctgctgtagctctgtgggtaaagaaggaattcagcaaggctcaggaggaaagtacagggctgctgagcggcctccggatctggcacacccagctgctcccaggcgggctccagggcctcatcctcaaccccattttccgccagaacctccgcattgcccttctgggtggggggaaggcctggtctgatgacacaagtcagctgggaccagacaagcatgcccgggacgttccctcccttgacaagtacgccgaggagcgatgggaggtggtcttgcacttcatggtgggctcccccagtgcagctgtcagccaggacttggctcagctcctcagccaggctgggctcatgaagagtactgaacctggagagccgccctgcattacttccgctggcttccagttcctgttgctggacaccccggctcagctctggtactttatgttgcagtatttgcagacagcccagagccggggcatggacctggtagagattctctccttcctcttccagctcagcttctctactctgggcaaggattactctgtggaaggtatgagtgattctctgttgaacttcctgcaacatctgcgtgagtttgggcttgttttccagaggaagaggaaatctcggcgttactaccccacacgcctggccatcaatctctcatcaggtgtctctggagctgggggcactgtgcatcagccaggtttcattgtcgtggaaaccaattaccgactgtatgcctacacggagtcggagctgcagattgccctcattgccctcttctctgagatgctctatcggttccccaacatggtggtggcgcaggtgacccgggagagtgtgcagcaggcaatcgccagtggcatcacagcccagcagataatccatttcctaaggacaagagcccacccagtgatgctcaaacagacacctgtgctgccccccaccatcaccgaccagatccggctctgggagctggaaagggacagactccggttcactgagggtgtcctgtataaccagttcctgtcgcaagtggactttgagctgctgctggcccacgcgcgggagctgggcgtgctcgtgttcgagaactcggccaagcggctcatggtggtgaccccggccgggcacagcgacgtcaagcgcttttggaagcggcagaaacatagctcctgagagcgcgggacttggacacggacctcggcgggcgggactgggcggggcggggcatcagaactcaggtgttttttatttacgcgtcagggcttttcttgtttaataaagttatgatagctagca

SEQ ID NO: 12055 - DNA, 1735 bp, Homo sapiens
  source 1..1735: mol_type = unassigned DNA
attctcatcctcttcacttttccactcctccccttacctcccttctcttctgaattctccattctgggctctttcctgtgaaatctttctttgctttccccatcttttcctcgcattttttcaccatctttccctcaatctccaggagccaatgcgagactttggctccgattaagcgacggcccgagacttggggtgcgcgaggaggatcgacagagtggtgatggagagcaccccttcaaggggactgaaccgagtacacctacaatgcaggaatctgcaggaattcttagggggcctgagccctggggtattggaccgattgtatgggcaccctgccacatgtctggctgtcttcagggagctcccatccttggctaagaactgggtgatgcggatgctctttctggagcagcctttgccacaggctgctgtagctctgtgggtaaagaaggaattcagcaaggctcaggaggaaagtacagggctgctgagcggcctccggatctggcacacccagctgctcccaggcgggctccagggcctcatcctcaaccccattttccgccagaacctccgcattgcccttctgggtggggggaaggcctggtctgatgacacaagtcagctgggaccagacaagcatgcccgggacgttccctcccttgacaagtacgccgaggagcgatgggaggtggtcttgcacttcatggtgggctcccccagtgcagctgtcagccaggacttggctcagctcctcagccaggctgggctcatgaagagtactgaacctggagagccgccctgcattacttccgctggcttccagttcctgttgctggacaccccggctcagctctggtactttatgttgcagtatttgcagacagcccagagccggggcatggacctggtagagattctctccttcctcttccagctcagcttctctactctgggcaaggattactctgtggaaggtatgagtgattctctgttgaacttcctgcaacatctgcgtgagtttgggcttgttttccagaggaagaggaaatctcggcgttactaccccacacgcctggccatcaatctctcatcaggtgtctctggagctgggggcactgtgcatcagccaggtttcattgtcgtggaaaccaattaccgactgtatgcctacacggagtcggagctgcagattgccctcattgccctcttctctgagatgctctatcggttccccaacatggtggtggcgcaggtgacccgggagagtgtgcagcaggcaatcgccagtggcatcacagcccagcagataatccatttcctaaggacaagagcccacccagtgatgctcaaacagacacctgtgctgccccccaccatcaccgaccagatccggctctgggagctggaaagggacagactccggttcactgagggtgtcctgtataaccagttcctgtcgcaagtggactttgagctgctgctggcccacgcgcgggagctgggcgtgctcgtgttcgagaactcggccaagcggctcatggtggtgaccccggccgggcacagcgacgtcaagcgcttttggaagcggcagaaacatagctcctgagagcgcgggacttggacacggacctcggcgggcgggactgggcggggcggggcatcagaactcaggtgttttttatttacgcgtcagggcttttcttgtttaataaagttatgatagctagca

SEQ ID NO: 12056 - DNA, 598 bp, Homo sapiens; identical to SEQ ID NO: 12047
  source 1..598: mol_type = unassigned DNA

SEQ ID NO: 12057 - DNA, 598 bp, Homo sapiens
  source 1..598: mol_type = unassigned DNA
cccttctcttctgaattttccattctgggctcttgcctgtgaaatctttctttgctttccccatcttttcctcgcattttttcaccatctttccctcaatctccaggagccaatgcgagactttggctccgattaagcgacggcccgagactcggggtgcgcgaggaggatcgacagagtggtgatggagagcaccccttcaaggggactgaaccgagtacacctacaatgcaggaatctgcaggaattcttagggggcctgagccctggggtattggaccgattgtatgggcaccctgccacatgtctggctgtcttcagggagctcccatccttggctaagaactgggtgatgcggatgctctttctggagcagcctttgccacaggctgctgtagctctgtgggtaaagaaggaattcagcaaggctcaggaggaaagtacagggctgctgagcggcctccggatctggcacacacagctgctcccaggcgggctccagggcctcatcctcaaccccattttccgccagaacctccgcattgcccttctgggtggtacagggattacaggtgtgagccactgcgcctggccaggg

SEQ ID NO: 12058 - DNA, 598 bp, Homo sapiens; identical to SEQ ID NO: 12047
  source 1..598: mol_type = unassigned DNA

SEQ ID NO: 12059 - DNA, 1735 bp, Homo sapiens; identical to SEQ ID NO: 12042
  source 1..1735: mol_type = unassigned DNA

SEQ ID NO: 12060 - DNA, 1232 bp, Homo sapiens
  source 1..1232: mol_type = unassigned DNA
actcctccccttacctcccttctcttctgaattctccattctgggctcttgcctgtgaaatctttctttgctttccccatcttttcctcgcattttttcaccatctttccctcaatctccaggagccaatgcgagactttggctccgattaagcgacggcccgagactcggggtgcgcgaggaggatcgacagagtgggagctcccatccttggctaagaactgggtgatgcggatgctctttctggagcagcctttgccacaggctgctgtagctctgtgggtaaagaaggaattcagcaaggctcaggaggaaagtacagggctgctgagcggcctccggatctggcacacacagctgctcccaggcgggctccagggcctcatcctcaaccccattttccgccagaacctccgcattgcccttctgggtggggggaaggcctggtctgatgacacaagtcagctgggaccagacaagcatgcccgggacgttccctcccttgacaagtacgccgaggagcgatgggaggtggtcttgcacttcatggtgggctcccccagtgcagctgtcagccaggacttggctcagctcctcagccaggctgggctcatgaagagtactgaacctggagagccgccctgcattacttccgctggcttccagttcctgttgctggacaccccggctcagctctggtactttatgttgcagtatttgcagacagcccagagccggggcatggacctggtagagattctctccttcctcttccagctcagcttctctactctgggcaaggattactctgtggaaggtatgagtgattctctgttgaacttcctgcaacatctgcgtgagtttgggcttgttttccagaggaaggtatgagcgcctagataagtggcttccagggaagaaacagggtggtgtgttgcctttgcctttaaaaaggagtggggtcttggggcagtagcaggaagcagttgccagaactgaatacttgggtctctcgggggagagaagttgggggttgaggttctgcatcttgggagggatctgatatttcaggcaggaagatgtaaggcagtgacttctgagacaaggcatctgcctttctattcttttcagaggaaatctcggcgttactaccccacacgcctggccatcaatctctcatcaggtgtctctggagctgggggcactgtgcatcagccaggtttcattgtcgt

SEQ ID NO: 12061 - DNA, 1232 bp, Homo sapiens; identical to SEQ ID NO: 12060
  source 1..1232: mol_type = unassigned DNA

SEQ ID NO: 12062 - DNA, 1232 bp, Homo sapiens
  source 1..1232: mol_type = unassigned DNA
actcctccccttacctcccttctcttctgaattttccattctgggctcttgcctgtgaaatctttctttgctttccccatcttttcctcgcattttttcaccatctttccctcaatctccaggagccaatgcgagactttggctccgattaagcgacggcccgagactcggggtgcgcgaggaggatcgacagagtgggagctcccatccttggctaagaactgggtgatgcggatgctctttctggagcagcctttgccacaggctgctgtagctctgtgggtaaagaaggaattcagcaaggctcaggaggaaagtacagggctgctgagcggcctccggatctggcacacacagctgctcccaggcgggctccagggcctcatcctcaaccccattttccgccagaacctccgcattgcccttctgggtggggggaaggcctggtctgatgacacaagtcagctgggaccagacaagcatgcccgggacgttccctcccttgacaagtacgccgaggagcgatgggaggtggtcttgcacttcatggtgggctcccccagtgcagctgtcagccaggacttggctcagctcctcagccaggctgggctcatgaagagtactgaacctggagagccgccctgcattacttccgctggcttccagttcctgttgctggacaccccggctcagctctggtactttatgttgcagtatttgcagacagcccagagccggggcatggacctggtagagattctctccttcctcttccagctcagcttctctactctgggcaaggattactctgtggaaggtatgagtgattctctgttgaacttcctgcaacatctgcgtgagtttgggcttgttttccagaggaaggtatgagcgcctagataagtggcttccagggaagaaacagggtggtgtgttgcctttgcctttaaaaaggagtggggtcttggggcagtagcaggaagcagttgccagaactgaatacttgggtctctcgggggagagaagttgggggttgaggttctgcatcttgggagggatctgatatttcaggcaggaagatgtaaggcagtgacttctgagacaaggcatctgcctttctattcttttcagaggaaatctcggcgttactaccccacacgcctggccatcaatctctcatcaggtgtctctggagctgggggcactgtgcatcagccaggtttcattgtcgt

SEQ ID NO: 12063 - DNA, 1232 bp, Homo sapiens; identical to SEQ ID NO: 12060
  source 1..1232: mol_type = unassigned DNA

SEQ ID NO: 12064 - DNA, 1232 bp, Homo sapiens
  source 1..1232: mol_type = unassigned DNA
actcctccccttacctcccttctcttctgaattctccattctgggctcttgcctgtgaaatctttctttgctttccccatcttttcctcgcattttttcaccatctttccctcaatctccaggagccaatgcgagactttggctccgattaagcgacggcccgagactcggggtgcgcgaggaggatcgacagagtgggagctcccatccttggctaagaactgggtgatgcggatgctctttctggagcagcctttgccacaggctgctgtagctctgtgggtaaagaaggaattcagcaaggctcaggaggaaagtacagggctgctgagcggcctccggatctggcacacacagctgctcccaggcgggctccagggcctcatcctcaaccccattttccgccagaacctccgcattgcccttctgggtggggggaaggcctggtctgatgacacaagtcagctgggaccagacaagcatgcccgggacgttccctcccttgacaagtacgccgaggagcgatgggaggtggtcttgcacttcatggtgggctcccccagtgcagctgtcagccaggacttggctcagctcctcagccaggctgggctcatgaagagtactgaacctggagagccgccctgcattacttccgctggcttccagttcctgttgctggacaccccggctcagctctggtactttatgttgcagtatttgcagacagcccagagccggggcatggacctggtagagattctctccttcctcttccagctcagcttctctactctgggcaaggattactctgtggaaggtatgagtgattctctgttgaacttcctgcaacatctgcgtgagtttgggcttgttttccagaggaaggtatgagcgcctagataagtggcttccagggaagaaacagggtggtgtgttgcctttgcctttaaaaaggagtggggtcttggggcagtagtaggaagcagttgccagaactgaatacttgggtctctcgggggagagaagttgggggttgaggttctgcatcttgggagggatctgatatttcaggcaggaagatgtaaggcagtgacttctgagacaaggcatctgcctttctattcttttcagaggaaatctcggcgttactaccccacacgcctggccatcaatctctcatcaggtgtctctggagctgggggcactgtgcatcagccaggtttcattgtcgt

SEQ ID NO: 12065 - DNA, 1232 bp, Homo sapiens
  source 1..1232: mol_type = unassigned DNA
actcctccccttacctcccttctcttctgaattctccattctgggctctttcctgtgaaatctttctttgctttccccatcttttcctcgcattttttcaccatctttccctcaatctccaggagccaatgcgagactttggctccgattaagcgacggcccgagacttggggtgcgcgaggaggatcgacagagtgggagctcccatccttggctaagaactgggtgatgcggatgctctttctggagcagcctttgccacaggctgctgtagctctgtgggtaaagaaggaattcagcaaggctcaggaggaaagtacagggctgctgagcggcctccggatctggcacacccagctgctcccaggcgggctccagggcctcatcctcaaccccattttccgccagaacctccgcattgcccttctgggtggggggaaggcctggtctgatgacacaagtcagctgggaccagacaagcatgcccgggacgttccctcccttgacaagtacgccgaggagcgatgggaggtggtcttgcacttcatggtgggctcccccagtgcagctgtcagccaggacttggctcagctcctcagccaggctgggctcatgaagagtactgaacctggagagccgccctgcattacttccgctggcttccagttcctgttgctggacaccccggctcagctctggtactttatgttgcagtatttgcagacagcccagagccggggcatggacctggtagagattctctccttcctcttccagctcagcttctctactctgggcaaggattactctgtggaaggtatgagtgattctctgttgaacttcctgcaacatctgcgtgagtttgggcttgttttccagaggaaggtatgagcgcctagataagtggcttccagggaagaaacagggtggtgtgttgcctttgcctttaaaaaggagtggggtcttggggcagtagcaggaagcagttgccagaactgaatacttgggtctctcgggggagagaagttgggggttgaggttctgcatcttgggagggatctgatatttcaggcaggaagatgtaaggcagtgacttctgagacaaggcatctgcctttctattcttttcagaggaaatctcggcgttactaccccacacgcctggccatcaatctctcatcaggtgtctctggagctgggggcactgtgcatcagccaggtttcattgtcgt

SEQ ID NO: 12066 - DNA, 2125 bp, Homo sapiens
  source 1..2125: mol_type = unassigned DNA
actctgccggcaacgccgaggcgcttctgcatctgtgggccgagcattcttcaggtcatctgaaccttctgagaaaacatggtcaacgtcttgaaaggagtgcttatagaatgtgatcctgccatgaagcagtttctgctgtacttggatgagtccaatgccctggggaagaagttcatcattcaagacattgatgacactcacgtctttgtaatagcagaattggttaatgtcctccaggagcgagtgggtgaattaatggaccaaaatgctttttcccttacccagaaatgaaaatactcaatatggaccatttaggaattataagcagcaactgtgaaagacttgccactcaatatcttaggtgactgattagacatagagggttgttttaggagcatgccacgggaaagactgagggatcatgatcatttgttcagaaaaaaagcccctgaactgattttgttaccatagaatttaaaaaaaaaaaaagctttaacagttggctgtaatttggcttttattatcctttattaaaatacaaatgtcaatgcttttcctgcctttttaataccatgtcagtgtaacataggtatttattttgctcatccctgtgatctgtgcatttttgctgcgtggatgtgattgtttggtttcagttagaaacgtcatagatttgctgtttgaatatgccaaggtggggacttagacattatgtacgtctcacaaatcctacctgcataccagtcagctctattgaggaagacaatgtaaaactaatgtaaactacagtttgcatttccctgaaaacagaatattgtttttaagagggttagaaacaaccagtgggaaaggcacatgctgctttgtttagtttttccttgttcaaactttgttggtcacattttcccatctgtattcttttttattaagaaaacagcttagggaggctgaggtgggaggattgcttgagcccaggagtccgaggttgctacaaaaacaccattgcactctggcctggacaacagagagaccctgcctcaaaaaaaaaaaaaaaaaaaaaaaaaattctacttgtaccttattccctatgagaatacttatcaaacttatctaaaaaagaaaaataggaacagccatatgcaaagtcagcccaacaggaaaggacatattagattaaaatacattgcggcctgggcttagtggctcacacctgtaatcccagcactttgggaggctgaggcaggcagatcgcttgagtccaggagtcgaaaccctgtctctacaaaaaaaaaaatacaaaaatctgcctgttgtcccagccactggggaggctgaggtaggaggtcaaggctgcagtgaaccttgatcattgctactgccactccagcctaggtgacagagtgagaccctgtctccaaaaaaaaaagtgtatatgtatgtgtgtatatatagcaagagagagttctgtgatcaattgaaggcaaaaacagtaacactgagaggggctttgcttcccttcctgaagatcatgtcattggggtgggttcctgtaaagggaattttccaagagaaaagagaattttcatgacctgtagactcttacaaatccattttacctgcttccttatggtatgtttattcaaagcacctgtgtaccatatttattcacttacacagcattactgaatctggaaattttcagttaggtatattttacataattcccacccatataactcagtccatacagttcacagttttcattccctcatagcaatgcaaaaaattttgatgagttactactactaaaactagttaagtaaaagatgattcttaagaatttccaggctgggcacggtggctcacgcctgtaatcccagcactttgggaggctgaggcaggcagctcacgaggtcaggagatcgagaccatcctgctcggtgaaaccccatctctattaaaaatacaaaaaattagccgggcctggtggcgggtgcctgtagtcccatctactcaggaggctgaggcaggagaatggcgtgaacccgggaggcggagcttgcagtaagctgagattgtgccactgcactccagcctgggcgacagagggagactccatctc

SEQ ID NO: 12067 - DNA, 4548 bp, Homo sapiens
  source 1..4548: mol_type = unassigned DNA
aaagaaaaaaaaaaggaggaggaggaggagggtgagagagaagctgggagagcagagaaaaggggccaccggtcgcccccccgcttccccgcacgcgctctccagccgcggccgcccgcctgccgcggtcaccccggcctctgcctctgtcccccagtgatcggatcaaggcgctgagcgaggccctgcctgcggggcggccatgcggcggtgacaggagcgcgaccgacacgcacgggcccctcgccccctctcgcctcccgtccgctcgccagctcccctcagccgaggctgctccgcggcggccgcagcccgcgcgcggcccacactcgcctcccctcggcacccccggccccggagctgcctggaggcggccgcactcggggatcatggcccaagttgcaatgtccaccctccccgttgaagatgaggagtcctcggagagcaggatggtggtgacattcctcatgtcagctctcgagtccatgtgtaaagaactggccaagtccaaagccgaagtggcctgcattgcagtgtatgaaacagacgtgtttgtcgtcggaactgaaagaggacgtgcttttgtcaataccagaaaggattttcaaaaagattttgtaaaatattgtgttgaagaagaagaaaaagctgcagagatgcataaaatgaaatctacaacccaggcaaatcggatgagtgtagatgctgtagaaattgaaacactcagaaaaacagttgaggactatttctgcttttgctatgggaaagctttaggcaaatccacagtggtacctgtaccatatgagaagatgctgcgagaccagtcggctgtggtagtgcaggggcttccggaaggtgttgcctttaaacaccccgagaactatgatcttgcaaccctgaaatggattttggagaacaaagcagggatttcattcatcattaagagaccttttttagagccaaagaagcatgtaggtggtcgtgtgatggtaacagatgctgacaggtcaatactatctccaggtggaagttgtggccccatcaaagtgaaaactgaacccacagaagattctggcatttccctggaaatggcagctgtgacagtaaaggaagaatcagaagatcctgattattatcaatataacattcaagcaggcccttctgaaactgatgatgttgatgaaaaacagcccctatcgaagcctttgcaaggaagccaccattcttcagagggcaatgaaggcacagaaatggaagtaccagcagaagattctactcaacatgtcccttcagaaacaagtgaggaccctgaagttgaggtgactattgaagatgatgattattctccaccgtctaagagaccaaaggccaatgagctaccgcagccaccagtcccggaacccgccaatgctgggaagcggaaagtgagggagttcaacttcgagaaatggaatgctcgcatcactgatctacgtaaacaagttgaagaattgtttgaaaggaaatatgctcaagccataaaagccaaaggtccggtgacgatcccgtaccctcttttccagtctcatgttgaagatctttatgtagaaggacttcctgaaggaattccttttagaaggccatctacttacggaattcctcgcctggagaggatattacttgcaaaggaaaggattcgttttgtgattaagaaacatgagcttctgaattcaacacgtgaagatttacagcttgataagccagcttcaggagtaaaggaagaatggtatgccagaatcactaaattaagaaagatggtggatcagcttttctgcaaaaaatttgcggaagccttggggagcactgaagccaaggctgtaccgtaccaaaaatttgaggcacacccgaatgatctgtacgtggaaggactgccagaaaacattcctttccgaagtccctcatggtatggaatcccaaggctggaaaaaatcattcaagtgggcaatcgaattaaatttgttattaaaagaccagaacttctgactcacagtaccactgaagttactcagccaagaacgaatacaccagtcaaagaagattggaatgtcagaattaccaagctacggaagcaagtggaagagatttttaatttgaaatttgctcaagctcttggactcaccgaggcagtaaaagtaccatatcctgtgtttgaatcaaacccggagttcttgtatgtggaaggcttgccagaggggattcccttccgaagccctacctggtttggaattccacgacttgaaaggatcgtccgcgggagtaataaaatcaagttcgttgttaaaaaacctgaactagttatttcctacttgcctcctgggatggctagtaaaataaacactaaagctttgcagtcccccaaaagaccacgaagtcctgggagtaattcaaaggttcctgaaattgaggtcaccgtggaaggccctaataacaacaatcctcaaacctcagctgttcgaaccccgacccagactaacggttctaacgttcccttcaagccacgagggagagagttttcctttgaggcctggaatgccaaaatcacggacctaaaacagaaagttgaaaatctcttcaatgagaaatgtggggaagctcttggccttaaacaagctgtgaaggtgccgttcgcgttatttgagtctttcccggaagacttttatgtggaaggcttacctgagggtgtgccattccgaagaccatcgacttttggcattccgaggctggagaagatactcagaaacaaagccaaaattaagttcatcattaaaaagcccgaaatgtttgagacggcgattaaggagagcacctcctctaagagccctcccagaaaaataaattcatcacccaatgttaatactactgcatcaggtgttgaagaccttaacatcattcaggtgacaattccagatgatgataatgaaagactctcgaaagttgaaaaagctagacagctaagagaacaagtgaatgacctctttagtcggaaatttggtgaagctattggtatgggttttcctgtgaaagttccctacaggaaaatcacaattaaccctggctgtgtggtggttgatggcatgcccccgggggtgtccttcaaagcccccagctacctggaaatcagctccatgagaaggatcttagactctgccgagtttatcaaattcacggtcattagaccatttccaggacttgtgattaataaccagctggttgatcagagtgagtcagaaggccccgtgatacaagaatcagctgaaccaagccagttggaagttccagccacagaagaaataaaagagactgatggaagctctcagatcaagcaagaaccagaccccacgtggtagacctcttccctcctaggcttaaagtatcagtggttgagaagagcttttcggacctgttactaccccaagctgtgtaatatacttgtataacagaaataccttctatacaaacctttttttctacttttagatagaaatgtctactttttcagcagttctgtgaattaaagagcagagtgactgtgggtctggaatggctggtgtacttgggaatgtactatcaggattttacagcaatgctgggaaatgacagggaaaatgacaggaatgaatctcaccagattttttatgtactcagcagagccttgagttacggtgtttattttccaatcaagtgaagatatctcctacttctcctactggaacatctcagcttctgcagtgaagaaaaattcctgtgatagttcagttctttagtttttctatttgaaaaaaaaaaatcatttaaatgatcctttgttcacggctctccttaatgactgagtgaacagttcctatctgtatatttgactaaaccttttcctaagctatctctcatggttcctatgtttttttatcataattaaaagcaaaaccatctggatcacctaacagtcagaggtcagtatctcagcgtgtgaattatagaggaaatacagagagaacctcttccacttttacttttcgtccaaataaaatgcatggtgtaccagaagttgaagatcgggttgaggattggggctagctcgatgacactaaggccccaacatcgcgggacctgctgtggcgcggattcttaggaacgctgttctagccggccccctctccaggggtcgccgtggccggcattatttcctagttcttcttgtaaccctgaggtgccagcgcggggagtgaggaggggtcagggggctaaggatgcaacctctgacgttctgcgccttcctaggagagtcttacatgtgttgagatttcacaagcaatgcgagttgtaaaataccagctctacaagaagctaggctctgtgacggcatagttttcagtagctttatcacaatattcacaatggagaattatatgacatggtagcagaaataggcccttttatgtgttgcttctattttacctcaaattgtagatatagggtaatcaataaaatccatccatgcctttcacacactaa

SEQ ID NO: 12068 - DNA, 4412 bp, Homo sapiens
  source 1..4412: mol_type = unassigned DNA
cgcccccccgcttccccgcacgcgctctccagccgcggccgcccgcctgccgcggtcaccccggcctctgcctctgtcccccagtgatcggatcaaggcgctgagcgaggccctgcctgcggggcggccatgcggcggtgacaggagcgcgaccgacacgcacgggcccctcgccccctctcgcctcccgtccgctcgccagctcccctcagccgaggctgctccgcggcggccgcagcccgcgcgcggcccacactcgcctcccctcggcacccccggccccggagctgcctggaggcggccgcactcggggatcatggcccaagttgcaatgtccaccctccccgttgaagatgaggagtcctcggagagcaggatggtggtgacattcctcatgtcagctctcgagtccatgtgtaaagaactggccaagtccaaagccgaagtggcctgcattgcagtgtatgaaacagacgtgtttgtcgtcggaactgaaagaggacgtgcttttgtcaataccagaaaggattttcaaaaagattttgtaaaatattgtgttgaagaagaagaaaaagctgcagagatgcataaaatgaaatctacaacccaggcaaatcggatgagtgtagatgctgtagaaattgaaacactcagaaaaacagttgaggactatttctgcttttgctatgggaaagctttaggcaaatccacagtggtacctgtaccatatgagaagatgctgcgagaccagtcggctgtggtagtgcaggggcttccggaaggtgttgcctttaaacaccccgagaactatgatcttgcaaccctgaaatggattttggagaacaaagcagggatttcattcatcattaagagaccttttttagagccaaagaagcatgtaggtggtcgtgtgatggtaacagatgctgacaggtcaatactatctccaggtggaagttgtggccccatcaaagtgaaaactgaacccacagaagattctggcatttccctggaaatggcagctgtgacagtaaaggaagaatcagaagatcctgattattatcaatataacattcaagcaggcccttctgaaactgatgatgttgatgaaaaacagcccctatcgaagcctttgcaaggaagccaccattcttcagagggcaatgaaggcacagaaatggaagtaccagcagaagatgatgattattctccaccgtctaagagaccaaaggccaatgagctaccgcagccaccagtcccggaacccgccaatgctgggaagcggaaagtgagggagttcaacttcgagaaatggaatgctcgcatcactgatctacgtaaacaagttgaagaattgtttgaaaggaaatatgctcaagccataaaagccaaaggtccggtgacgatcccgtaccctcttttccagtctcatgttgaagatctttatgtagaaggacttcctgaaggaattccttttagaaggccatctacttacggaattcctcgcctggagaggatattacttgcaaaggaaaggattcgttttgtgattaagaaacatgagcttctgaattcaacacgtgaagatttacagcttgataagccagcttcaggagtaaaggaagaatggtatgccagaatcactaaattaagaaagatggtggatcagcttttctgcaaaaaatttgcggaagccttggggagcactgaagccaaggctgtaccgtaccaaaaatttgaggcacacccgaatgatctgtacgtggaaggactgccagaaaacattcctttccgaagtccctcatggtatggaatcccaaggctggaaaaaatcattcaagtgggcaatcgaattaaatttgttattaaaagaccagaacttctgactcacagtaccactgaagttactcagccaagaacgaatacaccagtcaaagaagattggaatgtcagaattaccaagctacggaagcaagtggaagagatttttaatttgaaatttgctcaagctcttggactcaccgaggcagtaaaagtaccatatcctgtgtttgaatcaaacccggagttcttgtatgtggaaggcttgccagaggggattcccttccgaagccctacctggtttggaattccacgacttgaaaggatcgtccgcgggagtaataaaatcaagttcgttgttaaaaaacctgaactagttatttcctacttgcctcctgggatggctagtaaaataaacactaaagctttgcagtcccccaaaagaccacgaagtcctgggagtaattcaaaggttcctgaaattgaggtcaccgtggaaggccctaataacaacaatcctcaaacctcagctgttcgaaccccgacccagactaacggttctaacgttcccttcaagccacgagggagagagttttcctttgaggcctggaatgccaaaatcacggacctaaaacagaaagttgaaaatctcttcaatgagaaatgtggggaagctcttggccttaaacaagctgtgaaggtgccgttcgcgttatttgagtctttcccggaagacttttatgtggaaggcttacctgagggtgtgccattccgaagaccatcgacttttggcattccgaggctggagaagatactcagaaacaaagccaaaattaagttcatcattaaaaagcccgaaatgtttgagacggcgattaaggagagcacctcctctaagagccctcccagaaaaataaattcatcacccaatgttaatactactgcatcaggtgttgaagaccttaacatcattcaggtgacaattccagatgatgataatgaaagactctcgaaagttgaaaaagctagacagctaagagaacaagtgaatgacctctttagtcggaaatttggtgaagctattggtatgggttttcctgtgaaagttccctacaggaaaatcacaattaaccctggctgtgtggtggttgatggcatgcccccgggggtgtccttcaaagcccccagctacctggaaatcagctccatgagaaggatcttagactctgccgagtttatcaaattcacggtcattagaccatttccaggacttgtgattaataaccagctggttgatcagagtgagtcagaaggccccgtgatacaagaatcagctgaaccaagccagttggaagttccagccacagaagaaataaaagagactgatggaagctctcagatcaagcaagaaccagaccccacgtggtagacctcttccctcctaggcttaaagtatcagtggttgagaagagcttttcggacctgttactaccccaagctgtgtaatatacttgtataacagaaataccttctatacaaacctttttttctacttttagatagaaatgtctactttttcagcagttctgtgaattaaagagcagagtgactgtgggtctggaatggctggtgtacttgggaatgtactatcaggattttacagcaatgctgggaaatgacagggaaaatgacaggaatgaatctcaccagattttttatgtactcagcagagccttgagttacggtgtttattttccaatcaagtgaagatatctcctacttctcctactggaacatctcagcttctgcagtgaagaaaaattcctgtgatagttcagttctttagtttttctatttgaaaaaaaaaaatcatttaaatgatcctttgttcacggctctccttaatgactgagtgaacagttcctatctgtatatttgactaaaccttttcctaagctatctctcatggttcctatgtttttttatcataattaaaagcaaaaccatctggatcacctaacagtcagaggtcagtatctcagcgtgtgaattatagaggaaatacagagagaacctcttccacttttacttttcgtccaaataaaatgcatggtgtaccagaagttgaagatcgggttgaggattggggctagctcgatgacactaaggccccaacatcgcgggacctgctgtggcgcggattcttaggaacgctgttctagccggccccctctccaggggtcgccgtggccggcattatttcctagttcttcttgtaaccctgaggtgccagcgcggggagtgaggaggggtcagggggctaaggatgcaacctctgacgttctgcgccttcctaggagagtcttacatgtgttgagatttcacaagcaatgcgagttgtaaaataccagctctacaagaagctaggctctgtgacggcatagttttcagtagctttatcacaatattcacaatggagaattatatgacatggtagcagaaataggcccttttatgtgttgcttctattttacctcaaattgtagatatagggtaatcaataaaatccatccatgcctttcacacactaa

SEQ ID NO: 12069 - DNA, 4415 bp, Homo sapiens
  source 1..4415: mol_type = unassigned DNA
cgcccccccgcttccccgcacgcgctctccagccgcggccgcccgcctgccgcggtcaccccggcctctgcctctgtcccccagtgatcggatcaaggcgctgagcgaggccctgcctgcggggcggccatgcggcggtgacaggagcgcgaccgacacgcacgggcccctcgccccctctcgcctcccgtccgctcgccagctcccctcagccgaggctgctccgcggcggccgcagcccgcgcgcggcccacactcgcctcccctcggcacccccggccccggagctgcctggaggcggccgcactcggggatcatggcccaagttgcaatgtccaccctccccgttgaagatgaggagtcctcggagagcaggatggtggtgacattcctcatgtcagctctcgagtccatgtgtaaagaactggccaagtccaaagccgaagtggcctgcattgcagtgtatgaaacagacgtgtttgtcgtcggaactgaaagaggacgtgcttttgtcaataccagaaaggattttcaaaaagattttgtaaaatattgtgttgaagaagaagaaaaagctgcagagatgcataaaatgaaatctacaacccaggcaaatcggatgagtgtagatgctgtagaaattgaaacactcagaaaaacagttgaggactatttctgcttttgctatgggaaagctttaggcaaatccacagtggtacctgtaccatatgagaagatgctgcgagaccagtcggctgtggtagtgcaggggcttccggaaggtgttgcctttaaacaccccgagaactatgatcttgcaaccctgaaatggattttggagaacaaagcagggatttcattcatcattaagagaccttttttagagccaaagaagcatgtaggtggtcgtgtgatggtaacagatgctgacaggtcaatactatctccaggtggaagttgtggccccatcaaagtgaaaactgaacccacagaagattctggcatttccctggaaatggcagctgtgacagtaaaggaagaatcagaagatcctgattattatcaatataacattcaaggaagccaccattcttcagagggcaatgaaggcacagaaatggaagtaccagcagaagattctactcaacatgtcccttcagaaacaagtgaggaccctgaagttgaggtgactattgaagatgatgattattctccaccgtctaagagaccaaaggccaatgagctaccgcagccaccagtcccggaacccgccaatgctgggaagcggaaagtgagggagttcaacttcgagaaatggaatgctcgcatcactgatctacgtaaacaagttgaagaattgtttgaaaggaaatatgctcaagccataaaagccaaaggtccggtgacgatcccgtaccctcttttccagtctcatgttgaagatctttatgtagaaggacttcctgaaggaattccttttagaaggccatctacttacggaattcctcgcctggagaggatattacttgcaaaggaaaggattcgttttgtgattaagaaacatgagcttctgaattcaacacgtgaagatttacagcttgataagccagcttcaggagtaaaggaagaatggtatgccagaatcactaaattaagaaagatggtggatcagcttttctgcaaaaaatttgcggaagccttggggagcactgaagccaaggctgtaccgtaccaaaaatttgaggcacacccgaatgatctgtacgtggaaggactgccagaaaacattcctttccgaagtccctcatggtatggaatcccaaggctggaaaaaatcattcaagtgggcaatcgaattaaatttgttattaaaagaccagaacttctgactcacagtaccactgaagttactcagccaagaacgaatacaccagtcaaagaagattggaatgtcagaattaccaagctacggaagcaagtggaagagatttttaatttgaaatttgctcaagctcttggactcaccgaggcagtaaaagtaccatatcctgtgtttgaatcaaacccggagttcttgtatgtggaaggcttgccagaggggattcccttccgaagccctacctggtttggaattccacgacttgaaaggatcgtccgcgggagtaataaaatcaagttcgttgttaaaaaacctgaactagttatttcctacttgcctcctgggatggctagtaaaataaacactaaagctttgcagtcccccaaaagaccacgaagtcctgggagtaattcaaaggttcctgaaattgaggtcaccgtggaaggccctaataacaacaatcctcaaacctcagctgttcgaaccccgacccagactaacggttctaacgttcccttcaagccacgagggagagagttttcctttgaggcctggaatgccaaaatcacggacctaaaacagaaagttgaaaatctcttcaatgagaaatgtggggaagctcttggccttaaacaagctgtgaaggtgccgttcgcgttatttgagtctttcccggaagacttttatgtggaaggcttacctgagggtgtgccattccgaagaccatcgacttttggcattccgaggctggagaagatactcagaaacaaagccaaaattaagttcatcattaaaaagcccgaaatgtttgagacggcgattaaggagagcacctcctctaagagccctcccagaaaaataaattcatcacccaatgttaatactactgcatcaggtgttgaagaccttaacatcattcaggtgacaattccagatgatgataatgaaagactctcgaaagttgaaaaagctagacagctaagagaacaagtgaatgacctctttagtcggaaatttggtgaagctattggtatgggttttcctgtgaaagttccctacaggaaaatcacaattaaccctggctgtgtggtggttgatggcatgcccccgggggtgtccttcaaagcccccagctacctggaaatcagctccatgagaaggatcttagactctgccgagtttatcaaattcacggtcattagaccatttccaggacttgtgattaataaccagctggttgatcagagtgagtcagaaggccccgtgatacaagaatcagctgaaccaagccagttggaagttccagccacagaagaaataaaagagactgatggaagctctcagatcaagcaagaaccagaccccacgtggtagacctcttccctcctaggcttaaagtatcagtggttgagaagagcttttcggacctgttactaccccaagctgtgtaatatacttgtataacagaaataccttctatacaaacctttttttctacttttagatagaaatgtctactttttcagcagttctgtgaattaaagagcagagtgactgtgggtctggaatggctggtgtacttgggaatgtactatcaggattttacagcaatgctgggaaatgacagggaaaatgacaggaatgaatctcaccagattttttatgtactcagcagagccttgagttacggtgtttattttccaatcaagtgaagatatctcctacttctcctactggaacatctcagcttctgcagtgaagaaaaattcctgtgatagttcagttctttagtttttctatttgaaaaaaaaaaatcatttaaatgatcctttgttcacggctctccttaatgactgagtgaacagttcctatctgtatatttgactaaaccttttcctaagctatctctcatggttcctatgtttttttatcataattaaaagcaaaaccatctggatcacctaacagtcagaggtcagtatctcagcgtgtgaattatagaggaaatacagagagaacctcttccacttttacttttcgtccaaataaaatgcatggtgtaccagaagttgaagatcgggttgaggattggggctagctcgatgacactaaggccccaacatcgcgggacctgctgtggcgcggattcttaggaacgctgttctagccggccccctctccaggggtcgccgtggccggcattatttcctagttcttcttgtaaccctgaggtgccagcgcggggagtgaggaggggtcagggggctaaggatgcaacctctgacgttctgcgccttcctaggagagtcttacatgtgttgagatttcacaagcaatgcgagttgtaaaataccagctctacaagaagctaggctctgtgacggcatagttttcagtagctttatcacaatattcacaatggagaattatatgacatggtagcagaaataggcccttttatgtgttgcttctattttacctcaaattgtagatatagggtaatcaataaaatccatccatgcctttcacacactaa

SEQ ID NO: 12070 - DNA, 4356 bp, Homo sapiens
  source 1..4356: mol_type = unassigned DNA
cgcccccccgcttccccgcacgcgctctccagccgcggccgcccgcctgccgcggtcaccccggcctctgcctctgtcccccagtgatcggatcaaggcgctgagcgaggccctgcctgcggggcggccatgcggcggtgacaggagcgcgaccgacacgcacgggcccctcgccccctctcgcctcccgtccgctcgccagctcccctcagccgaggctgctccgcggcggccgcagcccgcgcgcggcccacactcgcctcccctcggcacccccggccccggagctgcctggaggcggccgcactcggggatcatggcccaagttgcaatgtccaccctccccgttgaagatgaggagtcctcggagagcaggatggtggtgacattcctcatgtcagctctcgagtccatgtgtaaagaactggccaagtccaaagccgaagtggcctgcattgcagtgtatgaaacagacgtgtttgtcgtcggaactgaaagaggacgtgcttttgtcaataccagaaaggattttcaaaaagattttgtaaaatattgtgttgaagaagaagaaaaagctgcagagatgcataaaatgaaatctacaacccaggcaaatcggatgagtgtagatgctgtagaaattgaaacactcagaaaaacagttgaggactatttctgcttttgctatgggaaagctttaggcaaatccacagtggtacctgtaccatatgagaagatgctgcgagaccagtcggctgtggtagtgcaggggcttccggaaggtgttgcctttaaacaccccgagaactatgatcttgcaaccctgaaatggattttggagaacaaagcagggatttcattcatcattaagagaccttttttagagccaaagaagcatgtaggtggtcgtgtgatggtaacagatgctgacaggtcaatactatctccaggtggaagttgtggccccatcaaagtgaaaactgaacccacagaagattctggcatttccctggaaatggcagctgtgacagtaaaggaagaatcagaagatcctgattattatcaatataacattcaaggaagccaccattcttcagagggcaatgaaggcacagaaatggaagtaccagcagaagatgatgattattctccaccgtctaagagaccaaaggccaatgagctaccgcagccaccagtcccggaacccgccaatgctgggaagcggaaagtgagggagttcaacttcgagaaatggaatgctcgcatcactgatctacgtaaacaagttgaagaattgtttgaaaggaaatatgctcaagccataaaagccaaaggtccggtgacgatcccgtaccctcttttccagtctcatgttgaagatctttatgtagaaggacttcctgaaggaattccttttagaaggccatctacttacggaattcctcgcctggagaggatattacttgcaaaggaaaggattcgttttgtgattaagaaacatgagcttctgaattcaacacgtgaagatttacagcttgataagccagcttcaggagtaaaggaagaatggtatgccagaatcactaaattaagaaagatggtggatcagcttttctgcaaaaaatttgcggaagccttggggagcactgaagccaaggctgtaccgtaccaaaaatttgaggcacacccgaatgatctgtacgtggaaggactgccagaaaacattcctttccgaagtccctcatggtatggaatcccaaggctggaaaaaatcattcaagtgggcaatcgaattaaatttgttattaaaagaccagaacttctgactcacagtaccactgaagttactcagccaagaacgaatacaccagtcaaagaagattggaatgtcagaattaccaagctacggaagcaagtggaagagatttttaatttgaaatttgctcaagctcttggactcaccgaggcagtaaaagtaccatatcctgtgtttgaatcaaacccggagttcttgtatgtggaaggcttgccagaggggattcccttccgaagccctacctggtttggaattccacgacttgaaaggatcgtccgcgggagtaataaaatcaagttcgttgttaaaaaacctgaactagttatttcctacttgcctcctgggatggctagtaaaataaacactaaagctttgcagtcccccaaaagaccacgaagtcctgggagtaattcaaaggttcctgaaattgaggtcaccgtggaaggccctaataacaacaatcctcaaacctcagctgttcgaaccccgacccagactaacggttctaacgttcccttcaagccacgagggagagagttttcctttgaggcctggaatgccaaaatcacggacctaaaacagaaagttgaaaatctcttcaatgagaaatgtggggaagctcttggccttaaacaagctgtgaaggtgccgttcgcgttatttgagtctttcccggaagacttttatgtggaaggcttacctgagggtgtgccattccgaagaccatcgacttttggcattccgaggctggagaagatactcagaaacaaagccaaaattaagttcatcattaaaaagcccgaaatgtttgagacggcgattaaggagagcacctcctctaagagccctcccagaaaaataaattcatcacccaatgttaatactactgcatcaggtgttgaagaccttaacatcattcaggtgacaattccagatgatgataatgaaagactctcgaaagttgaaaaagctagacagctaagagaacaagtgaatgacctctttagtcggaaatttggtgaagctattggtatgggttttcctgtgaaagttccctacaggaaaatcacaattaaccctggctgtgtggtggttgatggcatgcccccgggggtgtccttcaaagcccccagctacctggaaatcagctccatgagaaggatcttagactctgccgagtttatcaaattcacggtcattagaccatttccaggacttgtgattaataaccagctggttgatcagagtgagtcagaaggccccgtgatacaagaatcagctgaaccaagccagttggaagttccagccacagaagaaataaaagagactgatggaagctctcagatcaagcaagaaccagaccccacgtggtagacctcttccctcctaggcttaaagtatcagtggttgagaagagcttttcggacctgttactaccccaagctgtgtaatatacttgtataacagaaataccttctatacaaacctttttttctacttttagatagaaatgtctactttttcagcagttctgtgaattaaagagcagagtgactgtgggtctggaatggctggtgtacttgggaatgtactatcaggattttacagcaatgctgggaaatgacagggaaaatgacaggaatgaatctcaccagattttttatgtactcagcagagccttgagttacggtgtttattttccaatcaagtgaagatatctcctacttctcctactggaacatctcagcttctgcagtgaagaaaaattcctgtgatagttcagttctttagtttttctatttgaaaaaaaaaaatcatttaaatgatcctttgttcacggctctccttaatgactgagtgaacagttcctatctgtatatttgactaaaccttttcctaagctatctctcatggttcctatgtttttttatcataattaaaagcaaaaccatctggatcacctaacagtcagaggtcagtatctcagcgtgtgaattatagaggaaatacagagagaacctcttccacttttacttttcgtccaaataaaatgcatggtgtaccagaagttgaagatcgggttgaggattggggctagctcgatgacactaaggccccaacatcgcgggacctgctgtggcgcggattcttaggaacgctgttctagccggccccctctccaggggtcgccgtggccggcattatttcctagttcttcttgtaaccctgaggtgccagcgcggggagtgaggaggggtcagggggctaaggatgcaacctctgacgttctgcgccttcctaggagagtcttacatgtgttgagatttcacaagcaatgcgagttgtaaaataccagctctacaagaagctaggctctgtgacggcatagttttcagtagctttatcacaatattcacaatggagaattatatgacatggtagcagaaataggcccttttatgtgttgcttctattttacctcaaattgtagatatagggtaatcaataaaatccatccatgcctttcacacactaagtca

SEQ ID NO: 12071 - DNA, 572 bp, Homo sapiens
  source 1..572: mol_type = unassigned DNA
atttccagagagcaggaagcacagagaaggcccgtgggtcgcccttggggtgctttccatcctgcagggctcgctgcctgccctgaaagttctgataaagacataggaccttcatcaccaggggcgccccgtgggctgttgctgtagcgtctgtcccccatttcttacacacattgagtgtgattgttaccagtggagggtgtccaatggaagaagcaccaaaagccgagatttattgaaagtggaagggatcatggcccaagttgcaatgtccaccctccccgttgaagatgaggagtcctcggagagcaggatggtggtgacattcctcatgtcagctctcgagtccatgtgtaaagaactggccaagtccaaagccgaagtggcctgcattgcagtgtatgaaacagacgtgtttgtcgtcggaactgaaagaggacgtgcttttgtcaataccagaaaggattttcaaaaagattttgtaaaatattgtgttgaagaagaagaaaaagctgcagagatgcataaaatgaaatctacaacccaggcaaatcggatgagtgtagatgctg

SEQ ID NO: 12072 - DNA, 979 bp, Homo sapiens
  source 1..979: mol_type = unassigned DNA
ccccggccccggagctgcctggaggcggccgcactcggggatcatggcccaagttgcaatgtccaccctccccgttgaagatgaggagtcctcggagagcaggatggtggtgacattcctcatgtcagctctcgagtccatgtgtaaagaactggccaagtccaaagccgaagtggcctgcattgcagtgtatgaaacagacgtgtttgtcgtcggaactgaaagaggacgtgcttttgtcaataccagaaaggattttcaaaaagattttgtaaaatattgtgttgaagaagaagaaaaagctgcagagatgcataaaatgaaatctacaacccaggcaaatcggatgagtgtagatgctgtagaaattgaaacactcagaaaaacagttgaggactatttctgcttttgctatgggaaagctttaggcaaatccacagtggtacctgtaccatatgagaagatgctgcgagaccagtcggctgtggtagtgcaggggcttccggaaggtgttgcctttaaacaccccgagaactatgatcttgcaaccctgaaatggattttggagaacaaagcagggatttcattcatcattaagagaccttttttagagccaaagaagcatgtaggtggtcgtgtgatggtaacagatgctgacaggtcaatactatctccaggtggaagttgtggccccatcaaagtgaaaactgaacccacagaagattctggcatttccctggaaatggcagctgtgacagtaaaggaagaatcagaagatcctgattattatcaatataacattcaaggaagccaccattcttcagagggcaatgaaggcacagaaatggaagtaccagcagaaggttaggagaaaaagagattgcatattttccactatttgttgtatgtttattctattttatagattctattatccttaaaacaccttatttggaaataaaaggtgattcccttggta

SEQ ID NO: 12073 - DNA, 3492 bp, Homo sapiens
  source 1..3492: mol_type = unassigned DNA
agagaaaaggggccaccggtcgcccccccgcttccccgcacgcgctctccagccgcggccgcccgcctgccgcggtcaccccggcctctgcctctgtcccccagtgatcggatcaaggcgctgagcgaggccctgcctgcggggcggccatgcggcggtgacaggagcgcgaccgacacgcacgggcccctcgccccctctcgcctcccgtccgctcgccagctcccctcagcacccccggccccggcccaagttgcaatgtccaccctccccgttgaagatgaggagtcctcggagagcaggatggtggtgacattcctcatgtcagctctcgagtccatgtgtaaagaactggccaagtccaaagccgaagtggcctgcattgcagtgtatgaaacagacgtgtttgtcgtcggaactgaaagaggacgtgcttttgtcaataccagaaaggattttcaaaaagattttgtaaaatattgtgttgaagaagaagaaaaagctgcagagatgcataaaatgaaatctacaacccaggcaaatcggatgagtgtagatgctgtagaaattgaaacactcagaaaaacagttgaggactatttctgcttttgctatgggaaagctttaggcaaatccacagtggtacctgtaccatatgagaagatgctgcgagaccagtcggctgtggtagtgcaggggcttccggaaggtgttgcctttaaacaccccgagaactatgatcttgcaaccctgaaatggattttggagaacaaagcagggatttcattcatcattaagagaccttttttagagccaaagaagcatgtaggtggtcgtgtgatggtaacagatgctgacaggtcaatactatctccaggtggaagttgtggccccatcaaagtgaaaactgaacccacagaagattctggcatttccctggaaatggcagctgtgacagtaaaggaagaatcagaagatcctgattattatcaatataacattcaagcaggcccttctgaaactgatgatgttgatgaaaaacagcccctatcgaagcctttgcaaggaagccaccattcttcagagggcaatgaaggcacagaaatggaagtaccagcagaagattctactcaacatgtcccttcagaaacaagtgaggaccctgaagttgaggtgactattgaagatgatgattattctccaccgtctaagagaccaaaggccaatgagctaccgcagccaccagtcccggaacccgccaatgctgggaagcggaaagtgagggagttcaacttcgagaaatggaatgctcgcatcactgatctacgtaaacaagttgaagaattgtttgaaaggaaatatgctcaagccataaaagccaaaggtccggtgacgatcccgtaccctcttttccagtctcatgttgaagatctttatgtagaaggacttcctgaaggaattccttttagaaggccatctacttacggaattcctcgcctggagaggatattacttgcaaaggaaaggattcgttttgtgattaagaaacatgagcttctgaattcaacacgtgaagatttacagcttgataagccagcttcaggagtaaaggaagaatggtatgccagaatcactaaattaagaaagatggtggatcagcttttctgcaaaaaatttgcggaagccttggggagcactgaagccaaggctgtaccgtaccaaaaatttgaggcacacccgaatgatctgtacgtggaaggactgccagaaaacattcctttccgaagtccctcatggtatggaatcccaaggctggaaaaaatcattcaagtgggcaatcgaattaaatttgttattaaaagaccagaacttctgactcacagtaccactgaagttactcagccaagaacgaatacaccagtcaaagaagattggaatgtcagaattaccaagctacggaagcaagtggaagagatttttaatttgaaatttgctcaagctcttggactcaccgaggcagtaaaagtaccatatcctgtgtttgaatcaaacccggagttcttgtatgtggaaggcttgccagaggggattcccttccgaagccctacctggtttggaattccacgacttgaaaggatcgtccgcgggagtaataaaatcaagttcgttgttaaaaaacctgaactagttatttcctacttgcctcctgggatggctagtaaaataaacactaaagctttgcagtcccccaaaagaccacgaagtcctgggagtaattcaaaggttcctgaaattgaggtcaccgtggaaggccctaataacaacaatcctcaaacctcagctgttcgaaccccgacccagactaacggttctaacgttcccttcaagccacgagggagagagttttcctttgaggcctggaatgccaaaatcacggacctaaaacagaaagttgaaaatctcttcaatgagaaatgtggggaagctcttggccttaaacaagctgtgaaggtgccgttcgcgttatttgagtctttcccggaagacttttatgtggaaggcttacctgagggtgtgccattccgaagaccatcgacttttggcattccgaggctggagaagatactcagaaacaaagccaaaattaagttcatcattaaaaagcccgaaatgtttgagacggcgattaaggagagcacctcctctaagagccctcccagaaaaataaattcatcacccaatgttaatactactgcatcaggtgttgaagaccttaacatcattcaggtgacaattccagatgatgataatgaaagactctcgaaagttgaaaaagctagacagctaagagaacaagtgaatgacctctttagtcggaaatttggtgaagctattggtatgggttttcctgtgaaagttccctacaggaaaatcacaattaaccctggctgtgtggtggttgatggcatgcccccgggggtgtccttcaaagcccccagctacctggaaatcagctccatgagaaggatcttagactctgccgagtttatcaaattcacggtcattagaccatttccaggacttgtgattaataaccagctggttgatcagagtgagtcagaaggccccgtgatacaagaatcagctgaaccaagccagttggaagttccagccacagaagaaataaaagagactgatggaagctctcagatcaagcaagaaccagaccccacgtggtagacctcttccctcctaggcttaaagtatcagtggttgagaagagcttttcggacctgttactaccccaagctgtgtaatatacttgtataacagaaataccttctatacaaacctttttttctacttttagatagaaatgtctactttttcagcagttctgtgaattaaagagcagagtgactgtgggtctggaatggctggtgtacttgggaatgtactatcaggattttacagcaatgctgggaaatgaca

SEQ ID NO: 12074 - DNA, 952 bp, Homo sapiens
  source 1..952: mol_type = unassigned DNA
tctccacgtgggtaccggcgctctcggcgcccgtagccacccgcccgccggaagccgacatctcgagttctggcagaagcaatttgcgcggcgaggagcggagcggcaggaacccaataagctgcttcgcctcggagctgaagcccgtactcaagatggcggctccgggcgggcgtggccagtgactagaaggcgaggcgccgcgggaccatggcggcggcggcggacgagcggagtccagaggacggagaagacgaggaagaggaggagcagttggttctggtggaattatcaggaattattgattcagacttcctctcaaaatgtgaaaataaatgcaaggttttgggcattgacactgagaggcccattctgcaagtggacagctgtgtctttgctggggagtatgaagacactctagggacctgtgttatatttgaagaaaatgttgaacatgctgatacagaaggcaataataaaacagtgctaaaatataaatgccatacaatgaagaagctcagcatgacaagaactctcctgacagagaagaaggaaggagaagaaaacataggtggggtggaatggctgcaaataaaggataatgatttctcctatcgacccaacatgatttgtaactttctacatgaaaatgaagacgaagaagtggtagcttcagccccagataaatctttggaattggaagaggaagagattcaaatgaacgacagttcaaacctgagttgtgaacaggagaaaccaatgcacttggaaatagaagattctggtcctcttattgatataccttctgagacagaaggttctgtttttatggaaactcaaatgctgccttagaaatcactcctagatgaaatgtttctcataataacttgtcaagaactttttagagttgttacataaaaataattgctgtgtagctttcagtcttttaata

SEQ ID NO: 12075 - DNA, 2393 bp, Homo sapiens
  source 1..2393: mol_type = unassigned DNA
actgcgctgggaaacatggcgaccgagggaatgatccttactaaccacgaccatcaaatccgtgtcggagtccttacagtgagtgatagttgcttcaggaatcttgcagaagaccgcagtgggataaatctcaaagatctcgtacaagatccttctttgttgggtgggactatatcagcatacaagatagtaccagatgaaatagaagaaatcaaggccacaaaagaagtaatagaacgggaagcaccagggatggccctggcaatgctgatgggatcacttaatgttacacctctgggcatgctctctaggcctgtatgtggaatcagagggaaaacgctcataattaacctgccaggtagcaagaaaggatctcaggaatgctttcaattcatactgccagctctacctcatgccattgaccttttacgtgatgccattgtaaaagtaaaggaggtgcatgatgaacttgaagatttgccttccccacctccccctctttcccctcctcctactaccagcccccataaacagacagaagacaaaggagttcaatgtgaggaagaggaagaagagaagaaagacagtggtgttgcttcaacagaagatagttcctcatcacatataactgcagcagccattgctgccaagattccagactccatcatttctcgtggtgttcaggtgctcccacgagacacagcctccctcagcactactccttcagaatcgcctcgtgctcaggctacatctcgcctctctacagcttcctgcccaacaccaaaagtccagtccaggtgcagcagcaaggagaacattctcagagccagtcacagtgctgtcgatatcaccaaggtggctagaagacatcgcatgtctccttttcctctgacatctatggacaaagcctttatcacagtcctggagatgactccggtgcttgggacagaaatcatcaattaccgagatggaatggggcgagtccttgctcaagatgtatatgcaaaagacaatttaccccccttcccagcatcagtaaaagatggctatgctgtccgagctgctgatggcccaggagatcgtttcatcattggggaatcccaagctggtgaacagccaactcagacagtaatgccaggacaagtcatgcgggttacaacaggtgctccaataccctgcggtgctgatgcagtagtacaagtggaagataccgaacttatcagggaatcagatgatggcactgaagaacttgaagtgcgaattctggtgcaagctcggccaggccaagatatcagacccatcggccatgacattaaaagaggggaatgtgttttggccaaaggaacccacatgggcccctcagagattggtcttctggcaactgtaggtgtcacagaggttgaagttaataagtttccagtggttgcagtcatgtcaacagggaatgagctgctaaatcctgaagatgacctcttaccagggaagattcgagacagcaatcgttcaactcttctagcaacaattcaggaacatggttaccccacgatcaacttgggtattgtaggagacaacccagatgacttactcaatgccttgaatgagggtatcagtcgtgctgatgtcatcatcacatcagggggtgtatccatgggggaaaaggactatctcaagcaggtgctggacattgatcttcatgctcagatccattttggcagggtttttatgaaaccaggcttgccaacaacatttgcaactttggatattgatggtgtaagaaaaataatctttgcactacctgggaatcctgtatcggctgtggtcacctgcaatctctttgttgtgcctgcactgaggaaaatgcagggcatcttggatcctcggccaaccatcatcaaagcaaggttatcatgtgatgtaaaacttgatcctcgtccagaataccatcggtgtatactaacttggcatcaccaagaaccactaccttgggcacagagtacaggtaatcaaatgagcagccgtctgatgagcatgcgcagtgccaatggattgttgatgctacctccaaagacagaacagtacgtggagctccacaaaggcgaggtggtggatgtcatggtcattggacggctatgatggtcaccagcaggagaaagctttgatgcatgtccacatatcattgactgtatcctgtaatatgcaacggcacagctagttttcccgatttggataaaagttgatctgtatagtcaacatcttgaactatatttcaaatgaatttaaatatcttttaaagaaaaaaacacctaaaaataaatcttaacagaaaattctgttctgattatatcaaggcaaatttttcctttcttgcaaattgctttgtgtgttcaatgcta

SEQ ID NO: 12076 - DNA, 4193 bp, Homo sapiens
  source 1..4193: mol_type = unassigned DNA
agcagcgctcatggcgaagaggcttaaggccacaaaaccgtgggacagcaggaggaagagaagccaggtatctccactccagctgccctgcctcagactcctcagtttcgcacgtgaggatcgtcttgcaggcactgactggagatggaatcctaaagcataggtgaagcggaaatcctccttcagggagagcccactgaggaagccagcggctagcacgaggcaggacaggatacctccctcttcgcccacggcggcctctctgtcatagtagccaccgttctgccactcatgcagctttctaagacacctctcggttccccagcgctttcagtggggcggccggccattcccgagggttgcaagaggaggcccggggtgctgagccagcctcgctgcccccgcgtagaaagccggcccgccggcgagagccagcctaaggcgcggacaaccaacgaggtgtcaggctcggcaggggattgcttctgtctggggcccggccgaggttgcgttcgtgcctcgcgcgcacacgctccgcgttcactcagccaatccggtgctactcgcgcgcccaggagcgatccgcggtcctactcaggctgggccggctccttcccgctcccaatactcagcacccgagctctcactcctcccctcactctccacgagttccacgcctaggggtgtagctccgcccttgtccccgagtccgcccccgcaacctccagagcgtgtgctatcctttcctctcagtcctgccatctagctgccttgggtctcgcgctccgcagagcgttccgacactctccggcctcgttctgccgcctccgcgcgctctccccgtgcggccaccgcgccccccaagcttgcctccttcttgccggacttggggccgcgcgccctgactccttcccctcccgcggacccgcgcactcccggcgcggcctctcccccacgcaggccaccgtgcactctgtggcctccccctccttccccgctctcctcgcgcttctctggctccctagctgtcgcgctctcctcggcgagcgcgctcccggcccgcgcgctccgggctccggtttctcccggctcctgtcagtgcggtgactgcgctgggaaacatggcgaccgagggaatgatccttactaaccacgaccatcaaatccgtgtcggagtccttacagtgagtgatagttgcttcaggaatcttgcagaagaccgcagtgggataaatctcaaagatctcgtacaagatccttctttgttgggtgggactatatcagcatacaagatagtaccagatgaaatagaagaaatcaaggaaaccctgatagattggtgtgatgaaaaggaacttaatttgatattaacaactggaggaacaggatttgcaccacgagatgtcactccagaggccacaaaagaagtaatagaacgggaagcaccagggatggccctggcaatgctgatgggatcacttaatgttacacctctgggcatgctctctaggcctgtatgtggaatcagagggaaaacgctcataattaacctgccaggtagcaagaaaggatctcaggaatgctttcaattcatactgccagctctacctcatgccattgaccttttacgtgatgccattgtaaaagtaaaggaggtgcatgatgaacttgaagatttgccttccccacctccccctctttcccctcctcctactaccagcccccataaacagacagaagacaaaggagttcaatgtgaggaagaggaagaagagaagaaagacagtggtgttgcttcaacagaagatagttcctcatcacatataactgcagcagccattgctgccaagattccagactccatcatttctcgtggtgttcaggtgctcccacgagacacagcctccctcagcactactccttcagaatcgcctcgtgctcaggctacatctcgcctctctacagcttcctgcccaacaccaaaagtccagtccaggtgcagcagcaaggagaacattctcagagccagtcacagtgctgtcgatatcaccaaggtggctagaagacatcgcatgtctccttttcctctgacatctatggacaaagcctttatcacagtcctggagatgactccggtgcttgggacagaaatcatcaattaccgagatggaatggggcgagtccttgctcaagatgtatatgcaaaagacaatttaccccccttcccagcatcagtaaaagatggctatgctgtccgagctgctgatggcccaggagatcgtttcatcattggggaatcccaagctggtgaacagccaactcagacagtaatgccaggacaagtcatgcgggttacaacaggtgctccaataccctgcggtgctgatgcagtagtacaagtggaagataccgaacttatcagggaatcagatgatggcactgaagaacttgaagtgcgaattctggtgcaagctcggccaggccaagatatcagacccatcggccatgacattaaaagaggggaatgtgttttggccaaaggaacccacatgggcccctcagagattggtcttctggcaactgtaggtgtcacagaggttgaagttaataagtttccagtggttgcagtcatgtcaacagggaatgagctgctaaatcctgaagatgacctcttaccagggaagattcgagacagcaatcgttcaactcttctagcaacaattcaggaacatggttaccccacgatcaacttgggtattgtaggagacaacccagatgacttactcaatgccttgaatgagggtatcagtcgtgctgatgtcatcatcacatcagggggtgtatccatgggggaaaaggactatctcaagcaggtgctggacattgatcttcatgctcagatccattttggcagggtttttatgaaaccaggcttgccaacaacatttgcaactttggatattgatggtgtaagaaaaataatctttgcactacctgggaatcctgtatcggctgtggtcacctgcaatctctttgttgtgcctgcactgaggaaaatgcagggcatcttggatcctcggccaaccatcatcaaagcaaggttatcatgtgatgtaaaacttgatcctcgtccagaataccatcggtgtatactaacttggcatcaccaagaaccactaccttgggcacagagtacaggtaatcaaatgagcagccgtctgatgagcatgcgcagtgccaatggattgttgatgctacctccaaagacagaacagtacgtggagctccacaaaggcgaggtggtggatgtcatggtcattggacggctatgatggtcaccagcaggagaaagctttgatgcatgtccacatatcattgactgtatcctgtaatatgcaacggcacagctagttttcccgatttggataaaagttgatctgtatagtcaacatcttgaactatatttcaaatgaatttaaatatcttttaaagaaaaaaacacctaaaaataaatcttaacagaaaattctgttctgattatatcaaggcaaatttttcctttcttgcaaattgctttgtgtgttcaatgctaggtctgatagcgatagcttttagtagacagcggtaggtgcctgcagaacttgtgtttttctcatctttaaaatacaactacttatgctcttaaatcaaggctgtctgcttatttatactagcgtaggcaacacttggatttcccttcttagtatgcttcataactgctttacagagagcttttgcttgttctttctcatgtatctcgtgtttatgtgcacagtgccaaaagaagactgactgggtggaggctctgccttgcctcaagaaccatcccctgcagagcatccagggaggtttctcgccccaatagcctcacggcacagtactcttgggcagtaactggacaccttttatttgaagaaacaaactgaagaaaaaatgcttccttaagtgctgacagcctttttaaccaatacatttaaaattgtacagaacaaaaaaataaaatcaaagactgatcttgtacagatattagtgttaccagcattcatgtggaaatcaagagcaaagacaaaataatgttaaacaattctgtaccataacattttctgtaatgatactgaaacttaatgaataaaaaaattccttgatcattattt

SEQ ID NO: 12077 - DNA, 4297 bp, Homo sapiens
  source 1..4297: mol_type = unassigned DNA
agcagcgctcatggcgaagaggcttaaggccacaaaaccgtgggacagcaggaggaagagaagccaggtatctccactccagctgccctgcctcagactcctcagtttcgcacgtgaggatcgtcttgcaggcactgactggagatggaatcctaaagcataggtgaagcggaaatcctccttcagggagagcccactgaggaagccagcggctagcacgaggcaggacaggatacctccctcttcgcccacggcggcctctctgtcatagtagccaccgttctgccactcatgcagctttctaagacacctctcggttccccagcgctttcagtggggcggccggccattcccgagggttgcaagaggaggcccggggtgctgagccagcctcgctgcccccgcgtagaaagccggcccgccggcgagagccagcctaaggcgcggacaaccaacgaggtgtcaggctcggcaggggattgcttctgtctggggcccggccgaggttgcgttcgtgcctcgcgcgcacacgctccgcgttcactcagccaatccggtgctactcgcgcgcccaggagcgatccgcggtcctactcaggctgggccggctccttcccgctcccaatactcagcacccgagctctcactcctcccctcactctccacgagttccacgcctaggggtgtagctccgcccttgtccccgagtccgcccccgcaacctccagagcgtgtgctatcctttcctctcagtcctgccatctagctgccttgggtctcgcgctccgcagagcgttccgacactctccggcctcgttctgccgcctccgcgcgctctccccgtgcggccaccgcgccccccaagcttgcctccttcttgccggacttggggccgcgcgccctgactccttcccctcccgcggacccgcgcactcccggcgcggcctctcccccacgcaggccaccgtgcactctgtggcctccccctccttccccgctctcctcgcgcttctctggctccctagctgtcgcgctctcctcggcgagcgcgctcccggcccgcgcgctccgggctccggtttctcccggctcctgtcagtgcggtgactgcgctgggaaacatggcgaccgagggaatgatccttactaaccacgaccatcaaatccgtgtcggagtccttacagtgagtgatagttgcttcaggaatcttgcagaagaccgcagtgggataaatctcaaagatctcgtacaagatccttctttgttgggtgggactatatcagcatacaagatagtaccagatgaaatagaagaaatcaaggaaaccctgatagattggtgtgatgaaaaggaacttaatttgatattaacaactggaggaacaggatttgcaccacgagatgtcactccagaggccacaaaagaagtaatagaacgggaagcaccagggatggccctggcaatgctgatgggatcacttaatgttacacctctgggcatgctctctaggcctgtatgtggaatcagagggaaaacgctcataattaacctgccaggtagcaagaaaggatctcaggaatgctttcaattcatactgccagctctacctcatgccattgaccttttacgtgatgccattgtaaaagtaaaggaggtgcatgatgaacttgaagatttgccttccccacctccccctctttcccctcctcctactaccagcccccataaacagacagaagacaaaggagttcaatgtgaggaagaggaagaagagaagaaagacagtggtgttgcttcaacagaagatagttcctcatcacatataactgcagcagccattgctgccaagaagcatccattctacaccagtcctgctgttgtcatggcacacggtgaacagcccatccctggtctcatcaattattcccatcattcaacagatgaacggattccagactccatcatttctcgtggtgttcaggtgctcccacgagacacagcctccctcagcactactccttcagaatcgcctcgtgctcaggctacatctcgcctctctacagcttcctgcccaacaccaaaagtccagtccaggtgcagcagcaaggagaacattctcagagccagtcacagtgctgtcgatatcaccaaggtggctagaagacatcgcatgtctccttttcctctgacatctatggacaaagcctttatcacagtcctggagatgactccggtgcttgggacagaaatcatcaattaccgagatggaatggggcgagtccttgctcaagatgtatatgcaaaagacaatttaccccccttcccagcatcagtaaaagatggctatgctgtccgagctgctgatggcccaggagatcgtttcatcattggggaatcccaagctggtgaacagccaactcagacagtaatgccaggacaagtcatgcgggttacaacaggtgctccaataccctgcggtgctgatgcagtagtacaagtggaagataccgaacttatcagggaatcagatgatggcactgaagaacttgaagtgcgaattctggtgcaagctcggccaggccaagatatcagacccatcggccatgacattaaaagaggggaatgtgttttggccaaaggaacccacatgggcccctcagagattggtcttctggcaactgtaggtgtcacagaggttgaagttaataagtttccagtggttgcagtcatgtcaacagggaatgagctgctaaatcctgaagatgacctcttaccagggaagattcgagacagcaatcgttcaactcttctagcaacaattcaggaacatggttaccccacgatcaacttgggtattgtaggagacaacccagatgacttactcaatgccttgaatgagggtatcagtcgtgctgatgtcatcatcacatcagggggtgtatccatgggggaaaaggactatctcaagcaggtgctggacattgatcttcatgctcagatccattttggcagggtttttatgaaaccaggcttgccaacaacatttgcaactttggatattgatggtgtaagaaaaataatctttgcactacctgggaatcctgtatcggctgtggtcacctgcaatctctttgttgtgcctgcactgaggaaaatgcagggcatcttggatcctcggccaaccatcatcaaagcaaggttatcatgtgatgtaaaacttgatcctcgtccagaataccatcggtgtatactaacttggcatcaccaagaaccactaccttgggcacagagtacaggtaatcaaatgagcagccgtctgatgagcatgcgcagtgccaatggattgttgatgctacctccaaagacagaacagtacgtggagctccacaaaggcgaggtggtggatgtcatggtcattggacggctatgatggtcaccagcaggagaaagctttgatgcatgtccacatatcattgactgtatcctgtaatatgcaacggcacagctagttttcccgatttggataaaagttgatctgtatagtcaacatcttgaactatatttcaaatgaatttaaatatcttttaaagaaaaaaacacctaaaaataaatcttaacagaaaattctgttctgattatatcaaggcaaatttttcctttcttgcaaattgctttgtgtgttcaatgctaggtctgatagcgatagcttttagtagacagcggtaggtgcctgcagaacttgtgtttttctcatctttaaaatacaactacttatgctcttaaatcaaggctgtctgcttatttatactagcgtaggcaacacttggatttcccttcttagtatgcttcataactgctttacagagagcttttgcttgttctttctcatgtatctcgtgtttatgtgcacagtgccaaaagaagactgactgggtggaggctctgccttgcctcaagaaccatcccctgcagagcatccagggaggtttctcgccccaatagcctcacggcacagtactcttgggcagtaactggacaccttttatttgaagaaacaaactgaagaaaaaatgcttccttaagtgctgacagcctttttaaccaatacatttaaaattgtacagaacaaaaaaataaaatcaaagactgatcttgtacagatattagtgttaccagcattcatgtggaaatcaagagcaaagacaaaataatgttaaacaattctgtaccataacattttctgtaatgatactgaaacttaatgaataaaaaaattccttgatcattatttaaaaa

SEQ ID NO: 12078 - DNA, 2895 bp, Homo sapiens
  source 1..2895: mol_type = unassigned DNA
agtgtgaccgggatggcgcattttcttgcaccaactaatgcggtgtcgctggcggctgaggagggcggagagttctgtggtgaaatagtgggaaggattcatgtaggcatcgggaagagcctaagtccacattataaaataggaagttgatgcggggtacagttactcccggaccggcggcgtgaaagtcgtgatatcatcgttgaactattagctttgaagtttaaatccaatggagaagactcaagaaacagtccaaagaattcttctagaaccctataaatacttacttcagttaccaggtaaacaagtgagaaccaaactttcacaggcatttaatcattggctgaaagttccagaggacaagctacagattattattgaagtgacagaaatgttgcataatgccagtttactcatcgatgatattgaagacaactcaaaactccgacgtggctttccagtggcccacagcatctatggaatcccatctgtcatcaattctgccaattacgtgtatttccttggcttggagaaagtcttaacccttgatcacccagatgcagtgaagctttttacccgccagcttttggaactccatcagggacaaggcctagatatttactggagggataattacacttgtcccactgaagaagaatataaagctatggtgctgcagaaaacaggtggactgtttggattagcagtaggtctcatgcagttgttctctgattacaaagaagatttaaaaccgctacttaatacacttgggctctttttccaaattagggatgattatgctaatctacactccaaagaatatagtgaaaacaaaagtttttgtgaagatctgacagagggaaagttctcatttcctactattcatgctatttggtcaaggcctgaaagcacccaggtgcagaatatcttgcgccagagaacagaaaacatagatataaaaaaatactgtgtacattatcttgaggatgtaggttcttttgaatacactcgtaatacccttaaagagcttgaagctaaagcctataaacagattgatgcacgtggtgggaaccctgagctagtagccttagtaaaacacttaagtaagatgttcaaagaagaaaatgaataatgttaagccattcttgattggacctcatagcttattttagttaatcttttttttgtcttttagccttaccaccttttaaaaaatttgttattctccagaaacagtaaataggtgagtaggggtggtgcaagtgaattcgttttcatttagaagcccctctgtacagataatcaaaattcaaagttgaaagaatcaaaagcagccacagttatgtaggtctgatttgaatgtcataattgcagtgacaggacattgccaccaactctatcctactaccatcaatgttgtgtttattccgtcaataaaaaagacttgcttccaggaatttttatccatacactttctaactgtactatctgggcagttccaagccagtttctattagctagctggaccaaagaccacaaatctctttttttcctaaacgctgctgtaaggaatatctcacttttccccccggaaacaccctcactgaagtcttctatgaaaaggctgataatgggctgggcgcggtggctcacgcctgtaatcccagcactttgggaggccgaggcgggcagatcacgaggtcaggagatcgagaccatcctgacacggtgaaaccctgtctctactaaaaatacaaaaaattagctgggcgtggtggtgggcgcctgtagtcccagctactcgggaggctgaggcaggagaatggtgtgaacccaggaggcggagcttgcagtgagccgagatagtgcctctgcactccagcctgggtgacagagcgagactccgtctcaaaaaaaagggctgataatgataaacagtgagcactccggtcctttttcttaggttttccttttttccttcctctccaccccacaagttttgctttttaaccaaggtgtctctgcttgatgaaattcacatgctagtctaaatctttttttctcccttgtaacatttatgtgccccaaactggttagtatatgggtacagcattccctttccaattgggaagcggaaaaagagagtatgggatattttagaagggagcctttgaaccttattatatttccccatcattgatagtgacaatcttaaaagggttgttttcttaccttaagtacaaaagcatggaaaaatgcgcttttccttcccgcccacatcaccaccccgacttgaagacagtaggtgcttgaatggaaagtgagtaggcatctttaatcgccctgattaaaggaaagtgttagcctgagagggcctgactgaaaagtaaccaaaggcttaatatcaaacactaattagctttttagtgccttaaccctgacctggttaccagttttctgtagtttctacacccaagccactgaagtcatctgtggcccaagaggtaggacaaaaaaaaaaaaaaaaaaagctgatttcaatatttgatttgttgacatcccaaaatgaaagttttatgtttcccttagaaacatgttttgcttggttctatagtatgttacttaggatctatttaccatatatttgtatgagaaatcctcacccaagcattcaacctaaatctttgaaaagttgggtgctgtctttagtaacttttaaaatagtttaaatctcccattttaatagtgataaggaaacctgttaaaatcatggctattgatgttatagtatggaaagttgaactttatgaacccatacttttaaaaagcatttttaaaaatctaacactgactatagaaacaaattaaaatgtctacctttaagtataaaaa

SEQ ID NO: 12079 - DNA, 2740 bp, Homo sapiens
  source 1..2740: mol_type = unassigned DNA
cgcgcaaatcctcgtccgcgagaactgcaaggcccgcaatgccctgcgcctgcgtggaccgattagctttgaagtttaaatccaatggagaagactcaagaaacagtccaaagaattcttctagaaccctataaatacttacttcagttaccaggtaaacaagtgagaaccaaactttcacaggcatttaatcattggctgaaagttccagaggacaagctacagattattattgaagtgacagaaatgttgcataatgccagtttactcatcgatgatattgaagacaactcaaaactccgacgtggctttccagtggcccacagcatctatggaatcccatctgtcatcaattctgccaattacgtgtatttccttggcttggagaaagtcttaacccttgatcacccagatgcagtgaagctttttacccgccagcttttggaactccatcagggacaaggcctagatatttactggagggataattacacttgtcccactgaagaagaatataaagctatggtgctgcagaaaacaggtggactgtttggattagcagtaggtctcatgcagttgttctctgattacaaagaagatttaaaaccgctacttaatacacttgggctctttttccaaattagggatgattatgctaatctacactccaaagaatatagtgaaaacaaaagtttttgtgaagatctgacagagggaaagttctcatttcctactattcatgctatttggtcaaggcctgaaagcacccaggtgcagaatatcttgcgccagagaacagaaaacatagatataaaaaaatactgtgtacattatcttgaggatgtaggttcttttgaatacactcgtaatacccttaaagagcttgaagctaaagcctataaacagattgatgcacgtggtgggaaccctgagctagtagccttagtaaaacacttaagtaagatgttcaaagaagaaaatgaataatgttaagccattcttgattggacctcatagcttattttagttaatcttttttttgtcttttagccttaccaccttttaaaaaatttgttattctccagaaacagtaaataggtgagtaggggtggtgcaagtgaattcgttttcatttagaagcccctctgtacagataatcaaaattcaaagttgaaagaatcaaaagcagccacagttatgtaggtctgatttgaatgtcataattgcagtgacaggacattgccaccaactctatcctactaccatcaatgttgtgtttattccgtcaataaaaaagacttgcttccaggaatttttatccatacactttctaactgtactatctgggcagttccaagccagtttctattagctagctggaccaaagaccacaaatctctttttttcctaaacgctgctgtaaggaatatctcacttttccccccggaaacaccctcactgaagtcttctatgaaaaggctgataatgggctgggcgcggtggctcacgcctgtaatcccagcactttgggaggccgaggcgggcagatcacgaggtcaggagatcgagaccatcctgacacggtgaaaccctgtctctactaaaaatacaaaaaattagctgggcgtggtggtgggcgcctgtagtcccagctactcgggaggctgaggcaggagaatggtgtgaacccaggaggcggagcttgcagtgagccgagatagtgcctctgcactccagcctgggtgacagagcgagactccgtctcaaaaaaaagggctgataatgataaacagtgagcactccggtcctttttcttaggttttccttttttccttcctctccaccccacaagttttgctttttaaccaaggtgtctctgcttgatgaaattcacatgctagtctaaatctttttttctcccttgtaacatttatgtgccccaaactggttagtatatgggtacagcattccctttccaattgggaagcggaaaaagagagtatgggatattttagaagggagcctttgaaccttattatatttccccatcattgatagtgacaatcttaaaagggttgttttcttaccttaagtacaaaagcatggaaaaatgcgcttttccttcccgcccacatcaccaccccgacttgaagacagtaggtgcttgaatggaaagtgagtaggcatctttaatcgccctgattaaaggaaagtgttagcctgagagggcctgactgaaaagtaaccaaaggcttaatatcaaacactaattagctttttagtgccttaaccctgacctggttaccagttttctgtagtttctacacccaagccactgaagtcatctgtggcccaagaggtaggacaaaaaaaaaaaaaaaaaaagctgatttcaatatttgatttgttgacatcccaaaatgaaagttttatgtttcccttagaaacatgttttgcttggttctatagtatgttacttaggatctatttaccatatatttgtatgagaaatcctcacccaagcattcaacctaaatctttgaaaagttgggtgctgtctttagtaacttttaaaatagtttaaatctcccattttaatagtgataaggaaacctgttaaaatcatggctattgatgttatagtatggaaagttgaactttatgaacccatacttttaaaaagcatttttaaaaatctaacactgactatagaaacaaattaaaatgtctacctttaagt

SEQ ID NO: 12080 - DNA, 850 bp, Homo sapiens
  source 1..850: mol_type = unassigned DNA
aaggctttctgggaaataaagtccatactctggggccaacgcgcaaatcctcgtccgcgagaactgcaaggcccgcaatgccctgcgcctgcgtggaccgattagctttgaagtttaaatccaatggagaagactcaagaaacagtccaaagaattcttctagaaccctataaatacttacttcagttaccaggtaaacaagtgagaaccaaactttcacaggcatttaatcattggctgaaagttccagaggacaagctacagattattattgaagtgacagaaatgttgcataatgccagtttactcatcgatgatattgaagacaactcaaaactccgacgtggctttccagtggcccacagcatctatggaatcccatctgtcatcaattctgccaattacgtgtatttccttggcttggagaaagtcttaacccttgatcacccagatgcagtgaagctttttacccgccagcttttggaactccatcagggacaaggcctagatatttactggagggataattacacttgtcccactgaagaagaatataaagctatggtgctgcagaaaacaggtggactgtttggattagcagtaggtctcatgcagttgttctctgattacaaagaagatttaaaaccgctacttaatacacttgggctctttttccaaattagggatgattatgctaatctacactccaaagaatatagtgaaaacaaaagtttttgtgaagatctgacagagggaaagttctcatttcctactattcatgctatttggtcaaggcctgaaagcacccaggtgcagaatatcttgcgccagagaacagaaaacatagata

SEQ ID NO: 12081 - DNA, 2703 bp, Homo sapiens
  source 1..2703: mol_type = unassigned DNA
ccggactctgtgctagcactgtatacgtttgcagttctctgcccagccgctgtggaaaatcggcctcgaagtgattgaaattccctgtttatatcaggcggcttctttcagatccatcgtctttctcccggagtatgaatggaaggattcagtatgcgcttcacatttgtatgtctctggccattctcaaaccaggcccttccctttgaaaagtcttttgcatgggatgttcacttcttagacgcaaggttgtgtgccctggtttcatcgtctaacgcgttagaaggcgctttcatttcttcatgggtgttgagcgccgaccactggggtggcctctgccttcgtagacctgcgcctggtgagacggacagatgctgaacaaaacgatgtgaaattaccgcagtggcagtgccccagaggagagttccacggtgataggagaatgagggaatttggcttctttagggagggaaaggaagggtttctgagcaagtgaggatcgagctgagagctgaagggctagcaggagttaactaaggaaagagaaaaggaaaagacattccagacaaaaagactaacttgtcagaaagccctgtggcggaagggagcttttccaatatgaagaactgagcctggagagatgggatgagggggagtgtcgaaccttttaggctttgtaaaggagttttggttttctcctaatagcaatgggatatcttccaaggaatctcaatcaaaagggagagatggctccgattggaatgtcatccctggctgaagagtagaggaagcgaaaaaaagaagagttaaagaggcaaatgcagggaacccgacgaggaggctattgccgtagtagttcacatggtgaaaagaatggagcgtttgtattaatgattatggattcactctttgaacaaatttctggcagctttttagttttgaaagtgagaagtttcagactctcactgaggtattctgtagttttttcactctaaaaggaaactagtagagttcatgtaacacacactaatgcctctttacatttaactttagtatgtgatagctgaaatttccagctgtgataaattgggaaatcctttgatttaaaagaaaaacaaaggcgggtgagggtgagagtatatgccacggtgtgtagaatcctttagactcttaagaagacacaaggcggctgggcgtggtggctcacgcttgtaatcccagcactttgggaggccgaggcgggcggatcacgaggtcaggagatcgagaccatcctggctaacacggtgaaagcccgtctctactaaaaatacaaaaaaattagccgggcaaggtggcgggcgcctgtagtcccagctactcgggaggctgaggcaggagaatggcgtgaacccgggaggcggagtttgcagtgagacgagatcacgccactgcactccagcctgggcgacagagtgagacgctgtttcagaagaaagacacaaggcaactttgaagtttaaatccaatggagaagactcaagaaacagtccaaagaattcttctagaaccctataaatacttacttcagttaccaggtaaacaagtgagaaccaaactttcacaggcatttaatcattggctgaaagttccagaggacaagctacagattattattgaagtgacagaaatgttgcataatgccagtttactcatcgatgatattgaagacaactcaaaactccgacgtggctttccagtggcccacagcatctatggaatcccatctgtcatcaattctgccaattacgtgtatttccttggcttggagaaagtcttaacccttgatcacccagatgcagtgaagctttttacccgccagcttttggaactccatcagggacaaggcctagatatttactggagggataattacacttgtcccactgaagaagaatataaagctatggtgctgcagaaaacaggtggactgtttggattagcagtaggtctcatgcagttgttctctgattacaaagaagatttaaaaccgctacttaatacacttgggctctttttccaaattagggatgattatgctaatctacactccaaagaatatagtgaaaacaaaagtttttgtgaagatctgacagagggaaagttctcatttcctactattcatgctatttggtcaaggcctgaaagcacccaggtgcagaatatcttgcgccagagaacagaaaacatagatataaaaaaatactgtgtacattatcttgaggatgtaggttcttttgaatacactcgtaatacccttaaagagcttgaagctaaagcctataaacagattgatgcacgtggtgggaaccctgagctagtagccttagtaaaacacttaagtaagatgttcaaagaagaaaatgaataatgttaagccattcttgattggacctcatagcttattttagttaatcttttttttgtcttttagccttaccaccttttaaaaaatttgttattctccagaaacagtaaataggtgagtaggggtggtgcaagtgaattcgttttcatttagaagcccctctgtacagataatcaaaattcaaagttgaaagaatcaaaagcagccacagttatgtaggtctgatttgaatgtcataattgcagtgacaggacattgccaccaactctatcctactaccatcaatgttgtgttta

SEQ ID NO: 12082 - DNA, 1396 bp, Homo sapiens
  source 1..1396: mol_type = unassigned DNA
aggccggccgggggccaccgaggggccaggagggcctgtgggccgcgggcaggaccggcccgccacagagcccctgcccacgtcccgttccgggctcagacccgacaagtgggagcgagatcaacatctggccccgccgcggggacaacattagctttgaagtttaaatccaatggagaagactcaagaaacagtccaaagaattcttctagaaccctataaatacttacttcagttaccaggtaaacaagtgagaaccaaactttcacaggcatttaatcattggctgaaagttccagaggacaagctacagattattattgaagtgacagaaatgttgcataatgccagtttactcatcgatgatattgaagacaactcaaaactccgacgtggctttccagtggcccacagcatctatggaatcccatctgtcatcaattctgccaattacgtgtatttccttggcttggagaaagtcttaacccttgatcacccagatgcagtgaagctttttacccgccagcttttggaactccatcagggacaaggcctagatatttactggagggataattacacttgtcccactgaagaagaatataaagctatggtgctgcagaaaacaggtggactgtttggattagcagtaggtctcatgcagttgttctctgattacaaagaagatttaaaaccgctacttaatacacttgggctctttttccaaattagggatgattatgctaatctacactccaaagaatatagtgaaaacaaaagtttttgtgaagatctgacagagggaaagttctcatttcctactattcatgctatttggtcaaggcctgaaagcacccaggtgcagaatatcttgcgccagagaacagaaaacatagatataaaaaaatactgtgtacattatcttgaggatgtaggttcttttgaatacactcgtaatacccttaaagagcttgaagctaaagcctataaacagattgatgcacgtggtgggaaccctgagctagtagccttagtaaaacacttaagtaagatgttcaaagaagaaaatgaataatgttaagccattcttgattggacctcatagcttattttagttaatcttttttttgtcttttagccttaccaccttttaaaaaatttgttattctccagaaacagtaaataggtgagtaggggtggtgcaagtgaattcgttttcatttagaagcccctctgtacagataatcaaaattcaaagttgaaagaatcaaaagcagccacagttatgtaggtctgatttgaatgtcataattgcagtgacaggacattgccaccaactctatcctactaccatcaatgttgtgtttattccgtcaataaaaaagacttgcttcca

SEQ ID NO: 12083 - DNA, 868 bp, Homo sapiens
  source 1..868: mol_type = unassigned DNA
tagcactgtatacgtttgcagttctctgcccagccgctgtggaaaatcggcctcgaagtgattgaaattccctgtttatatcaggcggcttctttcagatccatcgtctttctcccggagtatgaatggaaggattcagtatgcgcttcacatttattagctttgaagtttaaatccaatggagaagactcaagaaacagtccaaagaattcttctagaaccctataaatacttacttcagttaccaggtaaacaagtgagaaccaaactttcacaggcatttaatcattggctgaaagttccagaggacaagctacagattattattgaagtgacagaaatgttgcataatgccagtttactcatcgatgatattgaagacaactcaaaactccgacgtggctttccagtggcccacagcatctatggaatcccatctgtcatcaattctgccaattacgtgtatttccttggcttggagaaagtcttaacccttgatcacccagatgcagtgaagctttttacccgccagcttttggaactccatcagggacaaggcctagatatttactggagggataattacacttgtcccactgaagaagaatataaagctatggtgctgcagaaaacaggtggactgtttggattagcagtaggtctcatgcagttgttctctgattacaaagaagatttaaaaccgctacttaatacacttgggctctttttccaaattagggatgattatgctaatctacactccaaagaatatagtgaaaacaaaagtttttgtgaagatctgacagagggaaagttctcatttcctactattcatgctatttggtcaaggcctgaaagcacccaggtg

SEQ ID NO: 12084 - DNA, 3336 bp, Homo sapiens
  source 1..3336: mol_type = unassigned DNA
ctctaacactcctcccccagcctcttccttccctctgcagagacacccttctcctttctgctgtctctgcacgggtggccagagccacacagccctttctttaagtcaggagttgccctgtcagagcacaaggcaagaaggaagtggtaaagggacggaggggaagccctgagaggactgagaggatgggaaattctctgctgagagaaaacaggcggcagcagaacactcaagagatgccttggaatgtgagaatgcaaagccccaaacagagaacatccagatgctgggatcaccatatcgctgaagggtgtttctgccttccatggaaaaaaatactcatttttgaaaagaggcaagattcccaaaacgaaaatgaaagaatgtcatctactcccatccaggacaatgttgaccagacctactcagaggagctgtgctataccctcatcaatcatcgggttctctgtacaaggccatcagggaactctgctgaagagtactatgagaatgttccctgcaaagctgagagacccagagagtccttgggaggaactgagactgagtattcacttctacatatgccttctacagaccccaggcatgcccgatccccagaagatgaatatgaacttctcatgcctcacagaatctcctctcactttctgcaacagccacgtccacttatggccccttctgagactcagttttcccatttatagtgaagtggctggactagcatttgtttagcaccaacaaataaaaggtgggatgggggatctgcctgaagcagggatgggacacaaagtccctccagcttatctcccacaacaaccctttccctgcagagcatggtttgtataccacaagccctcttagcacgcaaaagccaaaatctaaagatcaaccatttatcctgaacaacaccatttgagaaagaggtaaccatctttggttctacatggtttggagagtatagtggtaggaggggctccctgattcccctaaagctatgcacaccacaaggggctctgctcttctgtctgggatcttcttataaagtgttcccatgatcattctctaaagtcacaaggaagctttactcatcatactaagtgtgcccaagggggagttcactcattactgtgaccttccagctcagtccccacccatgggagcctgtgttgctcctctcactccatgtgtctaagtcatgtcttttacatagtgtcctttgacctgttggcccccatggtctggttagttatgtgagttgaatcaagaggctctaggccagatgtttacataattttaacctatatgattttatttttaactttgtatttctccctagaaatcttaataagacaattatgccatcagacaatgttaagaagaacgatccttggagatcccgtaatcccactacccttctttggctcagagaggataatttgcctaatgatacattaaagttagtggcaaaacttaatttggagcctgatttcctactgacttccaatttagtgctcccccagtatgctaaatagaaagccctctgcaatatattaaatgtatactaaatgtatatatttaataatgtcatgtataaaatatgaataaaatgtccacataggaaattaacacatatataccttctctgataagcactcctctatgtgtcctgattatttactttctcttatcttttccttagtgttcctcaaattatatctatcctctaaaccagggatcagcaaactataacccccaggccaaatctagcccactccctgtttttatagataaagatttgttggaacacagccacactcatttgtttacctactatctatgattgttcaaccatgggagagttgagtaattgtgacatggaccataggccctaaagagccaaaataaatatactttggcactttttggaaaaaaagtttgcagacacctgccctaaatgattatagtttgagagaaacttaacagaaatgtgtttggttactgatgcataagagcaagcaccaataaaatggcataaaaatattaaatcacaaatggataagtgagaccaaggcaatttagcaaattctactatttctgtattcacacctgtgtcttccacttgctgttttatttaactcacggctactgtcctaattttagggatgctaaaatagtttgttttaaaagaggtttgtttaagaaagcagtaggtacattatgtttactagacaggcccttggaccagctaagcgacagggaacctggtacattatgtttagttactgttttcttctcaaagttaaccaaagctaaataactttcctatgtaaaatgtgctgactcccaaaagaggagaaatgcaatggcttgagcttgcatgtgtcacaggtttgtggagccttcagccaggtgatggtcttcagctaaagagccagctgcatcttggtatctcttcctctgctaacttcctacttttagcaaaattctttcacttggaactctagctgatccttggccaggatcagatcctcaaaaggaaatattcagttagcagtggatattgtacaagatgtaacatggcttagaggaaagagtgtagacccagcgacagatcatcagtcactcaaatcctggttctctctcttcctccatctgtgactttgaacatgctacttggaggctcagcttcttcaccatcaacaggaggattacatctaatgcaggcaatcatctattacagatgccgaataaatgatatcaaagagcatagagaaacaaaaatcttttatgatgtacggaaaaaaaccatgctgatacagctggctattcagggtcacccagcagtcctccagcaaggtagaaacaccaaatcaatgagtttatgctagaatttttcacatggccactggaccattgtggaagtagactggttgaaatattcttagtatgacatagtaagttatatttgtttgaaccttatcctgtgaaagcattatctgtcccaaacagtatatgccttttatcagggacacattaaatataaatgtttaaccaaagaaagttgttcttataatgtaattataacagggatttataagagggaattataagagggattatgaaagggaattacttttgagcaaggggagccatttgggagtgcttcaagatacccaatatgatatacacaattatgatttgtcagtcaaaaataatattaagaacaaaaaaagagttaaaaaattctgatatgagtgtaatatacttaatatgtaggatgtctcaaatttccagtaaataaattttaatgtcccaaaa

SEQ ID NO: 12085 - DNA, 623 bp, Homo sapiens
  source 1..623: mol_type = unassigned DNA
tttctgctgtctctgcacgggtggccagagccacacagccctttctttaagtcaggagttgccctgtcagagcacaaggcaagaaggaagtggtaaagggacggaggggaagccctgagaggactgagaggatgggaaattctctgctgagagaaaacaggcggcagcagaacactcaagagatgccttggaatgtgagaatgcaaagccccaaacagagaacatccaggaaaaaaatactcatttttgaaaagaggcaagattcccaaaacgaaaatgaaagaatgtcatctactcccatccaggacaatgttgaccagacctactcagaggagctgtgctataccctcatcaatcatcgggttctctgtacaaggccatcagggaactctgctgaagagtactatgagaatgttccctgcaaagctgagagacccagagagtccttgggaggaactgagactgagtattcacttctacatatgccttctacagaccccaggcatgcccgatccccagaagatgaatatgaacttctcatgcctcacagaatctcctctcactttctgcaacagccacgtccacttatggccccttctgagactcagttttcccatttatag

SEQ ID NO: 12086 - DNA, 1036 bp, Homo sapiens
  source 1..1036: mol_type = unassigned DNA
tcctttctgctgtctctgcacgggtggccagagccacacagccctttctttaagtcaggagttgccctgtcagagcacaaggcaagaaggaagtggtaaagggacggaggggaagccctgagaggactgagaggatgggaaattctctgctgagagaaaacagtttcaggcggcagcagaacactcaagagatgccttggaatgtgagaatgcaaagccccaaacagagaacatccagatgctgggatcaccatatcgctgaagggtgtttctgccttccatggaaaaaaatactcatttttgaaaagaggcaagattcccaaaacgaaaatgaaagaatgtcatctactcccatccaggacaatgttgaccagacctactcagaggagctgtgctataccctcatcaatcatcgggttctctgtacaaggccatcagggaactctgctgaagagtactatgagaatgttccctgcaaagctgagagacccagagagtccttgggaggaactgagactgagtattcacttctacatatgccttctacagaccccaggcatgcccgatccccagaagatgaatatgaacttctcatgcctcacagaatctcctctcactttctgcaacagccacgtccacttatggccccttctgagactcagttttcccatttatagtgaagtggctggactagcatttgtttagcaccaacaaataaaaggtgggatgggggatctgcctgaagcagggatgggacacaaagtccctccagcttatctcccacaacaaccctttccctgcagagcatggtttgtataccacaagccctcttagcacgcaaaagccaaaatctaaagatcaaccatttatcctgaacaacaccatttgagaaagaggtaaccatctttggttctacatggtttggagagtatagtggtaggaggggctccctgattcccctaaagctatgcacaccacaaggggctctgctcttctgtctgggatcttcttataaagtgttcccatgatcattctc

SEQ ID NO: 12087 - DNA, 1313 bp, Homo sapiens
  source 1..1313: mol_type = unassigned DNA
gtggatgtttacttgctggtggtcttatctaagatcaacattggcagctgtgcccggagaggcctccagggtccaggtccaatgcacttccctctcagaagaggcatccgctaaaatagggaccaaagctgctggagggaggcaaggcaagctgctatgtgaaaaaacgccaggccaggcagtcatgtcacacctggcagaaatgactgaagcatagccactggctgaagttatccccacacccactctctggagaggatgatcaggagcagtctgctcaaccgggaggtgggactcctcctcgggaaggtgtagaatcaccagcctggctccctgcggactcccggggctcacagaggccagagcagcaacagcacatgggaaacaacggggcgctggactggggaggtctcagagctctcctagtgatgacagcctcattttacccagggagaaagggcgagtaagctaaggtcacacagcaacaaagctgcacccagaccccagagccactctcctccctccctcctccaccagggccatgcccacttggggcaccccgccaccgtgttccagggacagctggagcacatgcttcttccctcgccaacccagcaattccgcagggcatctgacctccactgttgacttctacccagaggacaagaacatttttagttcccaaggaatgtacatcagccccacggaagctaggccacctctgggatggggttgctggtttagaacaaacgccagtcatcctatataaggacctgacagccaccaggcaccacctccgccaggaactgcaggcccacctgtctgcaacccagctgaggccatgccctccccagggaccgtctgcagcctcctgctcctcggcatgctctggctggacttggccatggcaggctccagcttcctgagccctgaacaccagagagtccagagaaaggagtcgaagaagccaccagccaagctgcagccccgagctctagcaggctggctccgcccggaagatggaggtcaagcagaaggggcagaggatgaactggaagtccggttcaacgccccctttgatgttggaatcaagctgtcaggggttcagtaccagcagcacagccaggccctggggaagtttcttcaggacatcctctgggaagaggccaaagaggccccagccgacaagtgatcgcccacaagccttactcacctctctctaagtttagaagcgctcatctggcttttcgcttgcttctgcagcaactcccacgactgttgtacaagctcaggaggcgaataaatgttcaaac

SEQ ID NO: 12088 - DNA, 1425 bp, Homo sapiens
  source 1..1425: mol_type = unassigned DNA
agttccccaaagataacacagctttgcacagtggatgtttacttgctggtggtcttatctaagatcaacattggcagctgtgcccggagaggcctccagggtccaggtccaatgcacttccctctcagaagaggcatccgctaaaatagggaccaaagctgctggagggaggcaaggcaagctgctatgtgaaaaaacgccaggccaggcagtcatgtcacacctggcagaaatgactgaagcatagccactggctgaagttatccccacacccactctctggagaggatgatcaggagcagtctgctcaaccgggaggtgggactcctcctcgggaaggtgtagaatcaccagcctggctccctgcggactcccggggctcacagaggccagagcagcaacagcacatgggaaacaacggggcgctggactggggaggtctcagagctctcctagtgatgacagcctcattttacccagggagaaagggcgagtaagctaaggtcacacagcaacaaagctgcacccagaccccagagccactctcctccctccctcctccaccagggccatgcccacttggggcaccccgccaccgtgttccagggacagctggagcacatgcttcttccctcgccaacccagcaattccgcagggcatctgacctccactgttgacttctacccagaggacaagaacatttttagttcccaaggaatgtacatcagccccacggaagctaggccacctctgggatggggttgctggtttagaacaaacgccagtcatcctatataaggacctgacagccaccaggcaccacctccgccaggaactgcaggcccacctgtctgcaacccagctgaggccatgccctccccagggaccgtctgcagcctcctgctcctcggcatgctctggctggacttggccatggcaggctccagcttcctgagccctgaacaccagagagtccagcagagaaaggagtcgaagaagccaccagccaagctgcagccccgagctctagcaggctggctccgcccggaagatggaggtcaagcagaaggggcagaggatgaactggaagtccggttcaacgccccctttgatgttggaatcaagctgtcaggggttcagtaccagcagcacagccaggccctggggaagtttcttcaggacatcctctgggaagaggccaaagaggccccagccgacaagtgatcgcccacaagccttactcacctctctctaagtttagaagcgctcatctggcttttcgcttgcttctgcagcaactcccacgactgttgtacaagctcaggaggcgaataaatgttcaaactgtatgctgatgttccaaatgggaatttatttcaaagaggaaaagttaatattttactttaaaaaaatcaaaataatac

SEQ ID NO: 12089 - DNA, 401 bp, Homo sapiens
  source 1..401: mol_type = unassigned DNA
caggcccacctgtctgcaacccagctgaggccatgccctccccagggaccgtctgcagcctcctgctcctcggcatgctctggctggacttggccatggcaggctccagcttcctgagccctgaacaccagagagtccagcagagaaaggagtcgaagaagccaccagccaagctgcagccccgagctctagcaggctggctccgcccggaagatggaggtcaagcagaaggggcagaggatgaactggaagtccggaggccccagccgacaagtgatcgcccacaagccttactcacctctctctaagtttagaagcgctcatctggcttttcgcttgcttctgcagcaactcccacgactgttgtacaagctcaggaggcgaataaatgttcaaactgt

SEQ ID NO: 12090 - DNA, 227 bp, Homo sapiens
  source 1..227: mol_type = unassigned DNA
aagataacacagctttgcacagtggatgtttacttgctggtggtcttatctaagatcaacattggcagctgtgcccggagaggcctccagggtccaggcccacctgtctgcaacccagctgaggccatgccctccccagggaccgtctgcagcctcctgctcctcggcatgctctggctggacttggccatggcaggctccagcttcctgagccctgaacaccagag

SEQ ID NO: 12091 - DNA, 793 bp, Homo sapiens
  source 1..793: mol_type = unassigned DNA
aacacagctttgcacagtggatgtttacttgctggtggtcttatctaagatcaacattggcagctgtgcccggagaggcctccagggtccagcaattccgcagggcatctgacctccactgttgacttctacccagaggacaagaacatttttagttcccaaggaatgtacatcagccccacggaagctaggccacctctgggatggggttgctggtttagaacaaacgccagtcatcctatataaggacctgacagccaccaggcaccacctccgccaggaactgcaggcccacctgtctgcaacccagctgaggccatgccctccccagggaccgtctgcagcctcctgctcctcggcatgctctggctggacttggccatggcaggctccagcttcctgagccctgaacaccagagagtccagcagagaaaggagtcgaagaagccaccagccaagctgcagccccgagctctagcaggctggctccgcccggaagatggaggtcaagcagaaggggcagaggatgaactggaagtccggttcaacgccccctttgatgttggaatcaagctgtcaggggttcagtaccagcagcacagccaggccctggggaagtttcttcaggacatcctctgggaagaggccaaagaggccccagccgacaagtgatcgcccacaagccttactcacctctctctaagtttagaagcgctcatctggcttttcgcttgcttctgcagcaactcccacgactgttgtacaagctcaggaggcgaataaatgttcaaac

SEQ ID NO: 12092 - DNA, 856 bp, Homo sapiens
  source 1..856: mol_type = unassigned DNA
gtggatgtttacttgctggtggtcttatctaagatcaacattggcagctgtgcccggagaggcctccagggtccagggccatgcccacttggggcaccccgccaccgtgttccagggacagctggagcacatgcttcttccctcgccaacccagcaattccgcagggcatctgacctccactgttgacttctacccagaggacaagaacatttttagttcccaaggaatgtacatcagccccacggaagctaggccacctctgggatggggttgctggtttagaacaaacgccagtcatcctatataaggacctgacagccaccaggcaccacctccgccaggaactgcaggcccacctgtctgcaacccagctgaggccatgccctccccagggaccgtctgcagcctcctgctcctcggcatgctctggctggacttggccatggcaggctccagcttcctgagccctgaacaccagagagtccagagaaaggagtcgaagaagccaccagccaagctgcagccccgagctctagcaggctggctccgcccggaagatggaggtcaagcagaaggggcagaggatgaactggaagtccggttcaacgccccctttgatgttggaatcaagctgtcaggggttcagtaccagcagcacagccaggccctggggaagtttcttcaggacatcctctgggaagaggccaaagaggccccagccgacaagtgatcgcccacaagccttactcacctctctctaagtttagaagcgctcatctggcttttcgcttgcttctgcagcaactcccacgactgttgtacaagctcaggaggcgaataaatgttcaaactgta

SEQ ID NO: 12093 - DNA, 443 bp, Homo sapiens
  source 1..443: mol_type = unassigned DNA
gtggatgtttacttgctggtggtcttatctaagatcaacattggcagctgtgcccggagaggcctccagggtccagcagagaaaggagtcgaagaagccaccagccaagctgcagccccgagctctagcaggctggctccgcccggaagatggaggtcaagcagaaggggcagaggatgaactggaagtccggttcaacgccccctttgatgttggaatcaagctgtcaggggttcagtaccagcagcacagccaggccctggggaagtttcttcaggacatcctctgggaagaggccaaagaggccccagccgacaagtgatcgcccacaagccttactcacctctctctaagtttagaagcgctcatctggcttttcgcttgcttctgcagcaactcccacgactgttgtacaagctcaggaggcgaataaatgttcaaac

SEQ ID NO: 12094 - DNA, 326 bp, Homo sapiens
  source 1..326: mol_type = unassigned DNA
gtggatgtttacttgctggtggtcttatctaagatcaacattggcagctgtgcccggagaggcctccagggtccagttcaacgccccctttgatgttggaatcaagctgtcaggggttcagtaccagcagcacagccaggccctggggaagtttcttcaggacatcctctgggaagaggccaaagaggccccagccgacaagtgatcgcccacaagccttactcacctctctctaagtttagaagcgctcatctggcttttcgcttgcttctgcagcaactcccacgactgttgtacaagctcaggaggcgaataaatgttcaaac

SEQ ID NO: 12095 - DNA, 440 bp, Homo sapiens
  source 1..440: mol_type = unassigned DNA
gtggatgtttacttgctggtggtcttatctaagatcaacattggcagctgtgcccggagaggcctccagggtccagagaaaggagtcgaagaagccaccagccaagctgcagccccgagctctagcaggctggctccgcccggaagatggaggtcaagcagaaggggcagaggatgaactggaagtccggttcaacgccccctttgatgttggaatcaagctgtcaggggttcagtaccagcagcacagccaggccctggggaagtttcttcaggacatcctctgggaagaggccaaagaggccccagccgacaagtgatcgcccacaagccttactcacctctctctaagtttagaagcgctcatctggcttttcgcttgcttctgcagcaactcccacgactgttgtacaagctcaggaggcgaataaatgttcaaac

SEQ ID NO: 12096 - DNA, 524 bp, Homo sapiens
  source 1..524: mol_type = unassigned DNA
acctccgccaggaactgcaggcccacctgtctgcaacccagctgaggccatgccctccccagggaccgtctgcagcctcctgctcctcggcatgctctggctggacttggccatggcaggctccagcttcctgagccctgaacaccagagagtccagagaaaggagtcgaagaagccaccagccaagctgcagccccgagctctagcaggctggctccgcccggaagatggaggtcaagcagaaggggcagaggatgaactggaagtccggttcaacgccccctttgatgttggaatcaagctgtcaggggttcagtaccagcagcacagccaggccctggggaagtttcttcaggacatcctctgggaagaggccaaagaggccccagccgacaagtgatcgcccacaagccttactcacctctctctaagtttagaagcgctcatctggcttttcgcttgcttctgcagcaactcccacgactgttgtacaagctcaggaggcgaataaatgttcaaactgt

SEQ ID NO: 12097 - DNA, 527 bp, Homo sapiens
  source 1..527: mol_type = unassigned DNA
acctccgccaggaactgcaggcccacctgtctgcaacccagctgaggccatgccctccccagggaccgtctgcagcctcctgctcctcggcatgctctggctggacttggccatggcaggctccagcttcctgagccctgaacaccagagagtccagcagagaaaggagtcgaagaagccaccagccaagctgcagccccgagctctagcaggctggctccgcccggaagatggaggtcaagcagaaggggcagaggatgaactggaagtccggttcaacgccccctttgatgttggaatcaagctgtcaggggttcagtaccagcagcacagccaggccctggggaagtttcttcaggacatcctctgggaagaggccaaagaggccccagccgacaagtgatcgcccacaagccttactcacctctctctaagtttagaagcgctcatctggcttttcgcttgcttctgcagcaactcccacgactgttgtacaagctcaggaggcgaataaatgttcaaactgt

SEQ ID NO: 12098 - DNA, 855 bp, Homo sapiens
  source 1..855: mol_type = unassigned DNA
gtggatgtttacttgctggtggtcttatctaagatcaacattggcagctgtgcccggagaggcctccagggtccagggccatgcccacttggggcaccccgccaccgtgttccagggacagctggagcacatgcttcttccctcgccaacccagcaattccgcagggcatctgacctccactgttgacttctacccagaggacaagaacatttttagttcccaaggaatgtacatcagccccacggaagctaggccacctctgggatggggttgctggtttagaacaaacgccagtcatcctatataaggacctgacagccaccaggcaccacctccgccaggaactgcaggcccacctgtctgcaacccagctgaggccatgccctccccagggaccgtctgcagcctcctgctcctcggcatgctctggctggacttggccatggcaggctccagcttcctgagccctgaacaccagagagtccagcagagaaaggagtcgaagaagccaccagccaagctgcagccccgagctctagcaggctggctccgcccggaagatggaggtcaagcagaaggggcagaggatgaactggaagtccggttcaacgccccctttgatgttggaatcaagctgtcaggggttcagtaccagcagcacagccaggccctggggaagtttcttcaggacatcctctgggaagaggccaaagaggccccagccgacaagtgatcgcccacaagccttactcacctctctctaagtttagaagcgctcatctggcttttcgcttgcttctgcagcaactcccacgactgttgtacaagctcaggaggcgaataaatgttcaaac

SEQ ID NO: 12099 - DNA, 4677 bp, Homo sapiens
  source 1..4677: mol_type = unassigned DNA
caggcacgtcccgggggctccagcttctgctcagagcgcggagagccgggccgggcgggcgcgcgcgcaggactcgggccgctcgaggggtccggccggacggtgtcgggagccggacccgtcggcagaggagcgggcgccgcgatggctgagggcagtgccgtgtctgaccctcagcacgccgcgcgtctgctgcgagcgctcagctctttccgcgaggagtctcgcttctgcgacgcgcacctggtcctcgacggggaggagatcccggtgcagaagaacatcctggcggcggccagcccgtacatcaggacaaagttaaactataatcctccaaaagatgatggatcaacttataagattgaacttgaagggatatcggtaatggttatgagagagatcctggattacatcttcagtgggcagatcaggctaaatgaagatacaatccaagatgttgttcaggcagctgacctgctgctactgacggaccttaaaaccctgtgctgtgagtttttggaaggctgcattgctgctgagaactgtattggtatccgtgactttgcactacattactgcctccatcacgttcattaccttgccacagaatacctggagactcatttccgagacgtcagcagcacggaagaattcttagagctgagtcctcaaaagcttaaagaagtgatttctcttgagaagttaaacgttggcaatgaaagatatgtctttgaagcagtaattcgatggatagcacatgatacagaaataagaaaggtccacatgaaggatgttatgtcagctctgtgggtttcagggttggactccagttatttacgggaacagatgctgaatgaaccattagtacgagaaattgtcaaagagtgtagcaatataccgctcagccagccgcagcaaggggaggcgatgctggccaacttcaaaccccggggctactctgagtgcatcgtgactgttggtggagaagagagagtttcacggaaacccacagcagcgatgcgatgcatgtgccctctctatgaccctaacaggcagctttggatcgaactggcccctttaagcatgccgagaattaaccatggagttctctcagcagaaggatttttgtttgtattcgggggccaagatgaaaataagcagactcttagctcaggagaaaagtatgatccagatgcaaatacatggacagcattgccacctatgaacgaggcaagacataacttcggaattgtggagatagatgggatgctgtacattttgggaggagaggatggtgaaaaggagctgatttccatggagtgttacgatatttattctaaaacctggacaaagcaacctgatttgaccatggtcagaaagatcggctgctatgcagctatgaaaaagaaaatctacgccatgggtggaggctcctacggaaagctttttgagtctgtagagtgttatgatcccaggacccagcagtggactgccatatgtccactaaaagagaggaggtttggagcggtggcctgtggagttgctatggagctgtatgtgtttgggggagtccgaagtcgtgaggacgcccagggtagcgagatggtaacttgcaagtccgagttctaccatgatgagtttaaaaggtggatctatcttaacgaccagaatttatgcatccccgccagttcctcttttgtttatggagctgtacctataggagccagtatttatgttattggagatcttgatacaggtaccaattacgactacgtgcgtgagtttaaaagaagcacaggaacctggcaccacactaaaccactccttccatccgaccttcgccgtacaggatgtgcagccttacgcattgcgaattgcaagcttttccgcctgcagcttcagcaaggcttattccgtattcgtgttcattccccttgaggaggaagcagagcagagtgcgagatcctgacccaagagcaccataacatagctccgaaagggagagcagagatggcagctgaaactcactctgtgctgggctttggtatggtaactctttggtggttttatgatgcttacaaacttgagctttagctcttgtttgggagaacacgtaactgttgaaaaactacctgggaggagtgagttcctccagttaaatgtggctgtagatgttggaggctagggaggctagtaaatatcaaaaggaaaagggagtgggaattgctatcatgtaaaatatcaaagttaaaatactaaggtgcattttccctgaagggaactcatgtctgactgctgtattcaaatacgtagctttggtaacaaacaaaatccgtatatgcaaatcaacatatccaaacatgccaagactgcttttccactgcacttggaaggatatattatgcctaaccctgcccaacaaattaaggtttgtgcctaaaatgttagattggactgtatgccagttagtctccatttattcctagtactctgtcctaagaatctttttaaaactatatcatgatgaattgaaatgaagataaaattgctcttttgtaactttatcttagtaatgtaaagattcagtaaattgatgagtcaggttgcagccctcatgtgaactgaaagaagttgctcgcttctgtgttgacttagatcaagacacgtcacgcatcctttctggggtagtacctgtggagccgggaagggtctcctgcagtgccattctgccttctcaatgagcaaaaccattttctaagtatgaggatattagtgagtaggagattttataaaagaaagacctgagtcagacaaataataaaggtctgctgtggctaaaaaagcaaaaacaaaaaagctatccagacaaaatacatagggatcagaaactttttcatataacctgtctgaaagcacacaaagtcttgtttactactgtttagggtttgaaaacttgtcttagaatgcgaatctgtgttaagaatctagtctttgtaatagaagtttcccagtggcattcactagtgagagttttagacaaattatgttacgagtaaagtttggctggtagaataaactacctcaacttaatttcattctgttcatagtagagcaaattaatcttttcctccttccctcctttcctatctctcattctcacctcaacccactttaccccacttctcattgggggaaaaatgtctttcgttcgtggaacgtatcttgtaagatattttgttttccacttgaattacaccaccctagtgtgaaatcggggacttcaaagtgcttgattccttcctaaattgaattttatgcaatgtcaaatttctaatcaatttaatatacagtacttcatttttaattgttttctaaaaaaaaggttttttttttccttttggaatatggctgtaagaagcagcattttgtcttattaacacatgtataaaggtatcctttggttttaagtcgagaacaggaatttcttctagaaacttcctgtatggaacgtttatatgcaattaacatgcatatgaaaaacatcacttacgttctcccacccatagacataaaaaagggtgacctgtgattttttttcttatacctgctggaagtcagtacaatgcgtcaaaagttgctgaaagatgctgtgcctatggggttctagagagtgttgagtgtggtacattaactctccattttagccagaagatacctgataagagaaggtgtaaggtttttatcttatatgccagaggcaccaggccagatgtgccgcacagtcatgtaattcaatcatgtttaatatgtcagtcaaaaccaaattcagaattgttttgtgtaccagtcagctgttgtctgcacattttcgtagtgacagtgtggagatctttttaatgaaagcaaactatgtggcctctgcaaagaaaggaagatttttctttttacaactagatattagttttagaggaaggaaatagctgaaaaactaaatttgctttggtgaaatgtcctgtacagaacagtaccttggcattcagcagctgtaattggggaacattaaaacagtaactgacatccagttaaagccacgatcgtcagcaattctccttttttaatttctgatatttaaagttttttttccagtctacaccaggcctctccaaggagacagttcattatttaggagtgaatgtgttcctcttgcaatattatcagtacctgcatgacttggtaaattcattttataaaaatagtgttttttttttttaatttcagttcattgactctataactgcagaaattagataatgttttataaaataaatttgccacataatatgggatgcaataaccaacaaagctgctaagtgccaaactgttattttactatatataaatattaaaatattgtgttgaagtatagggatgtatttaattttactatgctccaacattaatcatgactcttttgtaaattacagttatttcagtattgtaaaataaatgttgactcatttcatgcaggtttgtgttttaacattccacttatgccttgaaacatcatttcttgataactttttgatacttctttcttgataaggcacttttaccaggtgtgtgttggaattggtggctcaggataggtcttaaattttaaatacaaatatctttggg

SEQ ID NO: 12100 - DNA, 3249 bp, Homo sapiens
  source 1..3249: mol_type = unassigned DNA
ctagaacgaaaggagtgaggcgccgagagcccagataccattttggcgtgagagctggtggttggcaaggccgcgggagtgggaagcgtccgccatgttctgcgaaaaagccatggaactgatccgcgagctgcatcgcgcgcccgaagggcaactgcctgccttcaacgaggatggactcagacaagttctggaggagatgaaagctttgtatgaacaaaaccagtctgatgtgaatgaagcaaagtcaggtggacgaagtgatttgataccaactatcaaatttcgacactgttctctgttaagaaatcgacgctgcactgtagcatacctgtatgaccgcttgcttcggatcagagcactcagatgggaatatggtagcgtcttgccaaatgcattacgatttcacatggctgctgaagaaatggagtggtttaataattataaaagatctcttgctacttatatgaggtcactgggaggagatgaaggtttggacattacacaggatatgaaaccaccaaaaagcctatatattgaagtccggtgtctaaaagactatggagaatttgaagttgatgatggcacttcagtcctattaaaaaaaaatagccagcactttttacctcgatggaaatgtgagcagctgatcagacaaggagtcctggagcacatcctgtcatgaccatgcgccgaggcacttccaggcttcactcaactcatggactcctctgtactcactctctccaccactcccttcacctccctctttgattttagaagctatagacattgtttaagataactaagaatacttggctaagaagtataatttgctaactattaaggactttctttttttaatgttgtacactattcttcctactcttttttggttttggttttgttttgtagagactgtctcactatgttgcccaagctggtctcaaactcctggcctcaagcagtcctcccaccttagcttctcaaagtgttgagatcacaggcgtgagccactgcacccggcccctactcctttttctaataagctgtatctgtaatcacagcattcctacagttgttacagtgtgttttttaaatgaaagtaaacatggttacatttgaatctcttaaataagcagtcacttggctggacaggaagaaggtagatcctgtgtgtcttgttttctggtcatgtgtattgtacaagctagagagctgaatttctgagatacacattttcaaatcacatgcaagtgaagatgatggtctgtagaaattttcagtatatataatgtttaatgacatactaatttatcatctggctatttgggaaggaaggacacacatggattttgcacatttccaccatggtggctggtgtggcttgtggctatggggtgatcaccagtatcaccactttggaaggggacagtgaaattggggctagagaaggaactttgtacagttttccctgagattcagattgactgaaaagtcacatgaagagttgattgtcttttaatggtatgttttaaacagctgacattttaaattttgatgaaatccagtttattcgtttgttcttttatgctttgggtgttgcatccgagaaatcttttcccatcccaagatcacaattttttttcctttttacttctagaagtgttataattttaagctttatactttggtctatgacccgtttttttttttgttttgttttgttttttcgtttgtttctttgttttgagatggagtcttgttctgtcacccaggctggggtgcagtggcgtgatcttggctcactgcaatctctatcccctgggttcaagtgattctcttgtctcagcctcccaagtagctgggattacaggcacaggccgccacgcctggctaatttttgtatttttagtagagacagagttttaccatgttggccaggctggtttcaaactcctgacctcaagtgacccaccttggcctcccaaagttttgggattacaagtgtgggccaccgcggccagcctatgatccattttgaatgaattttttatatggtgcaaggtgtcaatccaccttcactttttcttgggaatatagatatccagctgtttcactaccattttttgaaaggactgccctttgctctatcacctttgcatttttgttaaaaagtagttgtcaatgtatatgtgggtttatttcaggactctgttttgttccattgacctgtttttctctcctgaatgccaataccatatttgtatgtagtgtatgtaattttctaataattcttgaaacagatagtattaatgtgtcatatttttgctgttgtttgtattttttgtagagatggggtttcaccgtgttggccaggctgtgttgaactcctgagctaaagcaatacacttgcctcgtcctccccatgtgctgggattacaggcgtgagccttggtgctggcccagtgtaccacatttctttttgagatttgttttggctatgttaagtcctttgcttttgatgtgaaatttgggaacaggcagggtgtggtggcttatgcctgtaatcctagaactttgggaggcctagatgggtggatcacttgagctcaggagttccagaccagcccgggcctatggcaaaactccgtctctacaaaaaatagaaaaaattagccaggtgtggtggtgcatgcctgtagtcacagttacacggcaggctgaggtgggaggatcacttgaaccccagaggtcaagactgcagtgagctgagatcacaccactgtactccagcctgggtgacaaagtgagactctatctcaaaaagaaattaggatcaatttgtcaatttctacaacaacaacaacaaaaacccctgttgggcaccttgattgagattgcattgaatttatataaaactgttgggagaattgacatcttaataatattgagtcttctggcctataaacaaggtctgtcttcctaggtattaatgttttgtcttctatttctcttaataatcttttgtagttttcagtgtacaggtctaccatgtcagcatttcatagttttgatgctaaatggtattttaaaatttcaaattctaaccacttgttgctagtaaatagaaatacaattgatgttgaacttgtatccttcagccttgctaaactgtgagttctcatggtgtttttgtaaattacatcaacagtcatgtgttctatgaataaagagttttactccttc

SEQ ID NO: 12101 - DNA, 1156 bp, Homo sapiens
  source 1..1156: mol_type = unassigned DNA
agaacgaaaggagtgaggcgccgagagcccagataccattttggcgtgagagctggtggttggcaaggccgcgggagtgggaagcgtccgccatgttctgcgaaaaagccatggaactgatccgcgagctgcatcgcgcgcccgaagggcaactgcctgccttcaacgaggatggactcagacaagttctggaggagatgaaagctttgtatgaacaaaaccagtctgatgtgaatgaagcaaagtcaggtggacgaagtgatttgataccaactatcaaatttcgacactgttctctgttaagaaatcgacgctgcactgtagcatacctgtatgaccgcttgcttcggatcagagcactcagatgggaatatggtagcgtcttgccaaatgcattacgatttcacatggctgctgaagaaatggaatctcgctctgttgcccaggctggagtacagtggtgcattctctgctcactgcaacttccgcctcctggcttcaagcaattctcctgcctcagcctgccaagtagctgtgattacagatggagtggtttaataattataaaagatctcttgctacttatatgaggtcactgggaggagatgaaggtttggacattacacaggatatgaaaccaccaaaaagcctatatattgaagtccggtgtctaaaagactatggagaatttgaagttgatgatggcacttcagtcctattaaaaaaaaatagccagcactttttacctcgatggaaatgtgagcagctgatcagacaaggagtcctggagcacatcctgtcatgaccatgcgccgaggcacttccaggcttcactcaactcatggactcctctgtactcactctctccaccactcccttcacctccctctttgattttagaagctatagacattgtttaagataactaagaatacttggctaagaagtataatttgctaactattaaggactttctttttttaatgttgtacactattcttcctactcttttttggttttggttttgttttgtagagactgtctcactatgttgcccaagctggtctcaaactcctggcctcaagcagtcctcccaccttagcttctcaaagtgttgagatcacaggcgtgagccactgcacccggcccctactcc

SEQ ID NO: 12102 - DNA, 2673 bp, Homo sapiens
  source 1..2673: mol_type = unassigned DNA
gggctctcgccgtggcgggaaaacggcggccgcggcgtctcctccgggacgctgaggggcccgaggagaccgtgaggctctggcctgcagctcgcgccgccatggacgctgccgaggtcgaattcctcgccgagaaggagctggttaccattatccccaacttcagtctggacaagatctacctcatcgggggggacctggggccttttaaccctggtttacccgtggaagtgcccctgtggctggcgattaacctgaaacaaagacagaaatgtcgcctgctccctccagagtggatggatgtagaaaagttggagaagatgagggatcatgaacgaaaggaagaaacttttaccccaatgcccagcccttactacatggaacttacgaagctcctgttaaatcatgcttcagacaacatcccgaaggcagacgaaatccggaccctggtcaaggatatgtgggacactcgtatagccaaactccgagtgtctgctgacagctttgtgagacagcaggaggcacatgccaagctggataacttgaccttgatggagatcaacaccagcgggactttcctcacacaagcgctcaaccacatgtacaaactccgcacgaacctccagcctctggagagtactcagtctcaggacttctagagaaaggcctggtgcaggcggcttgctgggggatgtgagcgctcaggacgtgatgaggtactcgtggttctggagctctagaaacacttctgatgcatgaaaaatgtgtgatggtgcaaggaatggattcaggatgttgttggagaaacaagtttgtgattagtccttaaaacttagctccctgggacattcttcaattccacatctgtttctagaaaccagccctttttccccccacttttgagaaataaaaaagccttaggtaaataagtcattctccctagcagagccacttgggtctcctgcatggaagccatcacacttgggcaggtgttcagtgactggtaggtgtagatacagcaggagtggccatgtggtccacggctttttaccccttcttgatcctgatttcttgggctgaatttagactctctcacagaggtggctcacagagaaggatggcagatggtgcagccaacaatgctgaccggtgcttatcctctaagccctgatccacaataaaaatggacccaactcagctctgactctctaggtttttgtgctgcgtaactaccaagtaaaaggactgagcctgtggctgagatgactcagtcaacgaaactgaggcacacggcagttaagtggaaactgcagaccaacacctggggtgtctccttctcttggctacttctagctcaggtttaatgggttgcttatcaagaggagagtcaggaaaaaaacgaatccaatgtattgagcatgagtgacaatgtattgagcatgagtgacaatgctagaagaaaagtcactttcagtgctgctcttgatggatttggggaaggattctttgttgtaggtaacagtgggctcaggggaaattatttttttcctaagagaaaattactttattcgtagcattttggaaatgttaggacctttacagaaattacattaccttgagaggtgaaatgatcgtccagcatcatgcaatggatagaaggttctgtaatcagctttaaaaaaaactttaatttttggccgggcacattggcttggctcatgcatgtaatcccagcactttgggaggccaaggcaggtggatcacaaggccaggagattgagactatcctggctaacatggtgaaaccccgtctctattaaaaatacaaaaaaaaaaaaatttgccaggtgtggtggcacacgcctatagtcgcagctactcgggaggctgaggcaggagaatcgcttgaacccgagaggcggaggttgtagtgagccaagattgcaccactgtactcctgcctgggcaacgagagcaagactctgtctcaaacaaaaaaaattttaactttttttttagacagggtctcgttctgtcatccaggctgcagtagagtggcgtgattatagctcactgcagcctcgaactcctgggttcacacagttctcccaccacagcctcccaaagcactgggattgcaagcatgagccgccatgcctggccagcctatttttggctggacaccagtgggccaaaagcagtggggtgctgtctggggagctctgagaatgcgcatgtgtgacaggctgagcctaaagacttatcacccagcatctgccctccagtgtctagcatgctgcacactatcactccatgttgctgcccacgtgtccccgccaggcaggttttggtggttatttggacactgaagggtcagacctggaagactgggaccaaaagatgaggtctccataatttaaggtgctgttcagacttggttcagctcataggacttgttctttcatctcagccttccttggaatcctcctgctttcatctggggatcttttagaatgaaaccacttgttattgtggagggcaaggggtcctaatgccctcctcttagagcctgagccagtggaggcagctccgtctgcggagatgtatagttattgagcttttctttgtttggctttgttttatatcataaaaaagattttcctcttaacataa

SEQ ID NO: 12103 - DNA, 2247 bp, Homo sapiens
  source 1..2247: mol_type = unassigned DNA
cggtaccgcccgaattgactgctcctgtctgatgcgtccccgggcgcgggaaacgagtttcaatccactttcctgaccccaaccatcctgcccagtctccgcttccccgtcttgtacacccctaactcctgaggctcctccgaatcacgcgagtggaagcggagaagctcaagtggccgccatgtcagaggcttatttccgagtggagtcgggtgcgctggggcctgaggagaactttctttctttggacgacatcctgatgtcccacgagaagctgccggtgcgcacggagaccgccatgcctcgccttggcgctttcttcctggagcggagcgcaggcgccgagactgacaacgcggtcccacagggttccaagcttgaactacccttgtggctggcaaaaggactttttgacaacaagcgacggatcctttctgtggaactccccaagatctaccaagagggttggaggactgtgttcagtgcagatcccaatgtggtggacctccacaaaatggggccccatttctacgggtttggctcccagctcctgcattttgacagtcccgagaatgcagacatttcccagtctctgctgcagacttttatcggacgttttcgccgcatcatggactcctcacagaatgcttacaacgaagacacttcagccctggtagccaggctagacgagatggagaggggcttatttcaaacagggcagaaaggactgaatgactttcagtgttgggagaaggggcaggcttctcagatcacagcttccaacctcgttcagaattacaagaagagaaaattcactgatatggaagactgaaagccggaagaacacagaatggctcctcacagacgtatccctccgtgtgtccttgataggagctggttgaccttgtacagaaccagaatcctgtcccatttcatggcttatttcctgtggccatagagaattatagggaactggacatgctggaggatgtgggtgtccctggctctgtgagtcttccaggaccgtcccaccctgctgacccacagcccaggccctttaacccaagaacccatggccaaggagaaatcaaagtccttcctaaataagaatcactgccatataatatatcacagtagagttgcaactgagattccttgtgtctgggagtttggacagcttcagatgtacagtttcactagccacaaagcacaggtacaaactgggtcatcgcctgttcacaaaatgctctcttgatcttatttgcctcatcttcctcatggttgtacagaggatagcaccccaccatgccagcctgacttggagatatctcctgctgcctgcctgcagggagttaccccagtttccaaaaacagtcgcccagataaaggaggaaaagggaaaggcagacgaatggcatggcttttactaaagaaaagatgttggcctcatactctatactcagggcttaatgaactggaatctgcataactcagcagtcaacccagaagggaaatggttaaactgagcttgttattgcctcggagagcctaagagcacccgcacacttaattctactccctgtctagaaaagctgtcagggagtcgtttggaattgcaatgtagttattaagggctgttaaccagcctgcattacatctggaagtcaggacttgggtgctgactatgaagggccctgttttcaaaatctaacattgcaagtgtaaatgggcaagaagcctccgttgtgctttttttttcctcttcagtaacttttgcaacattattgcatagaagatccctgaccatttactaggaacctggttaagcaagcactaatctcttttcctggagatcaaggatgcaacctcaggttgagaaagaaacagggttccctgggcccattagactgtttgcagggcatcactgcttccccctgacacctcacaactagcaaaaattgtctttgtctttggaaattatagagggatttgggtatccagattgtgcagatgcaaacttaggctgtcttgatgcaaacttagaaccacagaaatgcttttaaaatgcctgttttaagatggaattgttgtttttataatttgattttagtgctaaataaatgattggctttgtacatgaatatgttctgtacaagtgctctttcactagtactacagataatcaaagctatcagaattgtgtctttgatcatatttgacggtaatacacaaatccatgttttagca

SEQ ID NO: 12104 - DNA, 2039 bp, Homo sapiens
  source 1..2039: mol_type = unassigned DNA
agacttgatcgattgcttctgcctgggcggtaccgcccgaattgactgctcctgtctgatgcgtccccgggcgcgggaaacgagtttcaatccactttcctgaccccaaccatcctgcccagtctccgcttccccgtcttgtacacccctaactcctgaggctcctccgaatcacgcgagtggaagcggagaagctcaagtggccgccatgtcagaggcttatttccgagtggagtcgggtgcgctggggcctgaggagaactttctttctttggacgacatcctgatgtcccacgagaagctgccggtgcgcacggagaccgccatgcctcgccttggcgctttcttcctggagcggagcgcaggcgccgagactgacaacgcggtcccacagacttttatcggacgttttcgccgcatcatggactcctcacagaatgcttacaacgaagacacttcagccctggtagccaggctagacgagatggagaggggcttatttcaaacagggcagaaaggactgaatgactttcagtgttgggagaaggggcaggcttctcagatcacagcttccaacctcgttcagaattacaagaagagaaaattcactgatatggaagactgaaagccggaagaacacagaatggctcctcacagacgtatccctccgtgtgtccttgataggagctggttgaccttgtacagaaccagaatcctgtcccatttcatggcttatttcctgtggccatagagaattatagggaactggacatgctggaggatgtgggtgtccctggctctgtgagtcttccaggaccgtcccaccctgctgacccacagcccaggccctttaacccaagaacccatggccaaggagaaatcaaagtccttcctaaataagaatcactgccatataatatatcacagtagagttgcaactgagattccttgtgtctgggagtttggacagcttcagatgtacagtttcactagccacaaagcacaggtacaaactgggtcatcgcctgttcacaaaatgctctcttgatcttatttgcctcatcttcctcatggttgtacagaggatagcaccccaccatgccagcctgacttggagatatctcctgctgcctgcctgcagggagttaccccagtttccaaaaacagtcgcccagataaaggaggaaaagggaaaggcagacgaatggcatggcttttactaaagaaaagatgttggcctcatactctatactcagggcttaatgaactggaatctgcataactcagcagtcaacccagaagggaaatggttaaactgagcttgttattgcctcggagagcctaagagcacccgcacacttaattctactccctgtctagaaaagctgtcagggagtcgtttggaattgcaatgtagttattaagggctgttaaccagcctgcattacatctggaagtcaggacttgggtgctgactatgaagggccctgttttcaaaatctaacattgcaagtgtaaatgggcaagaagcctccgttgtgctttttttttcctcttcagtaacttttgcaacattattgcatagaagatccctgaccatttactaggaacctggttaagcaagcactaatctcttttcctggagatcaaggatgcaacctcaggttgagaaagaaacagggttccctgggcccattagactgtttgcagggcatcactgcttccccctgacacctcacaactagcaaaaattgtctttgtctttggaaattatagagggatttgggtatccagattgtgcagatgcaaacttaggctgtcttgatgcaaacttagaaccacagaaatgcttttaaaatgcctgttttaagatggaattgttgtttttataatttgattttagtgctaaataaatgattggctttgtacatgaatatgttctgtacaagtgctctttcactagtactacagataatcaaagctatcagaattgtgtctttgatcatatttgacggtaatacacaaatccatgttttagc

SEQ ID NO: 12105 - DNA, 2390 bp, Homo sapiens
  source 1..2390: mol_type = unassigned DNA
agacttgatcgattgcttctgcctgggcggtaccgcccgaattgactgctcctgtctgatgcgtccccgggcgcgggaaacgagtttcaatccactttcctgaccccaaccatcctgcccagtctccgcttccccgtcttgtacacccctaactcctgaggctcctccgaatcacgcgagtggaagcggagaagctcaagtggccgccatgtcagaggcttatttccgagtggagtcgggtgcgctggggcctgaggagaactttctttctttggacgacatcctgatgtcccacgagaagctgccggtgcgcacggagaccgccatgcctcgccttggcgctttcttcctggagcggagcgcaggcgccgagactgacaacgcggtcccacagggttttgctctgttgcccaggctggagtgcagtggtgtgatatggctcactgcagccttgacctcccaggctccagagatcctcccacctcagccacctatgtggctggtattgcagggttccaagcttgaactacccttgtggctggcaaaaggactttttgacaacaagcgacggatcctttctgtggaactccccaagatctaccaagagggttggaggactgtgttcagtgcagatcccaatgtggtggacctccacaaaatggggccccatttctacgggtttggctcccagctcctgcattttgacagtcccgagaatgcagacatttcccagtctctgctgcagacttttatcggacgttttcgccgcatcatggactcctcacagaatgcttacaacgaagacacttcagccctggtagccaggctagacgagatggagaggggcttatttcaaacagggcagaaaggactgaatgactttcagtgttgggagaaggggcaggcttctcagatcacagcttccaacctcgttcagaattacaagaagagaaaattcactgatatggaagactgaaagccggaagaacacagaatggctcctcacagacgtatccctccgtgtgtccttgataggagctggttgaccttgtacagaaccagaatcctgtcccatttcatggcttatttcctgtggccatagagaattatagggaactggacatgctggaggatgtgggtgtccctggctctgtgagtcttccaggaccgtcccaccctgctgacccacagcccaggccctttaacccaagaacccatggccaaggagaaatcaaagtccttcctaaataagaatcactgccatataatatatcacagtagagttgcaactgagattccttgtgtctgggagtttggacagcttcagatgtacagtttcactagccacaaagcacaggtacaaactgggtcatcgcctgttcacaaaatgctctcttgatcttatttgcctcatcttcctcatggttgtacagaggatagcaccccaccatgccagcctgacttggagatatctcctgctgcctgcctgcagggagttaccccagtttccaaaaacagtcgcccagataaaggaggaaaagggaaaggcagacgaatggcatggcttttactaaagaaaagatgttggcctcatactctatactcagggcttaatgaactggaatctgcataactcagcagtcaacccagaagggaaatggttaaactgagcttgttattgcctcggagagcctaagagcacccgcacacttaattctactccctgtctagaaaagctgtcagggagtcgtttggaattgcaatgtagttattaagggctgttaaccagcctgcattacatctggaagtcaggacttgggtgctgactatgaagggccctgttttcaaaatctaacattgcaagtgtaaatgggcaagaagcctccgttgtgctttttttttcctcttcagtaacttttgcaacattattgcatagaagatccctgaccatttactaggaacctggttaagcaagcactaatctcttttcctggagatcaaggatgcaacctcaggttgagaaagaaacagggttccctgggcccattagactgtttgcagggcatcactgcttccccctgacacctcacaactagcaaaaattgtctttgtctttggaaattatagagggatttgggtatccagattgtgcagatgcaaacttaggctgtcttgatgcaaacttagaaccacagaaatgcttttaaaatgcctgttttaagatggaattgttgtttttataatttgattttagtgctaaataaatgattggctttgtacatgaatatgttctgtacaagtgctctttcactagtactacagataatcaaagctatcagaattgtgtctttgatcatatttgacggtaatacacaaatccatgttttagc

SEQ ID NO: 12106 - DNA, 3841 bp, Homo sapiens
  source 1..3841: mol_type = unassigned DNA
gtgcctgggcggaaactttgcgagagtagcgcgggagctgagaagttgcagggttgagttggtcccggcaagtccttgagcagtttgttcctctgtcttcccgcttcctggtgccccgactgcgtccccacgaacgccccgtccttaccgccggctgctgtggagtgcctcgctgtctcccaggtccccgagttcctggtttcagagaagatgaccgaagaagtggatttcctgggacaggactctgatgggggtagtgaggaagtggtcctaactcctgcagagctcattgaaagattggagcaggcctggatgaatgaaaagtttgcccctgagctgctggagagcaagcctgagattgtagaatgtgtcatggaacagctggagcacatggaagaaaatctcaggagagccaaaagggaggacctgaaggtcagcatccaccaaatggagatggagaggatccgctacgtcctcagcagctacttgcggtgtcgcctcatgaagatagagaagtttttccctcatgtccttgagaaggaaaaaacacgtcctgagggggagccttccagcctctcgccggaagagttggcctttgccagagagttcatggcgaacacagagtcctatctgaaaaatgtcgccttgaagcacatgccccctaacttacagaaggtggacctctttcgggcagttcccaaaccagatctagattcttacgtgtttctgagagtgagagaacgacaagaaaacatactggtagaaccagacacagatgagcagagggactacgtgattgacctggagaagggctcacagcacttgatccgatacaaaaccattgcacctctggttgcatctggagctgtccagctaatttaaaactaggcataaacagccaggcatggtgactcaagcctgtaatcccagcactttgggaggccgaggcgggcggatcatgaggtcaggagttcgagaccaaccgaccaacatggtgaaaccccatctttactaaaaatacaaaataattagccgggtgttggtggtgtgcacctgtaatcccagctactcaggaggccggggcaggagaatcgcttgaacctgggagcaggaggttgcagtgagccgaggtcgtgccattgcactccagcctgggtgacagtgagactttgtctcaaaaaaaaaaacaaaaaacaaaaaaaaaacaaactaggcataaactcatgaggtcaggagatcaagaccatcctggctactaaaccccatctctactaaacccatctctactaaaaatacaaaaaattagccaggcatggtggcgggcccatctactcaggaggctgaggcaggagaatggtgtgaacccgggaggtggagcttgcagtgagccaagatcgtgccattgcactctagcctgggcgacagagcgagactccatttccaaaaaaaacacactaggcgtaaacaagaatgaagacctggaaccgtagagaaaatactagaaacccctcgtatcacgttgtgcctgaggacaataataaagtagtttactaggcatcagacattcctcagcagtgctgtgggtcacgggcgtgaagcggagctcgaggcaggattgcttgtgttgctgcatgtcctgtctgctgttttagcccgtgtcagtagatggggccattgtactgtttgttctgcacacttggcggagcagcagaggctctcagcacgccttttccctttgtagtattttctgagctaaggaaagtcaggcagaagtagttcataagaaggcatcactgcctgtgatcggggctgcatttagccctgacctgataatggtaggagagttcatttagcctttctgctgcgaagattgtaaatagattaaagaaaacagctgtggccttctcccgtcatacatcattagactgtgtaaactaacattttagaacctctaatattggacttaaaaccaatttctgtcgtgcttaattgaaaatcacaactaaaccaataaaccattattaaatttccattctgcagcagaaggcacctctggacggctcccggcttgtagtttaatgaagtatgtgctccctgctgttaacccgcagccctccccaactctccagcagctttgccaagtcagcctccgggccatctggctgtccttggccaaggcactgttaacggagtgacgttaaccatcttgtattgtgacctgtggccgcttttctggtttaagtccttcactttttcaagaggaatggatgaaattaatgtgcatgcagagtctcacagtgatgccggaaggaaggatgtataggcagtgaatgaatgatctttccttgaaatgctataaaaagcaacctgcattccagtcttttcttcctggttgaagttggcagatttccatttgcagggtatgggctgcgagagtaatcagggtaacattgctgtcatttccaagagaaatcagtaggggaaagcaagggaggtcttttttttttttcttttttgagacggagtttccctcttgttacccaggctggagtggcagtggtgtgaacacggctcactgcagcctccacctcctgggttcaagagattctcctgccccagcctcccgagtagctggtattataggtgcacaccaccacacccaactaattttttgtatttttagtagagatggggtttcatgatgttggccaagctggtctcgagctcctgaccccaggtgatccacccacctcggcctcccaaagtgctggaattataggcgtgagccactgcgcacggcctggggaggttttatttcttgacaaaggtatttgatactcgtgcagtccctggagggtctcactggagagacaacatttaggctgagatctgattaacaggaggcagctgcagtgcagaggtcaaaagggagggtgttccaggcagagaaaacagcctgtgcaaaggccctgaggcagaaacaaactctacttgaggtcagcctggttagaaagcccaactcaaaatagaaagtattacatgataaggtctgaggcaggctggacccagatcttacaggaccttgttaataaggatcccatttggtcccccacagtcctgagaagcgggcagggctgtgggaaacagcagatatttagtggtaagcctgagatcagaacccaagtctgcacttcctagtcacgttctccctgtagtgctaagcccagagacctgagctgttaacctagaacagtgtgcttcctaagccttaatgtgcatacccatcgcctggagctcgccttaagatgtaggttctgcctgaagcccaagttcatttagtatgtcatggttaattcagagtaaaatcaagagttagtacttgatttatgcttgttatataaagaaagagacaacttcactgtatgatcattttgtcacttttcaaaagcatttaattcccattcaattgaaaatgtttcaagaacaaacctgtttggtcattttattgatattgcacatttgtatatgaataaatttttgcaaattaaaaaaaaaaaagatgtaggttctgaaacagggtgaggtccaggatcctgcctttctaaggagctcccatgttgtgcagttgctgctggcccggggaccacattgaatgacggctctacgtcctcatgcctccagctgctgccctgtacatgtccaactgcacggagcactttacatcctctaaaaccacagtaaattgctccatttcctaaattacctcttcaagagaagactggttttgatgtcatttttaaataaaggagaagttgaatttcaaaaccaagtggaacaggaa

SEQ ID NO: 12107 - DNA, 1158 bp, Homo sapiens
  source 1..1158: mol_type = unassigned DNA
cgggagctgagaagttgcagggttgagttggtcccggcaagtccttgagcagtttgttcctctgtcttcccgcttcctggtgccccgactgcgtccccacgaacgccccgtccttaccgccggctgctgtggagtgcctcgctgtctcccaggttcctggtttcagagaagatgaccgaagaagtggatttcctgggacaggactctgatgggggtagtgaggaagtggtcctaactcctgcagagctcattgaaagattggagcaggcctggatgaatgaaaagtttgcccctgagctgctggagagcaagcctgagattgtagaatgtgtcatggaacagctggagcacatggaagaaaatctcaggagagccaaaagggaggacctgaaggtcagcatccaccaaatggagatggagaggatccgctacgtcctcagcagctacttgcggtgtcgcctcatgaagatagagaagtttttccctcatgtccttgagaaggaaaaaacacgtcctgagggggagccttccagcctctcgccggaagagttggcctttgccagagagttcatggcgaacacagagtcctatctgaaaaatgtcgccttgaagcacatgccccctaacttacagaaggtggacctctttcgggcagttcccaaaccagatctagattcttacgtgtttctgagagtgagagaacgacaagaaaacatactggtagaaccagacacagatgagcagagggactacgtgattgacctggagaagggctcacagcacttgatccgatacaaaaccattgcacctctggttgcatctggagctgtccagctaatttaaaactaggcataaacagccaggcatggtgactcaagcctgtaatcccagcactttgggaggccgaggcgggcggatcatgaggtcaggagttcgagaccaaccgaccaacatggtgaaaccccatctttactaaaaatacaaaataattagccgggtgttggtggtgtgcacctgtaatcccagctactcaggaggccggggcaggagaatcgcttgaacctgggagcaggaggttgcagtgagccgaggtcgtgccattgcactccagcctgggtgacagtgagactttgtctcaaaaaaaaaaacaaaaaacaa

SEQ ID NO: 12108 - DNA, 2022 bp, Homo sapiens
  source 1..2022: mol_type = unassigned DNA
ctttgcgagagtagcgcgggagctgagaagttgcagggttgagttggtcccggcaagtccttgagcagtttgttcctctgtcttcccgcttcctggtgccccgactgcgtccccacgaacgccccgtccttaccgccggctgctgtggagtgcctcgctgtctcccaggtccccgagtgagcgtcgaatgggacctctgtggctagggcaggcctgtgtgggtggcactgagagggaggaggggagggggatgttcgcagtttccttgcgaccccagggactttctttgtccccgccatccacctccttaggcctttgggatcgccgactggtctaatgtcgccggcccttgtggctctgggaaattagcattgattaatcttcctaacaatttttgtttttatagagacaggatctccctatgttgcccaggctggtctcgaactcctgggctcaaggtatcttcctgcctcggcttcccaaagtgctgggattacaggcgtgagcccggccagctcctaataatgttaagtgcttgctaggagtcaagcgctgtgctgagcgcaggggcttcccacgtcattgcgtccccagtgcttagtgccaggcactgagcagaggcgcgattcgtatttgaactaaaacgaaccccgtccctgaggaacaagacctctactgggaagtcaaagaaatgaatagtgattgtatggtgtgatgggtgctcagctcttggtggacagaagtaagggggaggcttgtttgagaaacggatacctgacctaagccttggaggaagaggcagacactggaaaactagagtccctgcgttctctcaccacttgctaaagggcctctacaaccccaggaaacctcaataaacctttcctttctccagatagatgtctgttcttgcagataattagaaaacgcattgcagagtattggttctttccctctcattaggttcctggtttcagagaagatgaccgaagaagtggatttcctgggacaggactctgatgggggtagtgaggaagtggtcctaactcctgcagagctcattgaaagattggagcaggcctggatgaatgaaaagtttgcccctgagctgctggagagcaagcctgagattgtagaatgtgtcatggaacagctggagcacatggaagaaaatctcaggagagccaaaagggaggacctgaaggtcagcatccaccaaatggagatggagaggatccgctacgtcctcagcagctacttgcggtgtcgcctcatgaaggtttgacgtggagatacctggagggattgagacagcacagtctgtaatgcagactgaatgtcctggggaaaacttgggctggggcccaggagggtccaggacctgaagatgctgctaagagcccaatatccatgtagctaaactgtaaggagagcgagagattgctccacagaagcacagaggaacgtgtgtggcccactgcggggacaccgcacacatttttagtctgttcacctgccgagtgagtggttcccccttgcgttacagcatggcagtgctaaagggagagttgttggcattggtcaatagtgaatgctgactagaggagaacttgtttccaaaattattttgtctgtcagatggccaacgtcagtgtcaaatgaaccaggatgacttacattcacctacagctttgtggctatctaacttacaaaaatgaagttgcaggccaggcgtggtggctcacacctgtaatcccagcactttgggaggctaggcgggtggatcacctgaggtcaggagtttgagaccagcctgaccaacaaggtgaaaccccatttctactaaaaataaaaaaattagccaggcgtggcggcaggcgcctgtagtcccagctactcaggaggctgagacaggagaattgcttgaacccaggaggtggaggtttcagtgagccaagattgtaccactgcactccagcctgggcaacagagcgagactccgcctcaaaaaaaaaaaaaaaa

SEQ ID NO: 12109 - DNA, 4335 bp, Homo sapiens
  source 1..4335: mol_type = unassigned DNA
gcggcggcggcgagggcccgggtgggtggccgaacttctcccgccatggagggagcagcggcccgggaggcccgggggaccgagaccccgcgcgcgtctgcgcccccgcccgcgccctcggagcccccggccgcgccccgcgcccgcccgcgcctcgtcttccgcacgcagctggcgcacgggagccccacgggcaagatcgagggcttcaccaacgtccgcgagctgtacgccaagatcgccgaagccttcgggatcgcgcccaccgagattttattctgcaccctcaacagccacaaagtggacatgcagaagctcctggggggtcagataggcctggaggacttcatctttgcccacgtgcgaggcgagaccaaggaggtggaggtcactaagacagaggatgctctggggctgaccatcacggacaacggggctggctacgccttcatcaagagaatcaaggaaggcagtatcatcaaccggatcgaggcagtgtgcgtgggtgacagcatcgaagccatcaacgaccactccattgtgggctgccgccactacgaggtggccaagatgctccgggagctgcccaagtcccagcccttcaccctgcgcctggtgcagcccaagagggccttcgatatgattggccagagaagtcggtccagcaaatgtccagtagaggcgaaagtgaccagcgggagggagaccctgcggcttcgttctgggggggctgccacagtggaggaagcgcccagtgagtttgaggaggaggcatctcggaaggttgatgacctgctggaaagctacatgggcattcgggaccccgagctggcgtccaccatggtggagacgtccaagaagacagcgagcgcccaggagtttgcacgctgtttagactccgtcttgggcgagttcgccttccccgacgagtttgtggtggaagtgtgggccgccatcggcgaggccagagaggcctgtggctagtttgccctgggggggcccagcacagccccagcccggagcccagccccctgccccggccctgctccagaacccagcccagatcggaggacaagttcctctctagaacccaatccaatttggagccccagcccaactccagaacccaacccttctctagaatccagcccagatctgaggccaagctatgtgctagagcccaggccagctctgagaccaagcccagcattgagaataagctctgttctaaaactcaggccagccctgagaccaagcccagctctagaactcagatgagctttgagaccatgcccagcactgagaccaagccctgttctagaactcaggcctgctctgaggccaagcccagctctagaacccagatgagctctgagaccatgcccagctctagaactcagatgggctctgagaccatgcccagctctagaactcagatgggctctgagaccgagcccagctctagaactcagatgggctctgagaccgagcccagctctaaaactcagatgggctctgagaccatgcccagctctagaactcagatgggctctgagaccgagcccagctctagaactcagatgggctctgagaccgagcccagctctagaactcagatgggctctgagaccatgcccagctctagaactcagatgggctccgagaccaagcccagctctagaacccagatgagctctgagaccatgcccagctctagaactcagatgagctctgagacagagcccagtattgagaccaagccctgttctagagtccaggccagctccgagaccaagcccagctctagaacccagataagctctgaaaccaagcccagcatagagaccaagccgtgttctagaattcaggccacatctgaagccaagcccagctctagaactcaggtcagccctgagaccaagcccagctctagaacccagataagctctgaaaccaatcccagcattgagaccaagccctgttctagaactcaggccacctctgaggccaaacccagctctagaacccagataagatctgagaccaagccctgctctgaagcccaggccagctctgagacgaagcacatctctagaatccagctgagccctgacaacaagccaaactctggaacccagacacattttaagacccagaccagcttggagaccaatcccagttccagaatccaggctagctcggagaccaagccctgctggaaaactcaagctgactctggaactctggacagctccacgatgcagccacacctggacactcggtctagctccggaaccccagttaattttggaacccatgtgagattcatgaagcagcccagctctggaaccccagtcagctcaggattcagagacagctcccaaatcaaatcctattcaagaactcagaccagctcagaaacccaggtccacacggctgcccagtccagatcccaaccccagttgcatccaagtgcccatccccatcctgcagcccagtccagctccagtgatgattccagctctgagactgagcccagctctagaacctcgcctagtgctacaaccaggcccaactccaggattcagaccagctctggaaccccatccatcttggaagcaagacccagctccagcacacagcttggtgccaagccccactctccttgcacaatgcagctcagctctagaatgcagtttacttccaggacccagaccaatttcaaggcctggccaagctccagagctcaatccagcccaagcaccgcacccagctctggaactcagctcagttctggagcacaggctggttctgaaatcccagccagctccaaaacacagacagcagctgagacccagccaagttccagaatccagctaagctctggagtccaatctagtcctgggacccaggccatcgcagcaatagaattaagctccacagccctgtctagttccgacagcaggtccagctccaggacccagcgctgcccaggagctcgaccagcctctgggactcaattcgcctctaaaaccctgccaggttctagataccagctccagaccacagccccagacagctctggtattcaactggactttgggaagcagagcagttctgaaagtcagcttagctttggaactcagcccagctctgggacccagataagctcaagaattcaagccagctctggaagtcagcttagttcgggaacccagctgatttccggagcccaacccagctccagaactcagactagttctggaaaccagctcagctccgggacccagaccactgcaagaattcagctcagccctggagctcatcttagctccagaacccagtccagtcctgagaccaggctcagctctgaggctcagtccagctctggaacccagttcagttctgggattcagtttggctctgaaacccagaccggctcaagaattcagcccgactctggagcccaacttagttccagaacccagtccagctctgagaccgggctcagctctgaaacccagaccggctcaagaattcagcccagccctggagcccaccttagttctggaacccagcctgtttctggaacccaatccagttccagaactcacaccagttcaagaatctggctgagccctggaaatggaatctgcccacagacccctggccttgaccctagaatccagcttgaggcccctgccccagcccaacctcagcccccaggcccatcccccagagaccccaccccagcccctagcaaagacccccagcctctgcctcagccccatgatcaggtatgtggcatccaggccagccttggccccatcccaggcttaccccaagcctcctacctggccccacagtcacaggtctcctcaaccccccagaagccagccgtctctcccaagccccgggtgggaccccagaagtccaccccacccaccatatctgtcactcctagtcctgcccctagggcagccctcctgagttcccagctgtctgagtccccagctttggcgccagccctttgccccactctgggggagccaggagcccgcccttaccgcggggggccgtagcttggctgtgacttagccctggttcatgtggttctcgtcctctcctgtcccttccagcctggggcccccagaagcagcaagtgaccttatttctccagcaggcggtggtagggagtgtgcggtggtgaaaacaggggcttcaccggtcctggctcagatccaggtccttggagggaaaaggagggcaggagacgggttgcaccgcatgtaccctgagggctcatggtgaataaaggcaccttccatctctgca

SEQ ID NO: 12110 - DNA, 3321 bp, Homo sapiens
  source 1..3321: mol_type = unassigned DNA
gcgcgcgcgtcccggaagcagaagcctgtgtggccttcccggcggctgattcgagggcttgtttggtcagaaggggggcgtcagagaagctgccccttagccaaccatgccgtctgagggtcgctgctgggagaccttgaaggccctacgcagttccgacaaaggtcgcctttgctactaccgcgactggctgctgcggcgcgaggatgttttagaagaatgtatgtctcttcccaagctatcttcttattctggatgggtggtagagcacgtcctaccccatatgcaggagaaccaacctctgtctgagacttcgccatcctctacgtcagcttcagccctagatcaaccctcatttgttcccaaatctcctgacgcaagctctgccttttccccagcctcccctgcaacaccaaatggaaccaagggcaaagatgagtcccagcacacagaatctatggtacttcagtcctcacgggggatcaaagtggaaggctgcgtccgaatgtacgaactggtacacagaatgaaaggaacagagggcctgaggctatggcaggaggagcaggagaggaaggtgcaagccctctcggagatggcatctgaacaactgaagcggtttgatgaatggaaggaactgaagcagcataaagaattccaggacttgcgggaagtaatggagaagagctccagagaagccttgggacaccaagagaagctaaaagctgagcaccgtcacagagcaaagattctcaacctgaagctgcgggaagcagagcagcagcgcgtgaagcaagcagaacaggagcggcttcggaaggaagaaggccagatccgcctgcgggccctctatgctctgcaggaggagatgctgcagctcagccagcagctggatgcctctgagcagcacaaagccctgcttaaggtcgacctggctgccttccagacccgaggcaaccagctgtgcagcctcatctcagggatcatccgggcctcttcagagagcagctatcccacagcagagagtcaagctgaggctgagcgagctctgcgggaaatgcgggacctcctgatgaacttggggcaggagatcaccagagcctgcgaagacaagaggaggcaggatgaagaagaggcccaggtaaagctgcaagaggcacagatgcagcagggaccagaggcccacaaagagcccccagctcccagccagggcccaggagggaaacagaatgaagacctccaggtgaaggtacaagacattacaatgcagtggtaccagcagctgcaggatgcttccatgcagtgtgtgttgacctttgagggcctgaccaacagcaaggacagtcaggccaaaaagataaagatggacctccagaaggctgctaccatcccagtgagccaaatctctaccattgcaggctcaaaactgaaggagatctttgacaagatccacagcctgctctctggaaaacctgttcaatctggtgggcgctctgtgtctgtcacacttaacccacaggggctggactttgttcaatacaaactggcagagaaatttgtgaaacaaggcgaggaggaagtggcctctcaccatgaagcagcattccccattgcagttgtggcatccgggatctgggagctccaccccagagtgggggacctcattcttgctcatctacataagaagtgtccttactctgttcctttctatcccactttcaaggagggaatggctttggaagactatcagaggatgcttggttaccaagtaaaggattccaaagtggagcagcaagacaactttctaaaacgcatgtcagggatgatccgtctctacgctgctatcatccagctccggtggccatatggaaaccgacaggagattcaccctcatggcttaaatcatggatggcgctggttggcacagatcttaaacatggagcccttgtcagatgtgacagccaccctcctctttgacttcctggaggtgtgtgggaatgccctcatgaagcaataccaggttcagttctggaagatgctaattctcatcaaagaggactactttcccagaattgaagctatcacaagctcaggacagatgggctccttcatacgcctcaagcagttcttggagaaatgtttgcaacacaaggacattcctgtccccaagggctttctgacttcctccttctggcgctcctgatgtcactccatcacccaccatcaccgctgctgcaaagaggcaataataaaggaactgaagacagctgtatttgggagaagtcatgtcagattcagaaatttgccattatgtatttttatgtatttatgccttgtgactaggagaggagattttcatgggtcacaaaattcttggaggtcccttagtagatttggtagttccttaagagatccacgtgataaaataaatggagttggcctttcttgttttttgcaaaagtgataaaaggtctttagcacttggtctcctcccttgtctctagtgtctttcagaaagttggcaataccttaacaaatgcactctgagctggagggagcccaccatttgcacccacctacccaccctcacccctgttcagatgaatttccagaaagagctaaggctcataaggttcccttttaagtattatttaatagttgaggccagatacttacatgcaagtctgggttatggttgttttgcctttctcagcttgtgaagtcattctaaagctagaggaagtatgtgatatacacatggactaaggctcaggtgacactatggctagattaacatctgggattaggactggaaacacatgtcattttgaactaagggaaactctttgtcatcctaatttggaatttggtccctggatggctagggatccatgaaccaggcaggtaccttttttgtttttgttttgttttgtttcttttctgtttgaattaagatgggctaagatggggcttgcaacattaaacatgagctgagcatccataagcattgaattgggattaaataaagatgttgggcaggaactgaacactgctaatatgatgataaatatgcctgactaaagccactacagaaatccagagattggctgttaaaatttgttttgtggaaagactaattctctttgatactgcagaggcagtggccatggatctgttcctctgtgctaaatgtcttgtggcagggtgtgtttgtgggggagtgttcactggtactcttgagtggcctgaagtgacccattctatgaattgttaattaaggtgccaaaaaaaattaataataaagcttggttttttgaaaaa

SEQ ID NO: 12111 - DNA, 2218 bp, Homo sapiens
  source 1..2218: mol_type = unassigned DNA
ggccttcccggcggctgattcgagggcttgtttggtcagaaggggggcgtcagagaagctgccccttagccaaccatgccgtctgagggtcgctgctgggagaccttgaaggccctacgcagttccgacaaaggtcgcctttgctactaccgcgactggctgctgcggcgcgaggatgttttagaagaatgtatgtctcttcccaagctatcttcttattctggatgggtggtagagcacgtcctaccccatatgcaggagaaccaacctctgtctgagacttcgccatcctctacgtcagcttcagccctagatcaaccctcatttgttcccaaatctcctgacgcaagctctgccttttccccagcctcccctgcaacaccaaatggaaccaagggcaaagatgagtcccagcacacagaatctatggtacttcagtcctcacgggggatcaaagtggaaggctgcgtccgaatgtacgaactggtacacagaatgaaaggaacagagggcctgaggctatggcaggaggagcaggagaggaaggtgcaagccctctcggagatggcatctgaacaactgaagcggtttgatgaatggaaggaactgaagcagcataaagaattccaggacttgcgggaagtaatggagaagagctccagagaagccttgggacaccaagagaagctaaaagctgagcaccgtcacagagcaaagattctcaacctgaagctgcgggaagcagagcagcagcgcgtgaagcaagcagaacaggagcggcttcggaaggaagaaggccagatccgcctgcgggccctctatgctctgcaggaggagatgctgcagctcagccagcagctggatgcctctgagcagcacaaagccctgcttaaggtcgacctggctgccttccagacccgaggcaaccagctgtgcagcctcatctcagggatcatccgggcctcttcagagagcagctatcccacagcagagagtcaagctgaggctgagcgagctctgcgggaaatgcgggacctcctgatgaacttggggcaggagatcaccagagcctgcgaagacaagaggaggcaggatgaagaagaggcccaggtaaagctgcaagaggcacagatgcagcagggaccagaggcccacaaagagcccccagctcccagccagggcccaggagggaaacagaatgaagacctccaggtgaaggtacaagacattacaatgcagtggtaccagcagctgcaggatgcttccatgcagtgtgtgttgacctttgagggcctgaccaacagcaaggacagtcaggccaaaaagataaagatggacctccagaaggctgctaccatcccagtgagccaaatctctaccattgcaggctcaaaactgaaggagatctttgacaagatccacagcctgctctctggaaaacctgttcaatctggtgggcgctctgtgtctgtcacacttaacccacaggggctggactttgttcaatacaaactggcagagaaatttgtgaaacaaggcgaggaggaagtggcctctcaccatgaagcagcattccccattgcagttgtggcatccgggatctgggagctccaccccagagtgggggacctcattcttgctcatctacataagaagtgtccttactctgttcctttctatcccactttcaaggagggaatggctttggaagactatcagaggatgcttggttaccaagtaaaggattccaaagtggagcagcaagacaactttctaaaacgcatgtcagggatgatccgtctctacgctgctatcatccagctccggtggccatatggaaaccgacaggagattcaccctcatggcttaaatcatggatggcgctggttggcacagatcttaaacatggagcccttgtcagatgtgacagccaccctcctctttgacttcctggaggtgtgtgggaatgccctcatgaagcaataccaggttcagttctggaagatgctaattctcatcaaagaggactactttcccaggtatcaggcttgttgagcagacagcaggggattaagtaactcataaccaggcctcagatacccaagggtgctattacctgctggttttgattcaagttaaaaacacctgtactaagtatgacatctttcctactccagtccctctcgttgatatttgaataaatgcttttgaaccttaa

SEQ ID NO: 12112 - DNA, 2242 bp, Homo sapiens
  source 1..2242: mol_type = unassigned DNA
atgccgtctgagggtcgctgctgggagaccttgaaggccctacgcagttccgacaaaggtcgcctttgctactaccgcgactggctgctgcggcgcgaggatgttttagaagaatgtatgtctcttcccaagctatcttcttattctggatgggtggtagagcacgtcctaccccatatgcaggagaaccaacctctgtctgagacttcgccatcctctacgtcagcttcagccctagatcaaccctcatttgttcccaaatctcctgacgcaagctctgccttttccccagcctcccctgcaacaccaaatggaaccaagggcaaagatgagtcccagcacacagaatctatggtacttcagtcctcacgggggatcaaagtggaaggctgcgtccgaatgtacgaactggtacacagaatgaaaggaacactccagagaagccttgggacaccaagagaagctaaaagctgagcaccgtcacagagcaaagattctcaacctgaagctgcgggaagcagagcagcagcgcgtgaagcaagcagaacaggagcggcttcggaaggaagaaggccagatccgcctgcgggccctctatgctctgcaggaggagatgctgcagctcagccagcagctggatgcctctgagcagcacaaagccctgcttaaggtcgacctggctgccttccagacccgaggcaaccagctgtgcagcctcatctcagggatcatccgggcctcttcagagagcagctatcccacagcagagagtcaagctgaggctgagcgagctctgcgggaaatgcgggacctcctgatgaacttggggcaggagatcaccagagcctgcgaagacaagaggaggcaggatgaagaagaggcccaggtaaagctgcaagaggcacagatgcagcagggaccagaggcccacaaagagcccccagctcccagccagggcccaggagggaaacagaatgaagacctccaggtgaaggtacaagacattacaatgcagtggtaccagcagctgcaggatgcttccatgcagtgtgtgttgacctttgagggcctgaccaacagcaaggacagtcaggccaaaaagataaagatggacctccagaaggctgctaccatcccagtgagccaaatctctaccattgcaggctcaaaactgaaggagatctttgacaagatccacagcctgctctctggaaaacctgttcaatctggtgggcgctctgtgtctgtcacacttaacccacaggggctggactttgttcaatacaaactggcagagaaatttgtgaaacaaggcgaggaggaagtggcctctcaccatgaagcagcattccccattgcagttgtggcatccgggatctgggagctccaccccagagtgggggacctcattcttgctcatctacataagaagtgtccttactctgttcctttctatcccactttcaaggagggaatggctttggaagactatcagaggatgcttggttaccaagtaaaggattccaaagtggagcagcaagacaactttctaaaacgcatgtcagggatgatccgtctctacgctgctatcatccagctccggtggccatatggaaaccgacaggagattcaccctcatggcttaaatcatggatggcgctggttggcacagatcttaaacatggagcccttgtcagatgtgacagccaccctcctctttgacttcctggaggtgtgtgggaatgccctcatgaagcaataccaggttcagttctggaagatgctaattctcatcaaagaggactactttcccagaattgaagctatcacaagctcaggacagatgggctccttcatacgcctcaagcagttcttggagaaatgtttgcaacacaaggacattcctgtccccaagggctttctgacttcctccttctggcgctcctgatgtcactccatcacccaccatcaccgctgctgcaaagaggcaataataaaggaactgaagacagctgtatttgggagaagtcatgtcagattcagaaatttgccattatgtatttttatgtatttatgccttgtgactaggagaggagattttcatgggtcacaaaattcttggaggtcccttagtagatttggtagttccttaagagatccacgtgataaaataaatggagttggcctttcttgttttttgcaaaagtgataaaaggtctttagcacttggtctcctcccttg

SEQ ID NO: 12113 - DNA, 3504 bp, Homo sapiens
  source 1..3504: mol_type = unassigned DNA
gattgccacccaggacgatgagcggctgagatggagacgtctgcctcagccactgcctccgagaagcaagaagccaaaagtgggatcctggaggccgctggcttccccgacccgggtaaaaaggcctctcctttggtggtggctgcagcggcagcagcagcggtagctgcccaaggagtgccgcagcatctcttgccaccattccatgcgcccctaccgattgacatgcgacaccaggaaggaaggtaccattacgagcctcattctgtccacggtgtgcacgggccccctgccctcagcggcagccctgtcatctctgacatctccttgatccggctttccccgcacccggctggccctggggagtcccccttcaacgccccccacccgtacgtgaacccccacatggagcactacctccgttctgtgcacagcagccccacgctctccatgatctctgcagccaggggcctcagccccgctgatgtggcccaggagcaccttaaggagaggggactgtttggccttcctgctccaggcaccaccccctcagactattaccaccagatgaccctcgtggcaggccaccccgcgccctacggggacctgctgatgcagagcgggggcgctgccagcgcaccccatctccacgactacctcaaccccgtggacgtgtcccgtttctccagcccgcgggtgacgccccgcctgagccgcaagcgggcgctgtccatctccccactctcagacgccagcctggacctgcagcggatgatccgcacctcacccaactcgctagtggcctacatcaacaactcccgaagcagctcggcggccagcggttcctacgggcatctgtcagcgggtgccctcagcccagccttcaccttcccccaccccatcaaccccgtggcctaccagcagattctgagccagcagaggggtctggggtcagcctttggacacacaccacccctgatccagccctcacccaccttcctggcccagcagcccatggccctcacctccatcaatgccacgcccacccagctcagcagcagcagcaactgtctgagtgacaccaaccagaacaagcagagcagtgagtcggccgtcagcagcaccgtcaaccctgtcgccattcacaagcgcagcaaggtcaagaccgagcctgagggcctgcggccggcctcccctctggcgctgacgcagggccaggtgtctggacacggctcatgtgggtgtgcccttcccctctcccaggagcagctggctgacctcaaggaagatctggacagggatgactgtaagcaggaggctgaggtggtcatctatgagaccaactgccactgggaagactgcaccaaggagtacgacacccaggagcagctggtgcatcacatcaacaacgagcacatccacggggagaagaaggagtttgtgtgccgctggcaggcctgcacgcgggagcagaagcccttcaaggcgcagtacatgctggtggtgcacatgcggcgacacacgggcgagaagccccacaagtgcacgttcgagggctgctcgaaggcctactcccgcctggagaacctgaagacacacctgcggtcccacaccggggagaagccatatgtgtgtgagcacgagggctgcaacaaagccttctccaacgcctcggaccgcgccaagcaccagaatcgcacccactccaacgagaaaccctacatctgcaagatcccaggctgcaccaagagatacacagaccccagctctctccggaagcatgtgaaaacggtccacggcccagatgcccacgtcaccaagaagcagcgcaatgacgtgcacctccgcacaccgctgctcaaagagaatggggacagtgaggccggcacggagcctggcggcccagagagcaccgaggccagcagcaccagccaggccgtggaggactgcctgcacgtcagagccatcaagaccgagagctccgggctgtgtcagtccagccccggggcccagtcgtcctgcagcagcgagccctctcctctgggcagtgcccccaacaatgacagtggcgtggagatgccggggacggggcccgggagcctgggagacctgacggcactggatgacacacccccaggggccgacacctcagccctggctgccccctccgctggtggcctccagctgcgcaaacacatgaccaccatgcaccggttcgagcagctcaagaaggagaagctcaagtcactcaaggattcctgctcatgggccgggccgactccacacacgcggaacaccaagctgcctcccctcccgggaagtggctccatcctggaaaacttcagtggcagtgggggcggcgggcccgcggggctgctgccgaacccgcggctgtcggagctgtccgcgagcgaggtgaccatgctgagccagctgcaggagcgccgcgacagctccaccagcacggtcagctcggcctacaccgtgagccgccgctcctccggcatctccccctacttctccagccgccgctccagcgaggcctcgcccctgggcgccggccgcccgcacaacgcgagctccgctgactcctacgaccccatctccacggacgcgtcgcggcgctcgagcgaggccagccagtgcagcggcggctccgggctgctcaacctcacgccggcgcagcagtacagcctgcgggccaagtacgcggcagccactggcggccccccgcccactccgctgccgggcctggagcgcatgagcctgcggaccaggctggcgctgctggacgcgcccgagcgcacgctgcccgccggctgcccacgcccactggggccgcggcgtggcagcgacgggccgacctatggccacggccacgcgggggctgcgcccgccttcccccacgaggctccaggcggcggagccaggcgggccagcgaccctgtgcggcggcccgatgccctgtccctgccgcgggtgcagcgcttccacagcacccacaacgtgaaccccggcccgctgccgccctgtgccgacaggcgaggcctccgcctgcagagccacccgagcaccgacggcggcctggcccgcggcgcctactcgccccggccgcctagcatcagcgagaacgtggcgatggaggccgtggcggcaggagtggacggcgcggggcccgaggccgacctggggctgccggaggacgacctggtgcttccagacgacgtggtgcagtacatcaaggcgcacgccagtggcgctctggacgagggcaccgggcaggtgtatcccacggaaagcactggcttctctgacaaccccagactacccagcccggggctgcacggccagcgcaggatggtggctgcggactccaacgtgggcccctccgcccctatgctgggaggatgccagttaggctttggggcgccctccagcctgaacaaaaataacatgcctgtgcagtggaatgaggcatcagcaacatggctgtcggggacatga

SEQ ID NO: 12114 - DNA, 6768 bp, Homo sapiens
  source 1..6768: mol_type = unassigned DNA
gattgccacccaggacgatgagcggctgagatggagacgtctgcctcagccactgcctccgagaagcaagaagccaaaagtgggatcctggaggccgctggcttccccgacccgggtaaaaaggcctctcctttggtggtggctgcagcggcagcagcagcggtagctgcccaaggagtgccgcagcatctcttgccaccattccatgcgcccctaccgattgacatgcgacaccaggaaggaaggtaccattacgagcctcattctgtccacggtgtgcacgggccccctgccctcagcggcagccctgtcatctctgacatctccttgatccggctttccccgcacccggctggccctggggagtcccccttcaacgccccccacccgtacgtgaacccccacatggagcactacctccgttctgtgcacagcagccccacgctctccatgatctctgcagccaggggcctcagccccgctgatgtggcccaggagcaccttaaggagaggggactgtttggccttcctgctccaggcaccaccccctcagactattaccaccagatgaccctcgtggcaggccaccccgcgccctacggggacctgctgatgcagagcgggggcgctgccagcgcaccccatctccacgactacctcaaccccgtggacgtgtcccgtttctccagcccgcgggtgacgccccgcctgagccgcaagcgggcgctgtccatctccccactctcagacgccagcctggacctgcagcggatgatccgcacctcacccaactcgctagtggcctacatcaacaactcccgaagcagctcggcggccagcggttcctacgggcatctgtcagcgggtgccctcagcccagccttcaccttcccccaccccatcaaccccgtggcctaccagcagattctgagccagcagaggggtctggggtcagcctttggacacacaccacccctgatccagccctcacccaccttcctggcccagcagcccatggccctcacctccatcaatgccacgcccacccagctcagcagcagcagcaactgtctgagtgacaccaaccagaacaagcagagcagtgagtcggccgtcagcagcaccgtcaaccctgtcgccattcacaagcgcagcaaggtcaagaccgagcctgagggcctgcggccggcctcccctctggcgctgacgcagggccaggtgtctggacacggctcatgtgggtgtgcccttcccctctcccaggagcagctggctgacctcaaggaagatctggacagggatgactgtaagcaggaggctgaggtggtcatctatgagaccaactgccactgggaagactgcaccaaggagtacgacacccaggagcagctggtgcatcacatcaacaacgagcacatccacggggagaagaaggagtttgtgtgccgctggcaggcctgcacgcgggagcagaagcccttcaaggcgcagtacatgctggtggtgcacatgcggcgacacacgggcgagaagccccacaagtgcacgttcgagggctgctcgaaggcctactcccgcctggagaacctgaagacacacctgcggtcccacaccggggagaagccatatgtgtgtgagcacgagggctgcaacaaagccttctccaacgcctcggaccgcgccaagcaccagaatcgcacccactccaacgagaaaccctacatctgcaagatcccaggctgcaccaagagatacacagaccccagctctctccggaagcatgtgaaaacggtccacggcccagatgcccacgtcaccaagaagcagcgcaatgacgtgcacctccgcacaccgctgctcaaagagaatggggacagtgaggccggcacggagcctggcggcccagagagcaccgaggccagcagcaccagccaggccgtggaggactgcctgcacgtcagagccatcaagaccgagagctccgggctgtgtcagtccagccccggggcccagtcgtcctgcagcagcgagccctctcctctgggcagtgcccccaacaatgacagtggcgtggagatgccggggacggggcccgggagcctgggagacctgacggcactggatgacacacccccaggggccgacacctcagccctggctgccccctccgctggtggcctccagctgcgcaaacacatgaccaccatgcaccggttcgagcagctcaagaaggagaagctcaagtcactcaaggattcctgctcatgggccgggccgactccacacacgcggaacaccaagctgcctcccctcccgggaagtggctccatcctggaaaacttcagtggcagtgggggcggcgggcccgcggggctgctgccgaacccgcggctgtcggagctgtccgcgagcgaggtgaccatgctgagccagctgcaggagcgccgcgacagctccaccagcacggtcagctcggcctacaccgtgagccgccgctcctccggcatctccccctacttctccagccgccgctccagcgaggcctcgcccctgggcgccggccgcccgcacaacgcgagctccgctgactcctacgaccccatctccacggacgcgtcgcggcgctcgagcgaggccagccagtgcagcggcggctccgggctgctcaacctcacgccggcgcagcagtacagcctgcgggccaagtacgcggcagccactggcggccccccgcccactccgctgccgggcctggagcgcatgagcctgcggaccaggctggcgctgctggacgcgcccgagcgcacgctgcccgccggctgcccacgcccactggggccgcggcgtggcagcgacgggccgacctatggccacggccacgcgggggctgcgcccgccttcccccacgaggctccaggcggcggagccaggcgggccagcgaccctgtgcggcggcccgatgccctgtccctgccgcgggtgcagcgcttccacagcacccacaacgtgaaccccggcccgctgccgccctgtgccgacaggcgaggcctccgcctgcagagccacccgagcaccgacggcggcctggcccgcggcgcctactcgccccggccgcctagcatcagcgagaacgtggcgatggaggccgtggcggcaggagtggacggcgcggggcccgaggccgacctggggctgccggaggacgacctggtgcttccagacgacgtggtgcagtacatcaaggcgcacgccagtggcgctctggacgagggcaccgggcaggtgtatcccacggaaagcactggcttctctgacaaccccagactacccagcccggggctgcacggccagcgcaggatggtggctgcggactccaacgtgggcccctccgcccctatgctgggaggatgccagttaggctttggggcgccctccagcctgaacaaaaataacatgcctgtgcagtggaatgaggtgagctccggcaccgtagacgccctggccagccaggtgaagcctccaccctttcctcagggcaacctggcggtggtgcagcagaagcctgcctttggccagtacccgggctacagtccgcaaggcctacaggctagccctgggggcctggacagcacgcagccacacctgcagccccgcagcggagccccctcccagggcatccccagggtaaactacatgcagcagctgcgacagccagtggcaggcagccagtgtcctggcatgactaccactatgagcccccatgcctgctatggccaagtccacccccagctgagccccagcaccatcagtggggccctcaaccagttcccccaatcctgcagcaacatgccagccaagccagggcatctggggcaccctcagcagacagaagtggcacctgaccccaccacgatgggcaatcgccacagggaacttggggtccccgattcagccctggctggagtgccaccacctcacccagtccagagctacccacagcagagccatcacctggcagcctccatgagccaggagggctaccaccaggtccccagccttctgcctgcccgccagcctggcttcatggagccccaaacaggcccgatgggggtggctacagcaggctttggcctagtgcagccccggcctcccctcgagcccagccccactggccgccaccgtggggtacgtgctgtgcagcagcagctggcctacgccagggccacaggccatgccatggctgccatgccgtccagtcaggaaacagcagaggctgtgcccaagggagcgatgggcaacatggggtcggtgcctccccagccgcctccgcaggacgcaggtggggccccggaccacagcatgctctactactacggccagatccacatgtacgaacaggatggaggcctggagaacctcgggagctgccaggtcatgcggtcccagccaccacagccacaggcctgtcaggacagcatccagccccagcccttgccctcaccaggggtcaaccaggtgtccagcactgtggactcccagctcctggaggccccccagattgacttcgatgccatcatggatgatggcgatcactcgagtttgttctcgggtgctctgagccccagcctcctccacagcctctcccagaactcctcccgcctcaccaccccccgaaactccttgaccctgccctccatccccgcaggcatcagcaacatggctgtcggggacatgagctccatgctcaccagcctcgccgaggagagcaagttcctgaacatgatgacctagaggcccgagcgcctggtgctgagtgcacccggaggggtcatcgctgcccagagcctggggattccagctgtcttgtctttttccaaaaaagtgttaaataggcttgaggggttgttgcgcaatggccgcttcagatgacagatgttgtaagagaaggtttatgggcatcctctctggtcttttggattattcctcagaacaatgaaaaaagtctccataggacaggaaggaatgcaaaactcatttacacagtgctttccagcctttggtgcttacaggaccgcgctgttccggcttcttcacggctgacattcggctaacgagggattactttggccaaaacctttcaaaggatatgcagaaagatggtagggagcatttgggtttgaatctgaatgctatactggatactctgctccggaaagatgagctttttattctactacttggaaggaaaaggaattcctggtccacctgaattcctctatgaagcctaactcttgaggtctctaacataccttgtcatagaggaaaagcacagattatacctggatgattcaggagcacattctgattccaggtttggtagagctggctcttctactccgtaaagccgagtctgggactggcagcccatccaagtgtatatgaatgaataaagcatccaagtatatatgaatgaataaagtatgtaagtatcaccagaaaaaggaaagaaaaaatgtactccttggggcaagcccagaagctgccctggcctctccagaccgtgtttacagtgtttgcatgtagaatgtagcccttcctgaaaagaagacttgtttctaaatacctcggggctgctggagccgctgtgggttagggatggactgaggcctcgaggagtgagggtgcacccggggcccagcctcaggctgccctagggatctctcagtaggaagaggaagttgcgtgtttacccaatcctgtttctccaatgcaacgtccacccactttaccaccaaaaactccagggcctgacggcagcccggtcccccagcactcaccagcagcccagtgttctccaccaagccacagtgtgcatgcctggtatcctccggattcccttccttctgcccgctgagtcactgggcagagaatgatgacatgtgtaggtggtgtggttgggggtggaaaggggaaggggttgatcctcaggactctgagggagcatcgttgaattttcctgttcagtgtgaccaagacccacctggaaatggaatttggaactggcttcaggagacatcattcctgaacacactgtagggtgaattggtgcatcttccccaccatacacacacacacacacacacacacacacacacacacacacacaccccaaaccttttcatggggaatgtgtggcaaccttgccaaacagcaccactcagagtgtgactctgactgtgaccttggccttaatgaggaacttcttaggagagtttgaggacaaggccaacatcgtcatctgggctcgctgcgtcccagcacatcaaactctgtccagagacaaggccaactgcaaatgaaagccagggaacattgctaagggtctgtggctctgtggtggtgttcatcgccttcctgagataggatttcccttgccagtcccaacctgtatatattctgtacagaagacatccctgaatatactgtaggtgagtcgtccagccaaatttatatctccaaaacatttttagctttttctacatgctatgaattgagatgacatgctcaacttgtaaataagtctttttgtacattaaaaaagtaattttttcataatttatcttgtctatctgcttcccccttgacagtagttaatgagaacctgggcagtaaatttggtgcattcgagcagaaattaggctgtattttttcttaacagtgtcaaaattgactatcccgcctttgccaagaaatgtttaatgctgaggc

SEQ ID NO: 12115 - DNA, 315 bp, Homo sapiens
  source 1..315: mol_type = unassigned DNA
ggccacctgcgtgctagaggcaaacttttgtctctctcggattgccacccaggacgatgagcggctgagatggagacgtctgcctcagccactgcctccgagaagcaagaagccaaaagtgggatcctggaggccgctggcttccccgacccgggtaaaaaggcctctcctttggtggtggctgcagcggcagcagcagcggtagctgcccaaggagtgccgcagcatctcttgccaccattccatgcgcccctaccgattgacatgcgacaccaggaaggaaggtaccattacgagcctcattctgtccacggt

SEQ ID NO: 12116 - DNA, 2354 bp, Homo sapiens
  source 1..2354: mol_type = unassigned DNA
ccacccaggacgatgagcggctgagatggagacgtctgcctcagccactgcctccgagaagcaagaagccaaaagtgggatcctggaggccgctggcttccccgacccgggtaaaaaggcctctcctttggtggtggctgcagcggcagcagcagcggtagctgcccaaggagtgccgcagcatctcttgccaccattccatgcgcccctaccgattgacatgcgacaccaggaaggaaggtaccattacgagcctcattctgtccacggtgtgcacggtgtcccgtttctccagcccgcgggtgacgccccgcctgagccgcaagcgggcgctgtccatctccccactctcagacgccagcctggacctgcagcggatgatccgcacctcacccaactcgctagtggcctacatcaacaactcccgaagcagctcggcggccagcggttcctacgggcatctgtcagcgggtgccctcagcccagccttcaccttcccccaccccatcaaccccgtggcctaccagcagattctgagccagcagaggggtctggggtcagcctttggacacacaccacccctgatccagccctcacccaccttcctggcccagcagcccatggccctcacctccatcaatgccacgcccacccagctcagcagcagcagcaactgtctgagtgacaccaaccagaacaagcagagcagtgagtcggccgtcagcagcaccgtcaaccctgtcgccattcacaagcgcagcaaggtcaagaccgagcctgagggcctgcggccggcctcccctctggcgctgacgcaggagcagctggctgacctcaaggaagatctggacagggatgactgtaagcaggaggctgaggtggtcatctatgagaccaactgccactgggaagactgcaccaaggagtacgacacccaggagcagctggtgcatcacatcaacaacgagcacatccacggggagaagaaggagtttgtgtgccgctggcaggcctgcacgcgggagcagaagcccttcaaggcgcagtacatgctggtggtgcacatgcggcgacacacgggcgagaagccccacaagtgcacgttcgagggctgctcgaaggcctactcccgcctggagaacctgaagacacacctgcggtcccacaccggggagaagccatatgtgtgtgagcacgagggctgcaacaaagccttctccaacgcctcggaccgcgccaagcaccagaatcgcacccactccaacgagaaaccctacatctgcaagatcccaggctgcaccaagagatacacagaccccagctctctccggaagcatgtgaaaacggtccacggcccagatgcccacgtcaccaagaagcagcgcaatgacgtgcacctccgcacaccgctgctcaaagagaatggggacagtgaggccggcacggagcctggcggcccagagagcaccgaggccagcagcaccagccaggccgtggaggactgcctgcacgtcagagccatcaagaccgagagctccgggctgtgtcagtccagccccggggcccagtcgtcctgcagcagcgagccctctcctctgggcagtgcccccaacaatgacagtggcgtggagatgccggggacggggcccgggagcctgggagacctgacggcactggatgacacacccccaggggccgacaccacagccacaggcctgtcaggacagcatccagccccagcccttgccctcaccaggggtcaaccaggtgtccagcactgtggactcccagctcctggaggccccccagattgacttcgatgccatcatggatgatggcgatcactcgagtttgttctcgggtgctctgagccccagcctcctccacagcctctcccagaactcctcccgcctcaccaccccccgaaactccttgaccctgccctccatccccgcaggcatcagcaacatggctgtcggggacatgagctccatgctcaccagcctcgccgaggagagcaagttcctgaacatgatgacctagaggcccgagcgcctggtgctgagtgcacccggaggggtcatcgctgcccagagcctggggattccagctgtcttgtctttttccaaaaaagtgttaaataggcttgaggggttgttgcgcaatggccgcttcagatgacagatgttgtaagagaaggtttatgggcatcctctctggtcttttggattattcctcagaacaatgaaaaaagtctccataggacaggaaggaatgcaaaactcatttacacagtgctttccagcctttggtgcttacaggaccgcgctgttccggcttcttcacggctgaca

SEQ ID NO: 12117 - DNA, 6799 bp, Homo sapiens
  source 1..6799: mol_type = unassigned DNA
tgctgctttaccgacacatcaaagagcaaggattgccacccaggacgatgagcggctgagatggagacgtctgcctcagccactgcctccgagaagcaagaagccaaaagtgggatcctggaggccgctggcttccccgacccgggtaaaaaggcctctcctttggtggtggctgcagcggcagcagcagcggtagctgcccaaggagtgccgcagcatctcttgccaccattccatgcgcccctaccgattgacatgcgacaccaggaaggaaggtaccattacgagcctcattctgtccacggtgtgcacgggccccctgccctcagcggcagccctgtcatctctgacatctccttgatccggctttccccgcacccggctggccctggggagtcccccttcaacgccccccacccgtacgtgaacccccacatggagcactacctccgttctgtgcacagcagccccacgctctccatgatctctgcagccaggggcctcagccccgctgatgtggcccaggagcaccttaaggagaggggactgtttggccttcctgctccaggcaccaccccctcagactattaccaccagatgaccctcgtggcaggccaccccgcgccctacggggacctgctgatgcagagcgggggcgctgccagcgcaccccatctccacgactacctcaaccccgtggacgtgtcccgtttctccagcccgcgggtgacgccccgcctgagccgcaagcgggcgctgtccatctccccactctcagacgccagcctggacctgcagcggatgatccgcacctcacccaactcgctagtggcctacatcaacaactcccgaagcagctcggcggccagcggttcctacgggcatctgtcagcgggtgccctcagcccagccttcaccttcccccaccccatcaaccccgtggcctaccagcagattctgagccagcagaggggtctggggtcagcctttggacacacaccacccctgatccagccctcacccaccttcctggcccagcagcccatggccctcacctccatcaatgccacgcccacccagctcagcagcagcagcaactgtctgagtgacaccaaccagaacaagcagagcagtgagtcggccgtcagcagcaccgtcaaccctgtcgccattcacaagcgcagcaaggtcaagaccgagcctgagggcctgcggccggcctcccctctggcgctgacgcagggccaggtgtctggacacggctcatgtgggtgtgcccttcccctctcccaggagcagctggctgacctcaaggaagatctggacagggatgactgtaagcaggaggctgaggtggtcatctatgagaccaactgccactgggaagactgcaccaaggagtacgacacccaggagcagctggtgcatcacatcaacaacgagcacatccacggggagaagaaggagtttgtgtgccgctggcaggcctgcacgcgggagcagaagcccttcaaggcgcagtacatgctggtggtgcacatgcggcgacacacgggcgagaagccccacaagtgcacgttcgagggctgctcgaaggcctactcccgcctggagaacctgaagacacacctgcggtcccacaccggggagaagccatatgtgtgtgagcacgagggctgcaacaaagccttctccaacgcctcggaccgcgccaagcaccagaatcgcacccactccaacgagaaaccctacatctgcaagatcccaggctgcaccaagagatacacagaccccagctctctccggaagcatgtgaaaacggtccacggcccagatgcccacgtcaccaagaagcagcgcaatgacgtgcacctccgcacaccgctgctcaaagagaatggggacagtgaggccggcacggagcctggcggcccagagagcaccgaggccagcagcaccagccaggccgtggaggactgcctgcacgtcagagccatcaagaccgagagctccgggctgtgtcagtccagccccggggcccagtcgtcctgcagcagcgagccctctcctctgggcagtgcccccaacaatgacagtggcgtggagatgccggggacggggcccgggagcctgggagacctgacggcactggatgacacacccccaggggccgacacctcagccctggctgccccctccgctggtggcctccagctgcgcaaacacatgaccaccatgcaccggttcgagcagctcaagaaggagaagctcaagtcactcaaggattcctgctcatgggccgggccgactccacacacgcggaacaccaagctgcctcccctcccgggaagtggctccatcctggaaaacttcagtggcagtgggggcggcgggcccgcggggctgctgccgaacccgcggctgtcggagctgtccgcgagcgaggtgaccatgctgagccagctgcaggagcgccgcgacagctccaccagcacggtcagctcggcctacaccgtgagccgccgctcctccggcatctccccctacttctccagccgccgctccagcgaggcctcgcccctgggcgccggccgcccgcacaacgcgagctccgctgactcctacgaccccatctccacggacgcgtcgcggcgctcgagcgaggccagccagtgcagcggcggctccgggctgctcaacctcacgccggcgcagcagtacagcctgcgggccaagtacgcggcagccactggcggccccccgcccactccgctgccgggcctggagcgcatgagcctgcggaccaggctggcgctgctggacgcgcccgagcgcacgctgcccgccggctgcccacgcccactggggccgcggcgtggcagcgacgggccgacctatggccacggccacgcgggggctgcgcccgccttcccccacgaggctccaggcggcggagccaggcgggccagcgaccctgtgcggcggcccgatgccctgtccctgccgcgggtgcagcgcttccacagcacccacaacgtgaaccccggcccgctgccgccctgtgccgacaggcgaggcctccgcctgcagagccacccgagcaccgacggcggcctggcccgcggcgcctactcgccccggccgcctagcatcagcgagaacgtggcgatggaggccgtggcggcaggagtggacggcgcggggcccgaggccgacctggggctgccggaggacgacctggtgcttccagacgacgtggtgcagtacatcaaggcgcacgccagtggcgctctggacgagggcaccgggcaggtgtatcccacggaaagcactggcttctctgacaaccccagactacccagcccggggctgcacggccagcgcaggatggtggctgcggactccaacgtgggcccctccgcccctatgctgggaggatgccagttaggctttggggcgccctccagcctgaacaaaaataacatgcctgtgcagtggaatgaggtgagctccggcaccgtagacgccctggccagccaggtgaagcctccaccctttcctcagggcaacctggcggtggtgcagcagaagcctgcctttggccagtacccgggctacagtccgcaaggcctacaggctagccctgggggcctggacagcacgcagccacacctgcagccccgcagcggagccccctcccagggcatccccagggtaaactacatgcagcagctgcgacagccagtggcaggcagccagtgtcctggcatgactaccactatgagcccccatgcctgctatggccaagtccacccccagctgagccccagcaccatcagtggggccctcaaccagttcccccaatcctgcagcaacatgccagccaagccagggcatctggggcaccctcagcagacagaagtggcacctgaccccaccacgatgggcaatcgccacagggaacttggggtccccgattcagccctggctggagtgccaccacctcacccagtccagagctacccacagcagagccatcacctggcagcctccatgagccaggagggctaccaccaggtccccagccttctgcctgcccgccagcctggcttcatggagccccaaacaggcccgatgggggtggctacagcaggctttggcctagtgcagccccggcctcccctcgagcccagccccactggccgccaccgtggggtacgtgctgtgcagcagcagctggcctacgccagggccacaggccatgccatggctgccatgccgtccagtcaggaaacagcagaggctgtgcccaagggagcgatgggcaacatggggtcggtgcctccccagccgcctccgcaggacgcaggtggggccccggaccacagcatgctctactactacggccagatccacatgtacgaacaggatggaggcctggagaacctcgggagctgccaggtcatgcggtcccagccaccacagccacaggcctgtcaggacagcatccagccccagcccttgccctcaccaggggtcaaccaggtgtccagcactgtggactcccagctcctggaggccccccagattgacttcgatgccatcatggatgatggcgatcactcgagtttgttctcgggtgctctgagccccagcctcctccacagcctctcccagaactcctcccgcctcaccaccccccgaaactccttgaccctgccctccatccccgcaggcatcagcaacatggctgtcggggacatgagctccatgctcaccagcctcgccgaggagagcaagttcctgaacatgatgacctagaggcccgagcgcctggtgctgagtgcacccggaggggtcatcgctgcccagagcctggggattccagctgtcttgtctttttccaaaaaagtgttaaataggcttgaggggttgttgcgcaatggccgcttcagatgacagatgttgtaagagaaggtttatgggcatcctctctggtcttttggattattcctcagaacaatgaaaaaagtctccataggacaggaaggaatgcaaaactcatttacacagtgctttccagcctttggtgcttacaggaccgcgctgttccggcttcttcacggctgacattcggctaacgagggattactttggccaaaacctttcaaaggatatgcagaaagatggtagggagcatttgggtttgaatctgaatgctatactggatactctgctccggaaagatgagctttttattctactacttggaaggaaaaggaattcctggtccacctgaattcctctatgaagcctaactcttgaggtctctaacataccttgtcatagaggaaaagcacagattatacctggatgattcaggagcacattctgattccaggtttggtagagctggctcttctactccgtaaagccgagtctgggactggcagcccatccaagtgtatatgaatgaataaagcatccaagtatatatgaatgaataaagtatgtaagtatcaccagaaaaaggaaagaaaaaatgtactccttggggcaagcccagaagctgccctggcctctccagaccgtgtttacagtgtttgcatgtagaatgtagcccttcctgaaaagaagacttgtttctaaatacctcggggctgctggagccgctgtgggttagggatggactgaggcctcgaggagtgagggtgcacccggggcccagcctcaggctgccctagggatctctcagtaggaagaggaagttgcgtgtttacccaatcctgtttctccaatgcaacgtccacccactttaccaccaaaaactccagggcctgacggcagcccggtcccccagcactcaccagcagcccagtgttctccaccaagccacagtgtgcatgcctggtatcctccggattcccttccttctgcccgctgagtcactgggcagagaatgatgacatgtgtaggtggtgtggttgggggtggaaaggggaaggggttgatcctcaggactctgagggagcatcgttgaattttcctgttcagtgtgaccaagacccacctggaaatggaatttggaactggcttcaggagacatcattcctgaacacactgtagggtgaattggtgcatcttccccaccatacacacacacacacacacacacacacacacacacacacacacaccccaaaccttttcatggggaatgtgtggcaaccttgccaaacagcaccactcagagtgtgactctgactgtgaccttggccttaatgaggaacttcttaggagagtttgaggacaaggccaacatcgtcatctgggctcgctgcgtcccagcacatcaaactctgtccagagacaaggccaactgcaaatgaaagccagggaacattgctaagggtctgtggctctgtggtggtgttcatcgccttcctgagataggatttcccttgccagtcccaacctgtatatattctgtacagaagacatccctgaatatactgtaggtgagtcgtccagccaaatttatatctccaaaacatttttagctttttctacatgctatgaattgagatgacatgctcaacttgtaaataagtctttttgtacattaaaaaagtaattttttcataatttatcttgtctatctgcttcccccttgacagtagttaatgagaacctgggcagtaaatttggtgcattcgagcagaaattaggctgtattttttcttaacagtgtcaaaattgactatcccgcctttgccaagaaatgtttaatgctgaggca

SEQ ID NO: 12118 - DNA, 8208 bp, Homo sapiens
  source 1..8208: mol_type = unassigned DNA
gtctatgggaagttcggggacttgacagccgctgccgccgcagggcatttttggtcgaagagagctgaagtaatgagaagacatcatggaggcccagtcccacagctccacgaccactgaaaagaaaaaagttgagaattccatagtgaagtgctccactcgaacagatgtgagcgagaaagccgttgcctccagcaccacttctaatgaggatgaaagtcctggacagacttatcacagagagagaagaaacgcaatcactatgcagccacagaatgtccaggggctcagcaaagtcagtgaggaaccttcaacatcgagtgacgagagggcctcattgatcaagaaagagatccatgggtccctgccacacgtggcggagccctctgtgccgtaccgcgggacggtgtttgccatggaccccaggaatggttacatggagccccactaccaccctcctcatcttttccctgccttccatcctcctgtaccaattgatgccagacatcatgagggccgttaccattacgatccatctccgattcctccattgcatatgacttccgccttatctagtagccctacgtatccggacctgcccttcattaggatctccccacaccggaaccccactgctgcttccgagtctcccttcagccctccacatccctacattaatccctacatggactatatccgctccttgcacagcagcccatcgctctccatgatctcagcaacccgtgggctgagccctacagatgcgccccatgcaggagtcagcccagcagaatactatcatcagatggccctgctaactggccagcgcagcccctatgcagacattattccctcagctgccaccgccggcacgggggccatccacatggaatatcttcatgctatggatagcaccagattctccagccccaggctgtcagccaggccgagccgaaaacgtacactgtccatatcaccactctccgatcatagctttgaccttcagaccatgataaggacgtctcccaactccttggtcacgattctcaataattcccgtagcagctcttcagcaagtggctcctatggtcacttatctgcaagtgcaatcagccctgccttgagcttcacctactcttccgcgcccgtctctctccacatgcatcagcagatcctaagccgacaacagagcttaggttcagcctttggacacagccctccactcatccaccctgccccaacttttccaacacagaggcctattccagggatccctacggttctgaaccccgtccaggtcagctccggcccttctgagtcctcacagaacaagcccacgagtgagtctgcagtgagcagcactggtgacccgatgcacaacaagaggtccaagatcaaacccgatgaagacctccccagcccaggggctcgggggcagcaggaacagcccgaaggaacaacccttgtcaaggaggaaggggacaaagatgaaagcaaacaggagcctgaagtcatctatgagacaaactgccactgggaaggctgcgcgagggagttcgacacccaagagcagcttgtgcaccatataaataacgaccatattcatggagagaagaaggagttcgtgtgcaggtggctggactgctcaagagagcagaaacccttcaaagcccagtatatgttggtagtgcatatgagaagacacacgggcgagaagcctcacaaatgcacttttgaaggttgcacaaaggcctactcgagactagaaaacttgaaaacacacttgagatctcacactggagagaaaccatacgtctgtgagcacgaaggttgcaacaaggctttctcaaatgcctctgatcgcgccaaacaccaaaacagaacgcattccaatgagaaaccatatgtgtgcaaaatcccaggctgcactaagcgttacacagacccaagctccctccggaaacatgtgaagacagtgcatggcccagaggctcatgtcaccaagaagcagcgaggggacatccatcctcggccgccacccccgagagattccggcagccattcacagtccaggtcgcctggccgaccgactcagggagcccttggtgagcagcaggacctcagcaacactacctcaaagcgggaagaatgcctccaggtgaaaaccgtcaaggcagagaagccaatgacatctcagccaagccctggtggtcagtcttcatgcagcagccaacagtcccccatcagcaactattccaacagtgggctcgagcttcctctgaccgatggaggtagtataggagacctcagtgccatcgatgaaaccccaatcatggactcaaccatttccactgcaaccacagcccttgctttgcaagccaggagaaacccggcagggaccaaatggatggagcacgtaaaactagaaaggctaaaacaagtgaatggaatgtttccgcgactgaaccccattctaccccctaaagcccctgcggtctctcctctcataggaaatggcacacagtccaacaacacctgcagcttgggtgggcccatgacgcttctcccgggcagaagcgacctctctggggtggacgtcactatgctgaacatgctcaacagaagggacagcagcgccagcaccatcagctcggcctacctgagcagccgccgctcctcagggatctcgccctgcttctccagccgccgctccagcgaggcgtcacaggccgagggccggccgcagaacgtgagcgtggccgactcctacgaccccatctccaccgacgcctcgcgccgctccagcgaagccagccagagcgacggcctgcccagcctgctcagcctcacgcccgcccagcagtaccgcctcaaggccaagtacgcggctgccacaggagggccgccgccgacgcccctgcccaacatggagaggatgagcctgaagacgcgcctggcgctgctcggggatgccctcgagcctggcgtggccctgcctccagttcatgccccgaggaggtgcagcgacgggggagcccacggctacgggcggcgccacctgcagccgcacgatgcgccgggccacggcgtgaggagggccagcgacccggtgcggacaggctccgagggcctggccctgcctcgtgtgccgcgcttcagcagcctcagcagctgcaaccccccggcgatggccacgtccgcggagaagcgcagtctcgtgcttcagaattacacgcggcccgagggcggccagtcccgaaacttccactcgtccccctgtcctcccagcatcaccgagaacgtcaccctggagtccctgaccatggacgctgatgccaacctgaacgatgaggatttcctgccggacgacgtggtgcagtatttaaattcccagaaccaagcagggtacgagcagcacttccccagcgccctcccggacgacagcaaagtgccccacgggcccggtgactttgacgcgcccgggctgccagacagccacgctggccagcagttccatgccctcgagcagccctgccccgagggcagcaaaaccgacctgcccattcagtggaacgaagtcagctccggaagcgccgacctgtcctcctccaagctcaagtgtgggccgcggcccgctgtgccgcagactcgcgcctttgggttctgcaacggcatggtcgtccacccgcagaaccccttgaggagcgggcctgctgggggctatcagaccctcggggagaacagcaacccctacggtggcccagagcacttgatgctccacaacagccccggaagtggcaccagtggaaacgccttccatgaacagccctgtaaggccccgcagtatgggaactgtctcaacaggcagccagtggcccctggtgcactcgacggtgcctgtggtgccgggattcaagcctcaaagctgaagagcacccccatgcaagggagcgggggccagctgaatttcggcctgccggtagcgccaaatgagtcagctggcagcatggtgaatggcatgcagaaccaggacccagtgggacaggggtacctggctcaccagctcctcggcgacagcatgcagcacccgggggcaggccgccccggtcagcagatgcttgggcagattagtgctacctcacacatcaacatctaccaagggccagagagctgcctgccaggggctcacggcatgggcagccagccgtcaagcttggcagttgtcaggggctaccagccatgtgccagctttgggggcagcaggcgccaggctatgccgagggacagccttgctctgcagtcaggacagctcagtgacacaagtcagacctgcagggtgaatggtatcaagatggagatgaaagggcagccccatccgctgtgctctaatctgcagaattactctggtcagttctatgaccaaaccgtgggcttcagtcagcaagacacgaaagctggttcattctctatttcagacgccagctgcctgctacaggggaccagcgccaaaaactctgagttactttccccaggtgctaatcaggtgacaagcacagtggacagcctcgacagccatgacctggaaggggtacagattgacttcgatgccatcatagacgatggggaccactccagcctgatgtcgggggccctgagcccaagtatcattcagaacctttcccatagctcctcccgcctcaccacgcctcgggcgtccctcccattcccagcgctgtccatgagcaccaccaacatggctatcggggacatgagttctttgctgacctccctagcggaagaaagcaaattccttgcagttatgcaataggctttaggaaaaaaagactgcaaccaacggaaatcaataggagttgaagagattaaactgactttgttttggctgtttttttagttctgtatgtattttagcaatctcatctcacctaactgagatgtgtttcaattatattccttttatggaaaaggactctgaaaaaccctaaagtattctagggagaaactgtcttccatttcagttttgaatcagtattgttacactcaaaccaccctctttttaaaaaaaaaaaaaaaaactgtaagccccgccccctttttagtaaaccgatgtaaatttgtgatgtgcatattcttctttcttttagaagagcagtcaaattaaaggatttgacatgttttgctgttgctcaaaggaaataggagttggtgtgcttgtgaccaaggggttacacttccagcttttaaaattctcctttacatgtgctcagtgttttgttttgtgttttggtttctgttttttattttaattcccacattgggcacaagaatcagaatatggatagctagtttaagaaacttttgtgggtgcactgtagcatagatgacagaatattgatgttccccccatctccaattcagttcagggcattccacagttaaacagaaatgggaacgtggggctcttataaatgaaatgggcgctcacagttttggttttcagctcttcatgtctgtaagtgtgctttgggggaggctatgtctgtatggtcgattctcagttatcacatttgcctctcctcccactaccttcatgaacattcagtgctgtttcgcactgcagttagagagaagggacggacagttggtgacactcagccacattgctacttttatctgttctggtaagaagttagatagatggtagattgaagcaattgggtagaattagttgggggaatatttatgagttgctgtgtttgttgattagttccatctctttcccattttaactgagaattgattatatatagctctaagtatataggtatttaaacaaccccacaagcggctgtatcagtaacatttattaattccactatagtgagggaggatttccattctaaataccttattttgagggatttataaaacttagttgtaaaagagaaagcccacatagtgggaataaattgcttcagccatttttagtatttgagagcactagggaagatgtttagtagctgtgtggatgccttttttcacaccctgtctattgaatgctgcatccattcacgaagttaaatgttacatgcagttagtccttaatgtggactggatctgtacttttgttttggattaaaacatttaaagatttttgaagtgcagctactccccacgtgcatttgatacacataaaagtcatactgtgtgtgcacaaagagtacatggattttccagcatattgctttaaaaaattatataaactgttaaaatattaacacctcaggctacctgctgtattctgtcccattgacccctggaattggatttactgcaagtgattgataattcaattatgtggcttttcccctttaatcttgccatttaaattacagtagaaagacaaaatcaagtaaaataaagtgttagataatagaaagagtgttaagaccagcccacttttctcatgtttatgttctttcatttggaccaagaatctccgcatggaggttgatttgccactggggactttggctaagactattaggtttgctttcaactagatgttcctgagacaagcagagggacactgcaattccccttccatgcctgctgttctcccccatgtaagtcttctttgaaattaacggatgtgtctcctttggaacagccccataacaaaagagaactactgatctgagcataggaaagtagaggctctaccacttttcagttgaaaaagcaagactttctctgtgtttctgaaacaaggcataatgttgtcacagaatcagagatccagtctcacttttccacaaatctccaaatctccagtcttatcttgtgtgctctaatggtttggttcaatccctttccaactcttgttttcaaagcatggggcctgagtgttctccactcctcctaagaaaggagcttgggtggaagggaccatgctgacctcctccatcagagggctcttccagtagtattctcggatgcaacctccatttctcagttaccattatttcctgtatcagctttgtccttcctggagggatgcacagtgatccggcccaccactgttgttgtcttgtgcttctgctctttcctatggtttcaggttattttctgggtttcccctattcttcttttatttctttttttttttatatttgctttcctttctactgcttttagatttgcaggagatgcaagtttcagctcaatgtttggcttctctcaatatggaaatttcagaaggacagaggagaggagggaggaagaagaaagtatactcctccagaatttcagtgatctgttgtggcagtccagtggaaggaaggtcttttgaggtcacttagaagcatctttttgggacatccttttgggatctctgtaggctaggcatctcatatcttgagactcacccccagcctccaagcctctctccatttctctaacctatgcattttagagcgagaggaccgcctcactagtgtcaccatcctgccttttctaaaacatgcaggctcacacattctactcctgcttaatgtctgtgttaaacgttttctaaccatttttgttttatttttctgaaaaagttaacccctcccaactcctcacacattggctcttcctcttgagccacaaagttttgattcttgcgatgtatgtgccttattttatgttaatcttgtcaatgagagggaccagttggtgttgcccaatcagcactccaaggctgtgtgtgcaccagccagagagcgcacggtggtagcagagtcgaggctgtcttgtatcctggtttcatgtgttgttttgaactgataggaggatgttctcttctgacaagttacccttgtgtatcctgcagacatgtaaaataaaatacaagttcatttttttcaccttttttagatttttttaaaaaataaaatgtgtaatcctttttttaaaagaaacacatgtaaatacatttaagtattgtaggcatagcgttcagatgtgactggcccaggcgttcctcggacaagcctgcattccccgtgatcacgcccacctcaagcccaggggctgcagcccagccacagatgaactctacctttgctttcagaaccacttagtccttttgtaacaaagaaaaaaaaatgtttcttacaatgtcaataaaaaattctttgtatggaa

SEQ ID NO: 12119 - DNA, 653 bp, Homo sapiens
  source 1..653: mol_type = unassigned DNA
tgcggttctcttgctcgctttctgttctcttgcttactttcaaatgcagacgtgcactacagcgtcaccagggcatttttggtcgaagagagctgaagtaatgagaagacatcatggaggcccagtcccacagctccacgaccactgaaaagaaaaaagttgagaattccatagtgaagtgctccactcgaacagatgtgagcgagaaagccgttgcctccagcaccacttctaatgaggatgaaagtcctggacagacttatcacagagagagaagaaacgcaatcactatgcagccacagaatgtccaggggctcagcaaagtcagtgaggaaccttcaacatcgagtgacgagagggcctcattgatcaagaaagagatccatgggtccctgccacacgtggcggagccctctgtgccgtaccgcgggacggtgtttgccatggaccccaggaatggttacatggagccccactaccaccctcctcatcttttccctgccttccatcctcctgtaccaattgatgccagacatcatgagggccgttaccattacgatccatctccgattcctccattgcatatgacttccgccttatctagtagccctacgtatccggacctgcccttcattaggatctccccacaccgg

SEQ ID NO: 12120 - DNA, 1341 bp, Homo sapiens
  source 1..1341: mol_type = unassigned DNA
ggccggacacttccgtccggcgcgcggcgtcctcctcccgctcggaaggtcccaggtgtgacaccttcagcaggtctcagggaagatggcagccctaggggacattcaggagtccccttctgtcccgtcccctgtcagtctctcatcaccagggacacctggaacccagcaccacgagcctcagcttcacctccatgggcatcaacatggctcccctggctccagccctaaggtgctctcccagccgtccgacctggatctccaagacgtagaggaagtggagatcggcagagacaccttctggcccgactccgagcccaagccggagcaggctccacgctctcctggctctcaggcccctgacgagggggcgggcggggcgctgcgcagcctcctgaggagccttccccgcagggcccggtgcagcgccggcttcgggcctgaatccagcgcggagcggccggcgggccagccgcctggggccgtcccttgcgcccagccgcggggcgcctggcgcgtgacgctcgtgcagcaagcagcggccgggcccgagggtgcgcccgagcgggctgccgagctgggagtcaacttcggtcggagccggcagggcagcgcgcggggggccaagccgcacaggtgcgaggcctgcggcaagagtttcaagtataactcgctgctcctgaagcaccagcgcatccacacgggcgagaagccctacgcctgccacgagtgcggcaagcgcttccgcggctggtcgggcttcatccagcaccaccgcatccacacgggcgagaagccctacgagtgcggccagtgcggccgcgccttcagccacagctcgcacttcacgcagcacctgcgcatccacaacggcgagaagccctacaagtgcggcgagtgcggccaggccttcagccagagctccaacctggtgcgccaccagcggctgcacacgggtgagaagccctacgcctgcagccagtgcggcaaggccttcatctggagctccgtgctcatcgagcaccagcgcatccacactggcgagaagccctacgagtgctccgactgcggcaaagccttccgcggccgctcgcacttcttccggcacctgcggacccacacgggcgagaagcccttcgcgtgtggcgcctgcggcaaggccttcggccagagctcccagctcatccagcaccagcgggtgcactaccgcgagtagccgggcgggggctcggggctcggcctcctacctgcccccaacccaccctccaccccgtcccccacggtgggcactgcccagcaccgcatgccacgtgtccggaataaattctttttgattgttgg

SEQ ID NO: 12121 - DNA, 1297 bp, Homo sapiens
  source 1..1297: mol_type = unassigned DNA
aggtcccaggtgtgacaccttcagcaggtctcagggaagatggcagccctaggggacattcaggagtccccttctgtcccgtcccctgtcagtctctcatcaccagggacacctggaacccagcaccacgagcctcagcttcacctccatgggcatcaacatggctcccctggctccagccctaaggtgctctcccagccgtccgacctggatctccaagacgtagaggaagtggagatcggcagagacaccttctggcccgactccgagcccaagccggagcaggctccacgctctcctggctctcaggcccctgacgagggggcgggcggggcgctgcgcagcctcctgaggagccttccccgcagggcccggtgcagcgccggcttcgggcctgaatccagcgcggagcggccggcgggccagccgcctggggccgtcccttgcgcccagccgcggggcgcctggcgcgtgacgctcgtgcagcaagcagcggccgggcccgagggtgcgcccgagcgggctgccgagctgggagtcaacttcggtcggagccggcagggcagcgcgcggggggccaagccgcacaggtgcgaggcctgcggcaagagtttcaagtataactcgctgctcctgaagcaccagcgcatccacacgggcgagaagccctacgcctgccacgagtgcggcaagcgcttccgcggctggtcgggcttcatccagcaccaccgcatccacacgggcgagaagccctacgagtgcggccagtgcggccgcgccttcagccacagctcgcacttcacgcagcacctgcgcatccacaacggcgagaagccctacaagtgcggcgagtgcggccaggccttcagccagagctccaacctggtgcgccaccagcggctgcacacgggtgagaagccctacgcctgcagccagtgcggcaaggccttcatctggagctccgtgctcatcgagcaccagcgcatccacactggcgagaagccctacgagtgctccgactgcggcaaagccttccgcggccgctcgcacttcttccggcacctgcggacccacacgggcgagaagcccttcgcgtgtggcgcctgcggcaaggccttcggccagagctcccagctcatccagcaccagcgggtgcactaccgcgagtagccgggcgggggctcggggctcggcctcctacctgcccccaacccaccctccaccccgtcccccacggtgggcactgcccagcaccgcatgccacgtgtccggaataaattctttttgattgttggaa

SEQ ID NO: 12122 - DNA, 5877 bp, Homo sapiens
  source 1..5877: mol_type = unassigned DNA
agaacacaaagtgagctgcacaccatatatggagaaacccgtttcttaaaactagtgatgaactcatgctctgttctgttttctcaaagctgaagtcggctaggtttgcaaagctgtgggctgagcactcaggcaatcacactctcagaaactgcggcggctctggactgcagcctcccaaggctccatgccagacaaagcatgcgtgtcacacttgctacaatagcctggatggtttcttttgtctccaattattcacacacagcaaatattttgccagatatcgaaaatgaagatttcatcaaagactgcgttcgaatccataacaagttccgatcagaggtgaaaccaacagccagtgatatgctatacatgacttgggacccagcactagcccaaattgcaaaagcatgggccagcaattgccagttttcacataatacacggctgaagccaccccacaagctgcacccaaacttcacttcactgggagagaacatctggactgggtctgtgcccattttttctgtgtcttccgccatcacaaactggtatgacgaaatccaggactatgacttcaagactcggatatgcaaaaaagtctgtggccactacactcaggttgtttgggcagatagttacaaagttggctgcgcagttcaattttgccctaaagtttctggctttgacgctctttccaatggagcacattttatatgcaactacggaccaggagggaattacccaacttggccatataagagaggagccacctgcagtgcctgccccaataatgacaagtgtttggacaatctctgtgttaaccgacagcgagaccaagtcaaacgttactactctgttgtatatccaggctggcccatatatccacgtaacagatacacttctctctttctcattgttaattcagtaattctaatactgtctgttataattaccattttggtacagcacaagtaccctaatttagttcttttggactaatacaattcaggaaagaaaaaacccaaaaaccaacctcattcacatatggctttttttttaaccaataacaattaggtgtacttctattttaaaacatttcagaaaaaaatatatgttatagcaatactcttactcaaaagaagaaatttcctaactctatcagataaactcatctttagtataaataagcattatttgcaggttgccacaggtggacttttagtaagtaacctaacccatgtttcagcttctaaatctgcaaaatgagcaaggtacagtagcacatttttaggtgattcttagtaactccagtagccttcattagttaaaaacattattattttttgcatgctgcttcgactctaaatatctggttttccctgtctttttggtttactacttccccagattcagaacagaggagtaactaggggatctgattttagaggccttaattttctgttcatggactgttaaaagtaaaaccaaactttcaaaagggataaacctaaatatttacttgttatcattagagagggaacatcaaatgctgggacatcattactaaccaatagcatcagacactggatttaatggataatcacaatggtcgtaatgtatacaaagacttatataccactttctcgtataaatttttcaaaaaatacaataataatataatttataaagaacactcttctatgaacaaccaccaccaccaaaaaaaaaaaaagccctcagaaaatttctcacaaataaggcaactaatgcctgatatctcaaaatcctttacaaaaggagatagttctagtcaaggagttttgggtatgttacttttttttcttctttttcttttcatctgcctccatcttaagtgcaatttcttcagctgtaagagctcccagtttcttattctttgctttcttaaccttttccttgatgctggccacatcaattttagtttcagtagaagctagacaaattaaaagcacaacacatgtaatactttagattttaccaagtaaaacaaagaatatatgtttaacaaagaatatatgtttaaggcagttaacttcagagtattcttataattgaataattgaaaggtgatcacagtataaaatataaaaacacttgcctaaagcagttagaaatttcttcagattaagataaaacaaatcataaaatactttatatattagtacaagtatacataaaaatggcataaatggcataattgaaccaattactggattcaactatattaagactatttccttaaatcctacttcagactaaattattttacctacattcttttccatattttggaacttctgagtcattattttccatcttgcacattaaaataatttaaaattacatgtatcccttctcaataagtttaatcagctaaccctaagctagaggtcaaaatctacttcctctaatatcaaaacgaaaatttaaagttttccaaatattaattcaatattaattgaatattcaatgaattaattcatttaatgttagattaattcattgaatattaattcaatgaatgactaattaatagtattttaacaagattttggtatatttaacaacattttggtaataaagacaataatttgagagtgtgtggaagtccccctaatagaagccaactatctaatcaatgccaaaagtgtgaacaaaatagagaaaggaagcagtgaaaaagaatgcaactttttcttaccattcaaagtacaggatcacagcataaaagaatcataagataaaacatcaaactacccagcaacctgagaagcacagagtgttaaagcctccaccgtgtggagaaactaaattagggtaactagctattgagtatattgagtaccttcaaagcactcaactgacaggttttacagactggaaattataatacttatgacatttctaccttttatataaccaataatctaccatagaatgtagtatttttaaagctattaacaagcaatatattaaaataataatgtattatatctgtttctgacccagtctatgtacaatattgctggtgagccctctcccttcagtgtgtcactgttcactttggagggttactttaggaagaggataagtgttaccacaggggaaaaaaatgcagaagaggatgcatcagaagaaatggcatgacaatgttttctcttagtgtcttttaaatactaggttagtgcgaaagtgatttctgccatttaaaaaccacaatcactttcgcactaatagctcctgaataagacctgtcagcatcctttagtctaaggtgatgagaaatccatgttaccgatatagaagccaaactctaagccaagatcacataaagagaagaaaaagtacaacttctgataattcctctttgagaggcatgacagcagagctcagggatcttcttgcatttctacagaagatgcactggctgccctgggtttgtatctttcacaacaaagagtcttttccaagcacagaccagaggtcaggagaggactgtcaatccagtttgcactgaaataggcattagctgcctctaaattataaattatctcagccatcccttgtccttaggattagtaattaatgaaatgctaagagaactgatgaaaagatacaactgtttcttaaaaagattcagacaaatttattatgggtttacttttcctaattaataaagacttttacatcatagaaagcattaccttccttaggtttcacaattggtttttccttaggtggaataaatgctttgtttctttcctcttgtctcttactgatggcttctgcttgtttagcctacattaataaataaaaaatatatcagttaaatgtatttatagttaaataattcaagtatctatgaactttgctattcatgtgagccagacataaagtgccgtacctttattgcttccattttctgccgcttcttctgatttgccttcaaaaagtattcaccactagccaattctttatcgatctgttgaaaacggtatttacaattacatcagaaataatgtagaggagaagtcatgtcctaagcaagtcacaatatccttagggtaaaaacaatggggtcaaactgatttattaataaaaatggtagtgacataaaggaaacagagtctaagctgaggggaatacatacacaaaagtgtggaggtaggaaagcacctccatggaatacaacccagagtagttcagggatatggcatggaaggtcactgattcagaaaagtgtgagaagaaactggagagagagttttggggaaaatttgaagaagcttcaatggcagacaaagtaggagggataagatttagaaatgactgtaggtttctgagaagactgtaaagaccaaagaataattttaatggagaggaatgaagaatagatgagagcctggaataaaggtagtggcatgcagaataaaagccagaactatcaggaattggtgactaattagcaaaagcaacagcttgttcattcaatatacagccaacatgtaaaatgtgtataactgacctgtctcccacttacatagcattattatatctaaggcactgttctaagctctttataattactcatttaatcctcactaacaattctttaagataggtattaccattactcccactttaggtatggggaaacttaagtatggatgggataaataactcgcccagtcacataatgaattaagtgttaagaacaagtcaatcgagacatcactgtttcaagaagcttacacagctacagaagaaagataagtcaattactacaagaaagggccataagaaataaggcaggtgttatggaagcatggtttaatgactgcatcactccactttccccctaactactatcaatttcctccatgatccaaaacttccattgttttttcactatgatcatcattttccccgtcaatcacaaatcttccctgaaagactccaaccatggttgtggaaaaaagagatgtagaaagcaatgagttcacatgctgagcagaagtagaaagggaaggctttaggatatagccaaggaagggaataatgaagcaagaacccccaggagacaggtgaagatggaattcaaagaacacatagaagaggctgatgcaggtggaagaaaacccatacgtgagagaagaggaaacagaaaggggttcttatctggtggtctcaaatatttcaataaaatgcaatgtcatatgctaaacatgggagggcactgagagaattaagaggaaacatgaattttgaatgaaattaatccaaagataaaactttctctaacttaatttggtagccacgttgcaaggaagaagtcaagtttttagactgatccaagttttagagctttgctgagaaggtgggacagaagtaaaaaggggcatgaatcaaaacaatgatgtgcaagaacaaaatggaaactggtcatggtgggaaaggaaatgaagcagaagacacctgacaaaaggaatcataacttagaaaaacggtgggtgttacaatttacaatttaagatttcagaacaagaacaaccatagagcacacagtcacaataatgttgccaaatcagagaaaagagtattgcagactaaacgaacttttatccatggaacatttacagtggctacagggtcacaaacctcctggatgcagtttataatcaatgtgaacgccccactgcacacccccatgcactcagctcaaaatatgcctatttatatttaccctcagtttcttatagctctgcacacacacacacaatatatatatatacacatatcccacctgaaatactttcaataaagtttctgaccaaa

SEQ ID NO: 12123 - DNA, 758 bp, Homo sapiens
  source 1..758: mol_type = unassigned DNA
gagcgatttcctgacaggtcctggcagatgaggggaaggaaggagggggaggagccctctgtgacagttgtcccagaaagggcataaacaggatgtggtgttggatgaaaccttcctcctactgcacagcccgcccccctacagccccggtccccacgcctagaagacagcggaactaagaaaagaagaggcctgtggacagaacaatcatgtctgactccctggtggtgtgcgaggtagacccagagctaacagaaaagctgaggaaattccgcttccgaaaagagacagacaatgcagccatcataatgaaggtggacaaagaccggcagatggtggtgctggaggaagaatttcagaacatttccccagaggagctcaaaatggagttgccggagagacagcccaggttcgtggtttacagctacaagtacgtgcatgacgatggccgagtgtcctaccctttgtgtttcatcttctccagccctgtgggctgcaagccggaacaacagatgatgtatgcagggagtaaaaacaggctggtgcagacagcagagctcacaaaggtgttcgaaatccgcaccactgatgacctcactgaggcctggctccaagaaaagttgtctttctttcgttgatctctgggctggggactgaattcctgatgtctgagtcctcaaggtgactggggacttggaacccctaggacctgaacaaccaagactttaaataaattttaaaatgcaaaaactcggaga

SEQ ID NO: 12124 - DNA, 646 bp, Homo sapiens
  source 1..646: mol_type = unassigned DNA
gttggatgaaaccttcctcctactgcacagcccgcccccctacagccccggtccccacgcctagaagacagcggaactaagaaaagaagaggcctgtggacagaacaatcatgtctgactccctggtggtgtgcgaggtagacccagagctaacagaaaagctgaggaaattccgcttccgaaaagagacagacaatgcagccatcataatgaaggtggacaaagaccggcagatggtggtgctggaggaagaatttcagaacatttccccagaggagctcaaaatggagttgccggagagacagcccaggttcgtggtttacagctacaagtacgtgcatgacgatggccgagtgtcctaccctttgtgtttcatcttctccagccctgtgggctgcaagccggaacaacagatgatgtatgcagggagtaaaaacaggctggtgcagacagcagagctcacaaaggtgttcgaaatccgcaccactgatgacctcactgaggcctggctccaagaaaagttgtctttctttcgttgatctctgggctggggactgaattcctgatgtctgagtcctcaaggtgactggggacttggaacccctaggacctgaacaaccaagactttaaataaattttaaaatgc

SEQ ID NO: 12125 - DNA, 3081 bp, Homo sapiens
  source 1..3081: mol_type = unassigned DNA
agtctagcccactccttcataaagccctcgcatcccaggagcgagcagagccagagcaggatggagaggagacgcatcacctccgctgctcgccgctcctacgtctcctcaggggagatgatggtggggggcctggctcctggccgccgtctgggtcctggcacccgcctctccctggctcgaatgccccctccactcccgacccgggtggatttctccctggctggggcactcaatgctggcttcaaggagacccgggccagtgagcgggcagagatgatggagctcaatgaccgctttgccagctacatcgagaaggttcgcttcctggaacagcaaaacaaggcgctggctgctgagctgaaccagctgcgggccaaggagcccaccaagctggcagacgtctaccaggctgagctgcgagagctgcggctgcggctcgatcaactcaccgccaacagcgcccggctggaggttgagagggacaatctggcacaggacctggccactgtgaggcagaagctccaggatgaaaccaacctgaggctggaagccgagaacaacctggctgcctatagacaggaagcagatgaagccaccctggcccgtctggatctggagaggaagattgagtcgctggaggaggagatccggttcttgaggaagatccacgaggaggaggttcgggaactccaggagcagctggcccgacagcaggtccatgtggagcttgacgtggccaagccagacctcaccgcagccctgaaagagatccgcacgcagtatgaggcaatggcgtccagcaacatgcatgaagccgaagagtggtaccgctccaagtttgcagacctgacagacgctgctgcccgcaacgcggagctgctccgccaggccaagcacgaagccaacgactaccggcgccagttgcagtccttgacctgcgacctggagtctctgcgcggcacgaacgagtccctggagaggcagatgcgcgagcaggaggagcggcacgtgcgggaggcggccagttatcaggaggcgctggcgcggctggaggaagaggggcagagcctcaaggacgagatggcccgccacttgcaggagtaccaggacctgctcaatgtcaagctggccctggacatcgagatcgccacctacaggaagctgctagagggcgaggagaaccggatcaccattcccgtgcagaccttctccaacctgcagattcgagaaaccagcctggacaccaagtctgtgtcagaaggccacctcaagaggaacatcgtggtgaagaccgtggagatgcgggatggagaggtcattaaggagtccaagcaggagcacaaggatgtgatgtgaggcaggacccacctggtggcctctgccccgtctcatgaggggcccgagcagaagcaggatagttgctccgcctctgctggcacatttccccagacctgagctccccaccaccccagctgctcccctccctcctctgtccctaggtcagcttgctgccctaggctccgtcagtatcaggcctgccagacggcacccacccagcacccagcaactccaactaacaagaaactcacccccaaggggcagtctggaggggcatggccagcagcttgcgttagaatgaggaggaaggagagaaggggaggagggcggggggcacctactacatcgccctccacatccctgattcctgttgttatggaaactgttgccagagatggaggttctctcggagtatctgggaactgtgcctttgagtttcctcaggctgctggaggaaaactgagactcagacaggaaagggaaggccccacagacaaggtagccctggccagaggcttgttttgtcttttggtttttatgaggtgggatatccctatgctgcctaggctgaccttgaactcctgggctcaagcagtctacccacctcagcctcctgtgtagctgggattatagattggagccaccatgcccagctcagagggttgttctcctagactgaccctgatcagtctaagatgggtggggacgtcctgccacctggggcagtcacctgcccagatcccagaaggacctcctgagcgatgactcaagtgtctcagtccacctgagctgccatccagggatgccatctgtgggcacgctgtgggcaggtgggagcttgattctcagcacttgggggatctgttgtgtacgtggagagggatgaggtgctgggagggatagaggggggctgcctggcccccagctgtgggtacagagaggtcaagcccaggaggactgccccgtgcagactggaggggacgctggtagagatggaggaggaggcaattgggatggcgctaggcatacaagtaggggttgtgggtgaccagttgcacttggcctctggattgtgggaattaaggaagtgactcatcctcttgaagatgctgaaacaggagagaaaggggatgtatccatgggggcagggcatgactttgtcccatttctaaaggcctcttccttgctgtgtcataccaggccgccccagcctctgagcccctgggactgctgcttcttaaccccagtaagccactgccacacgtctgaccctctccaccccatagtgaccggctgcttttccctaagccaagggcctcttgcggtcccttcttactcacacacaaaatgtacccagtattctaggtagtgccctattttacaattgtaaaactgaggcacgagcaaagtgaagacactggctcatattcctgcagcctggaggccgggtgctcagggctgacacgtccaccccagtgcacccactctgctttgactgagcagactggtgagcagactggtgggatctgtgcccagagatgggactgggagggcccacttcagggttctcctctcccctctaaggccgaagaagggtccttccctctccccaagacttggtgtcctttccctccactccttcctgccacctgctgctgctgctgctgctaatcttcagggcactgctgctgcctttagtcgctgaggaaaaataaagacaaatgctgcgcccttccccag

SEQ ID NO: 12126 - DNA, 1013 bp, Homo sapiens
  source 1..1013: mol_type = unassigned DNA
agagccagagcaggatggagaggagacgcatcacctccgctgctcgccgctcctacgtctcctcaggggagatgatggtggggggcctggctcctggccgccgtctgggtcctggcacccgcctctccctggctcgaatgccccctccactcccgacccgggtggatttctccctggctggggcactcaatgctggcttcaaggagacccgggccagtgagcgggcagagatgatggagctcaatgaccgctttgccagctacatcgagaaggttcgcttcctggaacagcaaaacaaggcgctggctgctgagctgaaccagctgcgggccaaggagcccaccaagctggcagacgtctaccaggctgagctgcgagagctgcggctgcggctcgatcaactcaccgccaacagcgcccggctggaggttgagagggacaatctggcacaggacctggccactgtgaggcagaagaagcagatgaagccaccctggcccgtctggatctggagaggaagattgagtcgctggaggaggagatccggttcttgaggaagatccacgaggaggaggttcgggaactccaggagcagctggcccgacagcaggtccatgtggagcttgacgtggccaagccagacctcaccgcagccctgaaagagatccgcacgcagtatgaggcaatggcgtccagcaacatgcatgaagccgaagagtggtaccgctccaagtttgcagacctgacagacgctgctgcccgcaacgcggagctgctccgccaggccaagcacgaagccaacgactaccggcgccagttgcagtccttgacctgcgacctggagtctctgcgcggcacgaacgagtccctggagaggcagatgcgcgagcaggaggagcggcacgtgcgggaggcggccagttatcaggaggcgctggcgcggctggaggaagaggggcagagcctcaaggacgagatggcccgccacttgcaggagtaccaggacctgctca

SEQ ID NO: 12127 - DNA, 2946 bp, Homo sapiens
  source 1..2946: mol_type = unassigned DNA
atggagaggagacgcatcacctccgctacccgcctctccctggctcgaatgccccctccactcccgacccgggtggatttctccctggctggggcactcaatgctggcttcaaggagacccgggccagtgagcgggcagagatgatggagctcaatgaccgctttgccagctacatcgagaaggttcgcttcctggaacagcaaaacaaggcgctggctgctgagctgaaccagctgcgggccaaggagcccaccaagctggcagacgtctaccaggctgagctgcgagagctgcggctgcggctcgatcaactcaccgccaacagcgcccggctggaggttgagagggacaatctggcacaggacctggccactgtgaggcagaagctccaggatgaaaccaacctgaggctggaagccgagaacaacctggctgcctatagacaggaagcagatgaagccaccctggcccgtctggatctggagaggaagattgagtcgctggaggaggagatccggttcttgaggaagatccacgaggaggaggttcgggaactccaggagcagctggcccgacagcaggtccatgtggagcttgacgtggccaagccagacctcaccgcagccctgaaagagatccgcacgcagtatgaggcaatggcgtccagcaacatgcatgaagccgaagagtggtaccgctccaagtttgcagacctgacagacgctgctgcccgcaacgcggagctgctccgccaggccaagcacgaagccaacgactaccggcgccagttgcagtccttgacctgcgacctggagtctctgcgcggcacgaacgagtccctggagaggcagatgcgcgagcaggaggagcggcacgtgcgggaggcggccagttatcaggaggcgctggcgcggctggaggaagaggggcagagcctcaaggacgagatggcccgccacttgcaggagtaccaggacctgctcaatgtcaagctggccctggacatcgagatcgccacctacaggaagctgctagagggcgaggagaaccggatcaccattcccgtgcagaccttctccaacctgcagattcgagaaaccagcctggacaccaagtctgtgtcagaaggccacctcaagaggaacatcgtggtgaagaccgtggagatgcgggatggagaggtcattaaggagtccaagcaggagcacaaggatgtgatgtgaggcaggacccacctggtggcctctgccccgtctcatgaggggcccgagcagaagcaggatagttgctccgcctctgctggcacatttccccagacctgagctccccaccaccccagctgctcccctccctcctctgtccctaggtcagcttgctgccctaggctccgtcagtatcaggcctgccagacggcacccacccagcacccagcaactccaactaacaagaaactcacccccaaggggcagtctggaggggcatggccagcagcttgcgttagaatgaggaggaaggagagaaggggaggagggcggggggcacctactacatcgccctccacatccctgattcctgttgttatggaaactgttgccagagatggaggttctctcggagtatctgggaactgtgcctttgagtttcctcaggctgctggaggaaaactgagactcagacaggaaagggaaggccccacagacaaggtagccctggccagaggcttgttttgtcttttggtttttatgaggtgggatatccctatgctgcctaggctgaccttgaactcctgggctcaagcagtctacccacctcagcctcctgtgtagctgggattatagattggagccaccatgcccagctcagagggttgttctcctagactgaccctgatcagtctaagatgggtggggacgtcctgccacctggggcagtcacctgcccagatcccagaaggacctcctgagcgatgactcaagtgtctcagtccacctgagctgccatccagggatgccatctgtgggcacgctgtgggcaggtgggagcttgattctcagcacttgggggatctgttgtgtacgtggagagggatgaggtgctgggagggatagaggggggctgcctggcccccagctgtgggtacagagaggtcaagcccaggaggactgccccgtgcagactggaggggacgctggtagagatggaggaggaggcaattgggatggcgctaggcatacaagtaggggttgtgggtgaccagttgcacttggcctctggattgtgggaattaaggaagtgactcatcctcttgaagatgctgaaacaggagagaaaggggatgtatccatgggggcagggcatgactttgtcccatttctaaaggcctcttccttgctgtgtcataccaggccgccccagcctctgagcccctgggactgctgcttcttaaccccagtaagccactgccacacgtctgaccctctccaccccatagtgaccggctgcttttccctaagccaagggcctcttgcggtcccttcttactcacacacaaaatgtacccagtattctaggtagtgccctattttacaattgtaaaactgaggcacgagcaaagtgaagacactggctcatattcctgcagcctggaggccgggtgctcagggctgacacgtccaccccagtgcacccactctgctttgactgagcagactggtgagcagactggtgggatctgtgcccagagatgggactgggagggcccacttcagggttctcctctcccctctaaggccgaagaagggtccttccctctccccaagacttggtgtcctttccctccactccttcctgccacctgctgctgctgctgctgctaatcttcagggcactgctgctgcctttagtcgctgaggaaaaataaagacaaatgctgcgcccttccccag

SEQ ID NO: 12128 - DNA, 1817 bp, Homo sapiens
  source 1..1817: mol_type = unassigned DNA
agtctagcccactccttcataaagccctcgcatcccaggagcgagcagagccagagcaggatggagaggagacgcatcacctccgctgctcgccgctcctacgtctcctcaggggagatgatggtggggggcctggctcctggccgccgtctgggtcctggcacccgcctctccctggctcgaatgccccctccactcccgacccgggtggatttctccctggctggggcactcaatgctggcttcaaggagacccgggccagtgagcgggcagagatgatggagctcaatgaccgctttgccagctacatcgagaaggttcgcttcctggaacagcaaaacaaggcgctggctgctgagctgaaccagctgcgggccaaggagcccaccaagctggcagacgtctaccaggctgagctgcgagagctgcggctgcggctcgatcaactcaccgccaacagcgcccggctggaggttgagagggacaatctggcacaggacctggccactgtgaggcagaagctccaggatgaaaccaacctgaggctggaagccgagaacaacctggctgcctatagacaggaagcagatgaagccaccctggcccgtctggatctggagaggaagattgagtcgctggaggaggagatccggttcttgaggaagatccacgaggaggaggttcgggaactccaggagcagctggcccgacagcaggtccatgtggagcttgacgtggccaagccagacctcaccgcagccctgaaagagatccgcacgcagtatgaggcaatggcgtccagcaacatgcatgaagccgaagagtggtaccgctccaagtttgcagacctgacagacgctgctgcccgcaacgcggagctgctccgccaggccaagcacgaagccaacgactaccggcgccagttgcagtccttgacctgcgacctggagtctctgcgcggcacgaacgagtccctggagaggcagatgcgcgagcaggaggagcggcacgtgcgggaggcggccagttatcaggaggcgctggcgcggctggaggaagaggggcagagcctcaaggacgagatggcccgccacttgcaggagtaccaggacctgctcaatgtcaagctggccctggacatcgagatcgccacctacaggaagctgctagagggcgaggagaaccggatcaccattcccgtgcagaccttctccaacctgcagattcgagggggcaaaagcaccaaagacggggaaaatcacaaggtcacaagatatctcaaaagcctcacaatacgagttataccaatacaggctcaccagattgtaaatggaacgccgccggctcgcggttagctgcctgcctctcagacacggcgctttgcccagcttgacagggagtgagcctcacccaccccatcctcccaatccccctgagttccctcttcccaggcttcccctaaagggcctggactgcgtcattttcccaggaactgcagtgcccagcccaggacgtggtacagagtaactgtacattaaactggcagagcttgttagtggtaaaggtggtgagtccttgggtgcgcagtggagctgctctggggcctctgagcaagcagcagcctctgtctcacctcttcctgtcactgggagggccccttgggtctcgctgtgcctggacgccaggctctctgctttattctttcatccctgaggctccatcgctcagctcagtgctgactcagttcagaggattcttccctcaggaccgcagctcttgcagtgaataaagttttatgttccctgctcttaatgtt

SEQ ID NO: 12129 - DNA, 1445 bp, Homo sapiens
  source 1..1445: mol_type = unassigned DNA
agagcaggatggagaggagacgcatcacctccgctgctcgccgctcctacgtctcctcaggggagatgatggtggggggcctggctcctggccgccgtctgggtcctggcacccgcctctccctggctcgaatgccccctccactcccgacccgggtggatttctccctggctggggcactcaatgctggcttcaaggagacccgggccagtgagcgggcagagatgatggagctcaatgaccgctttgccagctacatcgagaaggttcgcttcctggaacagcaaaacaaggcgctggctgctgagctgaaccagctgcgggccaaggagcccaccaagctggcagacgtctaccaggctgagctgcgagagctgcggctgcggctcgatcaactcaccgccaacagcgcccggctggaggttgagagggacaatctggcacaggacctggccactgtgaggcagaagctccaggatgaaaccaacctgaggctggaagccgagaacaacctggctgcctatagacaggaagcagatgaagccaccctggcccgtctggatctggagaggaagattgagtcgctggaggaggagatccggttcttgaggaagatccacgaggaggaggttcgggaactccaggagcagctggcccgacagcaggtccatgtggagcttgacgtggccaagccagacctcaccgcagccctgaaagagatccgcacgcagtatgaggcaatggcgtccagcaacatgcatgaagccgaagagtggtaccgctccaagtttgcagacctgacagacgctgctgcccgcaacgcggagctgctccgccaggccaagcacgaagccaacgactaccggcgccagttgcagtccttgacctgcgacctggagtctctgcgcggcacgaacgagtccctggagaggcagatgcgcgagcaggaggagcggcacgtgcgggaggcggccagttatcaggaggcgctggcgcggctggaggaagaggggcagagcctcaaggacgagatggcccgccacttgcaggagtaccaggacctgctcaatgtcaagctggccctggacatcgagatcgccacctacaggaagctgctagagggcgaggagaaccggatcaccattcccgtgcagaccttctccaacctgcagattcgaggtcagtacagcagggcctcgtgggaagggcactggagtcctgccccctcctccagggcctgtaggttgctccagactgggactgaggatcagggcaaagggatccagctctccctgggggccttcgtgacactgcagcgctcctagccagagcctatcataccagggtacttctaggtggggcttgcagctgcccctgtcctgctaggccctggtccctcttcccctccctgcaccccattcgacagcagaactgggtgagagctt

SEQ ID NO: 12130 - DNA, 1999 bp, Homo sapiens
  source 1..1999: mol_type = unassigned DNA
gggcggtgggagccgaggcgccgagcaagatggcggcgcgagtgctgcgcgcccgcggagcggcctgggccggcggcctcctgcagcgggcggccccctgcagcctcctgcccaggctccggacatggacatcttccagcaacagatctcgagaagacagctggctaaaatccttatttgtccggaaagttgatccaagaaaagatgcccactccaatctcctagccaaaaaggaaacaagcaatctatacaaattacagtttcacaatgttaaaccggaatgcctagaagcatacaacaaaatttgtcaagaggtgttgccaaagattcacgaagataaacactacccttgtactttggtggggacttggaacacgtggtatggcgagcaggaccaagctgtccacctctggaggtatgaaggaggctatccagccctcacagaagtcatgaataaactcagagaaaataaggaatttttggaatttcgtaaggcaagaagtgacatgcttctctccaggaagaatcagctcctgttggagttcagtttctggaatgagcctgtgccaagatccggacctaatatatatgaactcaggtcttaccaactccgaccaggaaccatgattgaatggggcaattactgggctcgtgcaatccgcttcagacaggatggtaacgaagccgtcggaggattcttctctcagattgggcagctgtacatggtgcaccatctttgggcttacagggatcttcagaccagggaagacatacggaatgcagcatggcacaaacatggctgggaggaattggtatattacacagttccacttattcaggaaatggaatccagaatcatgatcccactgaagacctcgcccctccagtaaagctgtagagtttctatgtgcctacatacatttctgtgacaagtatttgtcgtaaattaattttaattgtgtatcaagtgaaaaagaaacactgaggttttaagctgctgtatatagcttgtgagaaacctcttttctttaaaatttacataatcacaagaaaggaaagaattacagttggactgattgtgacagtgccttgtcgtcctctttgaaacaccccgtgttgtccagtataccttataacactgagccacttctccccaccctccagaaggggtccacgttgaattctgaatcatcttgaaaataagattccaaccacaaaaaaaatttagccatttctttactaaaaaaaaccaaaaaacaaatctgttttataatcacagatttttagacaaatttcttgtatcaggaagaaatacaaattttgtcatgtttctcaagcagtttttctgagtagtttctgaggaggaacaaattacaagtgtacccaataactgaaaatgttttaactcactctcatttgtaagcagtccacatagtagacaatgggttttccaagctgggcaaggtacatttaatcagtaaatcagtttcacatcatgtattgtgatgtttcaatgtgagacacaaaaacaatggcttgaaacttgtgtatcatatgtgattttgaaatgaacaccttgaatagcactaatttttatttgtggtatttttctataacaaaacaagtagctctaggaaaagaggttttattttgtaaacgatcatttgtgacctcagacactctctggctaatattttaataagctcacagcagataattctgagatcatgggtgaggggtggtgcatgttgagatttaaattggcataaagctgcatactttttgtctagctgtttgatttcattttttaatatagtatgccaattttgtgactgttaccatgtgaaagtcctgttgaaatgaacaattgtctgccccacaatcaagaatgtatgtgtaaagtgtgaataaatctcatatcaaatgtcaaacttttacatgtgaatgattttctcaaagaacatagaaaagtcaataaaatcctcttaatttccacata

SEQ ID NO: 12131 - DNA, 1882 bp, Homo sapiens
  source 1..1882: mol_type = unassigned DNA
gggcggtgggagccgaggcgccgagcaagatggcggcgcgagtgctgcgcgcccgcggagcggcctgggccggcggcctcctgcagcgggcggccccctgcagcctcctgcccaggctccggacatggacatcttccagcaacagatctcgagaagacagctggctaaaatccttatttgtccggaaagttgatccaagaaaagatgcccactccaatctcctagccaaaaaggaaacaagcaatctatacaaattacagttcaagaggtgttgccaaagattcacgaagataaacactacccttgtactttggtggggacttggaacacgtggtatggcgagcaggaccaagctggaatttttggaatttcgtaaggcaagaagtgacatgcttctctccaggaagaatcagctcctgttggagttcagtttctggaatgagcctgtgccaagatccggacctaatatatatgaactcaggtcttaccaactccgaccaggaaccatgattgaatggggcaattactgggctcgtgcaatccgcttcagacaggatggtaacgaagccgtcggaggattcttctctcagattgggcagctgtacatggtgcaccatctttgggcttacagggatcttcagaccagggaagacatacggaatgcagcatggcacaaacatggctgggaggaattggtatattacacagttccacttattcaggaaatggaatccagaatcatgatcccactgaagacctcgcccctccagtaaagctgtagagtttctatgtgcctacatacatttctgtgacaagtatttgtcgtaaattaattttaattgtgtatcaagtgaaaaagaaacactgaggttttaagctgctgtatatagcttgtgagaaacctcttttctttaaaatttacataatcacaagaaaggaaagaattacagttggactgattgtgacagtgccttgtcgtcctctttgaaacaccccgtgttgtccagtataccttataacactgagccacttctccccaccctccagaaggggtccacgttgaattctgaatcatcttgaaaataagattccaaccacaaaaaaaatttagccatttctttactaaaaaaaaccaaaaaacaaatctgttttataatcacagatttttagacaaatttcttgtatcaggaagaaatacaaattttgtcatgtttctcaagcagtttttctgagtagtttctgaggaggaacaaattacaagtgtacccaataactgaaaatgttttaactcactctcatttgtaagcagtccacatagtagacaatgggttttccaagctgggcaaggtacatttaatcagtaaatcagtttcacatcatgtattgtgatgtttcaatgtgagacacaaaaacaatggcttgaaacttgtgtatcatatgtgattttgaaatgaacaccttgaatagcactaatttttatttgtggtatttttctataacaaaacaagtagctctaggaaaagaggttttattttgtaaacgatcatttgtgacctcagacactctctggctaatattttaataagctcacagcagataattctgagatcatgggtgaggggtggtgcatgttgagatttaaattggcataaagctgcatactttttgtctagctgtttgatttcattttttaatatagtatgccaattttgtgactgttaccatgtgaaagtcctgttgaaatgaacaattgtctgccccacaatcaagaatgtatgtgtaaagtgtgaataaatctcatatcaaatgtcaaacttttacatgtgaatgattttctcaaagaacatagaaaagtcaataaaatcctcttaatttccacata

SEQ ID NO: 12132 - DNA, 5739 bp, Homo sapiens
  source 1..5739: mol_type = unassigned DNA
gcgcggccagagcggccggggacaggctccgaggcaggcccgacccgcctccccggcgccgccgtggctcgacggagaccagctaggctggcccccaagaggaccctttccaagtccccagctgggggccctgtgtagacctggagtggacacgcccctccttcccttcatgattcgtttgtagcgcagtggcgatggatgatgaggatgggagatgcttactagacgtgatttgtgacccacaggccctcaatgacttcttgcatggatccgagaagcttgacagtgatgacctcctggataatcccggggaggcccaaagtgccttctatgaaggtcctgggctccatgtgcaagaagcttccggcaaccacctgaacccagagcccaaccagccggcccccagtgtggacctagacttcctggaagatgacatcctgggctctcctgcgacagggggcggcggcgggggcagtgggggcgctgaccagccctgtgacatcctccagcagagcctccaagaggccaacatcacggagcagacgctggaggccgaggctgagctggacctgggtcccttccagctgcccaccctgcagcctgcggatggcggggcaggcccgacgggcgctggaggggcagcggccgtggctgcggggccccaagccctcttcccaggcagcaccgacctgctggggctgcagggcccgcctaccgtgctgacccaccaggccctggtgccgccccaggacgtggtcaacaaggccctgagtgtgcagcccttcctgcagcctgtgggcctgggcaatgtgacactgcagcccatcccgggcctccaaggcctgcccaatggcagccctgggggtgccacggcggccacactgggcctggcgcccatccaggtggtgggccagcccgtcatggcgctcaacacgcccacctcccagctcctggccaagcaggtgcccgtcagcggctacctggcctcggcggctggcccctcggagcccgtgacgctggcgtcggccggtgtctcgccacagggggctggcctggtcatccagaagaacctctcggccgctgtggccaccacgctcaatgggaactctgtgttcggaggcgcgggggccgcctcggctcccaccgggacgccctcgggacagccgctggcggtggccccaggcctcggctcgtcgccactggtcccggcgcccaacgtgatcctgcatcgcacacccacgcccatccagcccaagcccgcgggggtgctgccgcccaagctctaccagctgacgcccaagccgtttgcgcccgcgggcgccacgctcaccatccagggcgagccgggggcgctcccgcagcagcccaaggccccgcagaacctgacgttcatggcggcggggaaggcgggccagaacgtggtgctgtcgggcttccccgcgcctgcgctgcaagcgaacgtcttcaagcagccaccggccaccaccaccggagcggccccgccgcagccccccggggccctgagcaaacccatgagcgtccacctcctgaaccaaggcagcagcatcgtcatccccgcccagcacatgctgccgggccagaaccagttcctactgcctggcgccccggcggtccagctcccgcagcagctctcagccctgccggccaacgtgggcgggcagatcctggcggccgctgccccccacacaggtggacagctcatcgcgaaccccatcctcacaaaccagaacctggcgggcccactgagcctgggccccgtgttggccccccactccggggcccacagcgcgcacatcctctccgccgctcccatccaggtgggccagcctgcgctcttccagatgcccgtgtcgctggcggcgggcagcctgcccacgcagagccagccagcgcccgccgggccggccgccaccactgtcctccagggggtcaccctgccccccagcgccgtggccatgctcaacacccccgacggcctggtgcagccggccacccctgccgctgccaccggggaggccgcgcctgtcctcacggtgcagcctgccccccaggcgccccccgcggtcagcacacccctgcccctgggcctccagcagccgcaggcgcagcagcccccgcaggcccccaccccacaggccgccgccccgcctcaggccaccaccccccagcccagccctggcctggcgtctagcccggagaagatcgtcctggggcagccgccctctgccacccccacggccatcctcactcaggactccctgcagatgttcctgccccaggagaggagccagcagcccctctccgcagagggcccccacctctccgtgcctgcctcggtcatagtcagcgccccgcctcccgcccaagacccagccccagccacccccgtcgccaaaggagctggcctcggccctcaggcccccgacagccaggcttccccggctccggccccccagatcccggcagcggctccgctgaagggcccaggcccctcttcgtccccgtcactacctcaccaggcccctctgggggacagcccccacctgccctccccacaccccacccggcccccttcccgcccaccctcccggccacagagtgtgtcccgccctccctcagagccacccttgcacccttgccccccaccccaggcccccccaactctgcctggcatctttgtcatccaaaaccagctaggcgttcccccgcctgccagcaacccggcccctactgccccaggcccgccgcagccgcctctccgcccccagtcccagccgcctgagggaccgctgcccccagccccccacctccctccatcctccacctcctctgctgtggcctcctcctctgagacgtcctccaggttgccagcccctacgccatccgacttccagctccagttcccacccagccaggggccccacaagtcccccactccccctccaaccctccacctggtccctgagccggcagcaccccccccaccgcctcctcggaccttccagatggtgaccacccccttcccagcgctgccccagccgaaggctcttctcgagagatttcaccaggtgccgtccggaatcatcctccagaacaaggctgggggggcccctgccgccccgcagacctccaccagcctggggcccctcaccagccccgctgcgtctgtgctggtcagtgggcaggccccatctgggacccccactgcccccagccacgcccccgccccggcacccatggccgccacaggcctccctcctctgcttccagccgagaacaaggcttttgccagcaacctcccgaccctgaatgtggccaaggccgcttcctccgggccagggaagccctccgggctgcagtatgagagcaaactgagtggcctgaagaagccccccacgcttcagcccagcaaggaagcctgtttcctggagcatttgcacaaacaccagggctccgtcctgcaccccgactacaagacggccttcccctcctttgaggacgccctgcatcgcctcctgccctaccatgtctaccagggcgccctcccctcccccagtgactaccacaaagtggacgaggagtttgagacggtctccacgcagctgctgaaacgcacccaggccatgctcaataaatatcggctcctgctcctggaggagtcccggagggtgagcccctcagcggagatggtaatgatcgaccgaatgttcattcaggaggagaagaccacccttgccttggataaacagctggccaaggagaagccggacgagtacgtgtcttcctcccgctcgctcggcctccccatcgcagcctcttccgagggtcatcggcttcccggccacggccccctgtcgtcttcagctcccggggcctccacccagccccctccacacctgcccaccaagcttgtgatccggcacggcggggcaggcggctccccttcggtcacctgggcccgggcgtcctcctccctgtcctcctcttcctcctcctcctctgccgcctcctccttggacgccgacgaggacggccccatgccctcccgcaaccgcccgcccatcaagacctacgaggcccggagccgcatcgggctcaagctcaagatcaagcaggaagccgggctcagcaaggtcgtgcacaacacggccctggaccccgtgcaccagcccccgccaccccccgctaccctcaaggtggccgagcccccgccacggccgccaccaccaccgccgcccacgggccagatgaacggcacggtggaccacccgccgcctgccgcccccgagcgcaagcccctgggcaccgccccgcactgcccgcgcctgccactgcgcaagacctaccgcgagaacgtggggggccctggcgcgccggaggggacgcccgcaggcagggcacggggaggcagcccggcgccgctgcccgccaaagtggacgaggccaccagcgggctcatccgcgagctggcggccgtggaggacgagctgtaccagcgtatgctgaagggccccccgccagagcccgcagccagcgccgcccaaggcaccggggaccccgactgggaggcgcccgggctgccccctgccaagcggcgcaagtccgagtcgcccgacgtggaccaggccagcttctccagcgacagcccgcaggatgacacgctcaccgagcacctgcagagcgccatcgacagcatcctgaacctgcagcaggcccccggccggacgcccgcgccctcgtacccccacgctgcctcggccggcacccccgcatccccgccgcccctgcacaggcccgaggcctacccaccctccagtcacaacggtggcctcggcgccaggacgttgaccagataacaccgggccgcctccccttccccgtcccctcctcccgaagacgccgggacagtcgggtgtccgccctcagcctcctggggactcgagccggggatcccctgacggtttttcttgcctaagttatttgagtcacaaaggcctccttccctgccgcctgcttcagctgggttgctggggggtgggcgtggatttagggagggggctgtgatgtaaaacgtctcccctgccaaaggaggggcaaagtgctgtgtcagttcctgtttcttcccatttcctggcacactctgcccctctgtccgggggacacgcgcatgtgtttgccagggatggggccaccgggttgatgccaacgctccgggtgcctgtcttgtctgtgtggcttctcagatggtggagggtgctgggagctggcagggtccttccagacagtctcagcctctccccgccgcccccaacaggctgtcaaacaaaaccggagagggggtgggggagccagcctcccagcgtgctgtgcccgcaggcacccgtgtgacatccgcacgtccagctccgtgacctgtgtgtgtgtgtgtgtgcacaagtgagtgagagatttcgaacgcccacccctcgactttgaaatctgagcaaaacaagaaactggggtcttcctctcccccgaacctctccccagctagtcttccctctgttcttcctgcctccagccgcccgcgccagattttgaaatctcggagacaaaactagtactgtaagataaatttttttgtactgtatttattgtgtataacgatttttttaaaggagaattctgtacatttagaactcttgtaaattaaaaaccgatcctttttttaaaactgta

SEQ ID NO: 12133 - DNA, 1522 bp, Homo sapiens
  source 1..1522: mol_type = unassigned DNA
tggctgagttcttcctttgacaagatggcggcaggaggcagtggcgttggtgggaagcgcagctcgaaaagcgatgccgattctggtttcctggggctgcggcccacttcggtggacccagcgctgaggcggcggcggcgaggcccaagaaataagaagcggggctggcggcggcttgctcaggagccgctggggctggaggttgaccagttcctggaagacgtgcggctacaggagcgcacgagcggtggcttgttgtcagaggccccaaatgaaaaactcttcttcgtggacactggctccaaggaaaaagggctgacaaagaagagaaccaaagtccagaagaagtcactgcttctcaagaaaccccttcgggttgacctcatcctcgagaacacatccaaagtccctgcccccaaagacgtcctcgcccaccaggtccccaacgccaagaagctcaggcggaaggagcagctatgggagaagctggccaagcagggcgagctgccccgggaggtgcgcagggcccaggcccggctcctcaacccttctgcaacaagggccaagcccgggccccaggacaccgtagagcggcccttctacgacctctgggcctcagacaaccccctggacaggccgttggttggccaggatgagtttttcctggagcagaccaagaagaaaggagtgaagcggccagcacgcctgcacaccaagccgtcccaggcacccgccgtggaggtggcgcctgccggagcttcctacaatccatcctttgaagaccaccagaccctgctctcagcggcccacgaggtggagttgcagcggcagaaggaggcggagaagctggagcggcagctggccctgcccgccacggagcaggccgccacccaggagtccacattccaggagctgtgcgaggggctgctggaggagtcggatggtgagggggagccaggccagggcgaggggccggaggctggggatgccgaggtctgtcccacgcccgcccgcctggccaccacagagaagaagacggagcagcagcggcggcgggagaaggctgtgcacaggctgcgggtacagcaggccgcgttgcgggccgcccggctccggcaccaggagctgttccggctgcgcgggatcaaggcccaggtggccctgaggctggcggagctggcgcggcggcagaggcggcggcaggcgcggcgggaggctgaggctgacaagccccgaaggctggggcggctcaagtaccaggcacctgacatcgacgtgcagctgagctcggagctgacagactcgctcaggaccctgaagcccgagggcaacatccttcgagaccggttcaagagcttccagaggaggaatatgatcgagcctcgagagagagccaagttcaaacgcaagtacaaggtgaagctggtggagaagcgggcgttccgtgagatccagttgtagctgccatcagatgccggagactcgcccttcaataaaaaatctcttctagctgatcagtggg

SEQ ID NO: 12134 - DNA, 1478 bp, Homo sapiens
  source 1..1478: mol_type = unassigned DNA
tgacaagatggcggcaggaggcagtggcgttggtgggaagcgcagctcgaaaagcgatgccgattctggtttcctggggctgcggcccacttcggtggacccagcgctgaggcggcggcggcgaggcccaagaaataagaagcggggctggcggcggcttgctcaggagccgctggggctggaggttgaccagttcctggaagacgtgcggctacaggagcgcacgagcggtggcttgttgtcagaggccccaaatgaaaaactcttcttcgtggacactggctccaaggaaaaagggctgacaaagaagagaaccaaagtccagaagaagtcactgcttctcaagaaaccccttcgggttgacctcatcctcgagaacacatccaaagtccctgcccccaaagacgtcctcgcccaccaggtccccaacgccaagaagctcaggcggaaggagcagctatgggagaagctggccaagcagggcgagctgccccgggaggtgcgcagggcccaggcccggctcctcaacccttctgcaacaagggccaagcccgggccccaggacaccgtagagcggcccttctacgacctctgggcctcagacaaccccctggacaggccgttggttggccaggatgagtttttcctggagcagaccaagaagaaaggagtgaagcggccagcacgcctgcacaccaagccgtcccaggcacccgccgtggaggtggcgcctgccggagcttcctacaatccatcctttgaagaccaccagaccctgctctcagcggcccacgaggtggagttgcagcggcagaaggaggcggagaagctggagcggcagctggccctgcccgccacggagcaggccgccacccaggagtccacattccaggagctgtgcgaggggctgctggaggagtcggatggtgagggggagccaggccagggcgaggggccggaggctggggatgccgaggtctgtcccacgcccgcccgccaccacagagaagaagacggagcagcagcggcgagaaggctgtgcacaggctgcgggtacagcaggccgcgttgcgggccgcccggctccggcaccaggagctgttccggctgcgcgggatcaccaggtggccctgaggctggcggagcgcggcggcagaggcggcggcaggcgcggcgggaggctgaggctgacaagccccgaaggctggggcggctcaagtaccaggcacctgacatcgacgtgcagctgagctcggagctgacagactcgctcaggaccctgaagcccgagggcaacatccttcgagaccggttcaagagcttccagaggaggaatatgatcgagcctcgagagagagccaagttcaaacgcaagtacaaggtgaagctggtggagaagcgggcgttccgtgagatccagttgtagctgccatcagatgccggagactcgcccttcaataaaaaatctcttctagctg

SEQ ID NO: 12135 - DNA, 850 bp, Homo sapiens
  source 1..850: mol_type = unassigned DNA
gacaagatggcggcaggaggcagtggcgttggtgggaagcgcagctcgaaaagcgatgccgattctggtttcctggggctgcggcccacttcggtggacccagcgctgaggcggcggcggcgaggcccaagaaataagaagcggggctggcggcggcttgctcaggagccgctggggctggaggttgaccagttcctggaagacgtgcggctacaggagcgcacgagcggtggcttgttgtcagaggccccaaatgaaaaactcttcttcgtggacactggctccaaggaaaaagggctgacaaagaagagaaccaaagtccagaagaagtcactgcttctcaagaaaccccttcgggttgacctcatcctcgagaacacatccaaagtccctgcccccaaagacgtcctcgcccaccaggtccccaacgccaagaagctcaggcggaaggagcagctatgggcctcagacaaccccctggacaggccgttggttggccaggatgagtttttcctggagcagaccaagaagaaaggagtgaagcggcgggaggctgaggctgacaagccccgaaggctggggcggctcaagtaccaggcacctgacatcgacgtgcagctgagctcggagctgacagactcgctcaggaccctgaagcccgagggcaacatccttcgagaccggttcaagagcttccagaggaggaatatgatcgagcctcgagagagagccaagttcaaacgcaagtacaaggtgaagctggtggagaagcgggcgttccgtgagatccagttgtagctgccatcagatgccggagactcgcccttcaataaaaaatctcttctagctg

SEQ ID NO: 12136 - DNA, 4971 bp, Homo sapiens
  source 1..4971: mol_type = unassigned DNA
aaaggctgccagggccgcaggctgccaagccctgccctgcccaaggcgcatagagcatggcccgaggcgctgagggaggccgtggggacgcgggttggggcctgcgtggcgccctggcggccgtggcgctgctctcggcgctcaacgctgcgggcacggtgttcgcgctgtgccagtggcgcgggctgagctcggcgctgcgggctttggaggcgcagcggggccgggagcagcgcgaggacagtgccctgcgctccttcctggccgagttgagccgcgcgccgcgcggggcgtccgcaccaccccaagacccggccagctcagctcgcaacaagcgcagccacagcggcgagcccgcgccgcatatccgcgccgagagccatgacatgctgatgatgatgacctactccatggtgccgatccgagtgatggtggacctgtgcaacagcaccaagggcatctgcctcacaggaccttctggaccaccaggacctccgggagccggcgggttgccaggacacaacggattggatggacagcctggtcctcagggcccaaaaggagaaaaaggagcaaatggaaaaagaggaaaaatggggatacctggagctgcaggaaatccaggggaaaggggagaaaagggagaccatggtgaactgggcctgcagggaaatgagggcccaccagggcagaagggagaaaagggtgacaaaggagatgtgtccaacgacgtgctcctggcaggtgccaaaggtgaccaaggcccacccggtccacctgggcccccaggccctccaggtcctccagggccccctggaagcagaagagccaaaggccctcggcagccaagcatgttcaacggccagtgcccaggtgagacttgtgccataccaaatgatgataccttggttggaaaagctgatgagaaagccagtgaacaccattccccacaagcagaatccatgatcacttccattggaaacccagtgcaagtactgaaagtgacagagacatttgggacttggataagagagtctgctaacaagagtgatgaccggatttgggtgacagagcatttttcaggcatcatggttaaggaattcaaggatcagccctcacttctgaatggcagttacacgttcatccaccttccatactatttccatggctgtgggcacgttgtttacaacaactctctctactaccacaaagggggttctaataccctagtgagatttgaatttggccaggaaacatcccaaactctgaagcttgaaaatgccttgtattttgatcgaaaatacctttttgcaaattccaaaacttacttcaatctagctgtagatgaaaagggcctttggattatctatgcgtcaagtgtggacggctcgagcattcttgtagcacaactggatgagaggacattctcagtggtgcaacacgtcaataccacgtaccctaaatccaaggctggcaacgccttcattgcccgaggaatcctctatgtcacagacaccaaagatatgagggtcacatttgcctttgatttgttaggagggaaacagatcaatgcaaactttgatttaagaacttcccagtctgttcttgccatgttagcatacaacatgagagatcagcatttatattcatgggaagatggccatttaatgctttatcctgtgcagtttttgtcaactaccttaaatcagtgatgtgctgcattcggctcccttcagcaaatttcaggggttttctgggaccagttctcccccaacaggaaacttgtttttttaacgtcagccagatatttagaaaataacctcaaaagtgtttatatggtcagtgagccccgcttagtgaaatagcaacagattggaagttgaaatggctgagatttggtgatctccccacagctggctctgcaagttacctctttctccttgggccttagtttccccattggtaatctgaattggctaagatgattggggagattttctgtacctgtaggtaatttggtgattcttggtggctgctcttctcacaacttttatgtatctgcttctgtcgtttagcttttttagccacatgctgaccaaatttacctttgagttgataagtccagtggcttgagtagtgaatccctcagtgctgacttatatcttgttctttgaaaaaatgcattgactctttaagacatctaaagtatcacattatccataatttattgcttttctttgcatctgcacctgccaccacagaataaccattaccctcagctgctgattgggcagctctgagattagcaaaagccagggacagctacatgttcaggtttttttttttttttttttttcaataagctattttttttcttttcttattttaaatagagagagagtcttgctatgtttcccaggctggtcttgaactcctggggctcaagtgatcctcctgccttggcctcccaaaatgctggattacaggcatgtgtgcctggcccaggtttcttaataaaacagaatcatgatcttccaggttccccccagtttctgatcatgttgatttgtagctgtggatcatgaacactgaatcctcagatcactctgacttcttatgcttctcctgtggatccactatcaaagtactaaatgctgtgtaagtagacgttaatctggctggaaccatgggaagcactttgcagtgttcagaagagaggctccatttgtggctattatgtagaactgggccagagccagtccattgcctgtttttttaaataaggttttactgagcacagccacactcatttgtttatgcagtacggcctgacattgcttttgctctgcaacagcagagtcgagtcattgcaacaaagagcatatggccccacagtgcctaaaatattgaccagctacccctttatggaaaaagattgctgactcctgataaagaatataaagtgagcctgattcttgaaaaaatcagaaccagagcctgttttgttttgttctaaactaagaagccgcataggatgtgacttgcgttttgagtagaggggaaggctgataacggcgtaagatgaagtggccctccacaaaggctggttaggggacagttctttctctaacatagttttaaaggatgtgatctggtccccttggatgccaggagagaatccagttgaacttgctcctaaatgctcttaaatatgcatattttctgccaactcacttctttaaacatctttcagcccagcgctgcggccccgggaagggccactgcgaatagagaggaagctggaaaagttcctggggctctgcagccaggaaggggaaccagggcaaatcttatgtaaagatttttcagcaacttgtcccaatttgtgtgtattctgaaactttctctttgggaccaaattcattctcaatggccctgagttcaatatattattaacagcagtattttaaaacttagggttgaactgggcatggtggcacataactgcaatcccagctactttggaggcagggatgggaggatcacttgaggccaggatctcaggaccagcctagagagatcccatctctaaaaaataaaatataagaaaataaaacttaggggatatacagatttaaatattcaaatctccctgctcccctgaaagtccccaggcagctgtcaatgacttgtttgttgtgttctcaatatgatggctatttgaaacttcacctacttttcattagattggttgtaccatgtcaccttagcttttaaaaatactcttttcagattcacgttctctaacaaagagtctcatgttcaagatcaatatgtctaataagtgctggtgtccttttaaagtatttaaatatatatgttgctgttgctgaatacaggagaccaggttaggaatatagtttcataataatagtacatacaatactaattgtatataaggtagcaaccaaaagaggttgttaattagcacatattccttttagaaaaatgtttcagaaacctcagtcttgatatctgagctatctgggctcccttacttgtgagtaagggatcatgctcaccactggagaagcttacaccgggactttttttcttttttcttttttttttgctatgacagagtaatgctaacgtaaggacaactgagtttgatcagtgtttaatcgcagtgggtaatcttatctgattgtctttaaaagtgaaaaggattaagattttattctttcttgtaaacattacttgattttttaaagaagttttgggctcactgctaaaatagagtatacaactgaatgtttttaagtcaagatactgttttaggagtttaccctctcatttataaccaaagttgctctaaaacactttccaaatatctgcacttctgatgtcagaatcaaaccagataattctctaattcttctttaatctaaagtagatagcttcccactggaaagtaaacaaaaccatccctcccaacctcaaagctaggccacactctatttcaaggcattttctttcagctgataaggtgtcctcctgaagccaagtaggtggttctggtctccaagtatcgttaagcacaggtgctatgacagaaaaagttctggggtggaagttttaagatgaggagttctgatcttaggcatcttaacagtcacaaggtgaaaagtcaaatgaaacagtacaattcttgatgagtgaggtgtcatcttccaaccacacagaggacgttttggctatgatcatctgatggcaagtgaaggagaaatgagtgatagggctttgcgttttcatccagatgctgtggccctgtgtttcacagcattaagagccataatttccaacctgcacagatcctgaacaacaaatgaataacgatgaatgtctttttggttgtaatttaacaagtcaaataaaataatcattgctgagcacaatcacatgttgaaa

SEQ ID NO: 12137 - DNA, 4584 bp, Homo sapiens
  source 1..4584: mol_type = unassigned DNA
accattgtgtatgattcgttgttgactgcagcatcactagatccgagtgatggtggacctgtgcaacagcaccaagggcatctgcctcacaggaccttctggaccaccaggacctccgggagccggcgggttgccaggacacaacggattggatggacagcctggtcctcagggcccaaaaggagaaaaaggagcaaatggaaaaagaggaaaaatggggatacctggagctgcaggaaatccaggggaaaggggagaaaagggagaccatggtgaactgggcctgcagggaaatgagggcccaccagggcagaagggagaaaagggtgacaaaggagatgtgtccaacgacgtgctcctggcaggtgccaaaggtgaccaaggcccacccggtccacctgggcccccaggccctccaggtcctccagggccccctggaagcagaagagccaaaggccctcggcagccaagcatgttcaacggccagtgcccaggtgagacttgtgccataccaaatgatgataccttggttggaaaagctgatgagaaagccagtgaacaccattccccacaagcagaatccatgatcacttccattggaaacccagtgcaagtactgaaagtgacagagacatttgggacttggataagagagtctgctaacaagagtgatgaccggatttgggtgacagagcatttttcaggcatcatggttaaggaattcaaggatcagccctcacttctgaatggcagttacacgttcatccaccttccatactatttccatggctgtgggcacgttgtttacaacaactctctctactaccacaaagggggttctaataccctagtgagatttgaatttggccaggaaacatcccaaactctgaagcttgaaaatgccttgtattttgatcgaaaatacctttttgcaaattccaaaacttacttcaatctagctgtagatgaaaagggcctttggattatctatgcgtcaagtgtggacggctcgagcattcttgtagcacaactggatgagaggacattctcagtggtgcaacacgtcaataccacgtaccctaaatccaaggctggcaacgccttcattgcccgaggaatcctctatgtcacagacaccaaagatatgagggtcacatttgcctttgatttgttaggagggaaacagatcaatgcaaactttgatttaagaacttcccagtctgttcttgccatgttagcatacaacatgagagatcagcatttatattcatgggaagatggccatttaatgctttatcctgtgcagtttttgtcaactaccttaaatcagtgatgtgctgcattcggctcccttcagcaaatttcaggggttttctgggaccagttctcccccaacaggaaacttgtttttttaacgtcagccagatatttagaaaataacctcaaaagtgtttatatggtcagtgagccccgcttagtgaaatagcaacagattggaagttgaaatggctgagatttggtgatctccccacagctggctctgcaagttacctctttctccttgggccttagtttccccattggtaatctgaattggctaagatgattggggagattttctgtacctgtaggtaatttggtgattcttggtggctgctcttctcacaacttttatgtatctgcttctgtcgtttagcttttttagccacatgctgaccaaatttacctttgagttgataagtccagtggcttgagtagtgaatccctcagtgctgacttatatcttgttctttgaaaaaatgcattgactctttaagacatctaaagtatcacattatccataatttattgcttttctttgcatctgcacctgccaccacagaataaccattaccctcagctgctgattgggcagctctgagattagcaaaagccagggacagctacatgttcaggtttttttttttttttttttttcaataagctattttttttcttttcttattttaaatagagagagagtcttgctatgtttcccaggctggtcttgaactcctggggctcaagtgatcctcctgccttggcctcccaaaatgctggattacaggcatgtgtgcctggcccaggtttcttaataaaacagaatcatgatcttccaggttccccccagtttctgatcatgttgatttgtagctgtggatcatgaacactgaatcctcagatcactctgacttcttatgcttctcctgtggatccactatcaaagtactaaatgctgtgtaagtagacgttaatctggctggaaccatgggaagcactttgcagtgttcagaagagaggctccatttgtggctattatgtagaactgggccagagccagtccattgcctgtttttttaaataaggttttactgagcacagccacactcatttgtttatgcagtacggcctgacattgcttttgctctgcaacagcagagtcgagtcattgcaacaaagagcatatggccccacagtgcctaaaatattgaccagctacccctttatggaaaaagattgctgactcctgataaagaatataaagtgagcctgattcttgaaaaaatcagaaccagagcctgttttgttttgttctaaactaagaagccgcataggatgtgacttgcgttttgagtagaggggaaggctgataacggcgtaagatgaagtggccctccacaaaggctggttaggggacagttctttctctaacatagttttaaaggatgtgatctggtccccttggatgccaggagagaatccagttgaacttgctcctaaatgctcttaaatatgcatattttctgccaactcacttctttaaacatctttcagcccagcgctgcggccccgggaagggccactgcgaatagagaggaagctggaaaagttcctggggctctgcagccaggaaggggaaccagggcaaatcttatgtaaagatttttcagcaacttgtcccaatttgtgtgtattctgaaactttctctttgggaccaaattcattctcaatggccctgagttcaatatattattaacagcagtattttaaaacttagggttgaactgggcatggtggcacataactgcaatcccagctactttggaggcagggatgggaggatcacttgaggccaggatctcaggaccagcctagagagatcccatctctaaaaaataaaatataagaaaataaaacttaggggatatacagatttaaatattcaaatctccctgctcccctgaaagtccccaggcagctgtcaatgacttgtttgttgtgttctcaatatgatggctatttgaaacttcacctacttttcattagattggttgtaccatgtcaccttagcttttaaaaatactcttttcagattcacgttctctaacaaagagtctcatgttcaagatcaatatgtctaataagtgctggtgtccttttaaagtatttaaatatatatgttgctgttgctgaatacaggagaccaggttaggaatatagtttcataataatagtacatacaatactaattgtatataaggtagcaaccaaaagaggttgttaattagcacatattccttttagaaaaatgtttcagaaacctcagtcttgatatctgagctatctgggctcccttacttgtgagtaagggatcatgctcaccactggagaagcttacaccgggactttttttcttttttcttttttttttgctatgacagagtaatgctaacgtaaggacaactgagtttgatcagtgtttaatcgcagtgggtaatcttatctgattgtctttaaaagtgaaaaggattaagattttattctttcttgtaaacattacttgattttttaaagaagttttgggctcactgctaaaatagagtatacaactgaatgtttttaagtcaagatactgttttaggagtttaccctctcatttataaccaaagttgctctaaaacactttccaaatatctgcacttctgatgtcagaatcaaaccagataattctctaattcttctttaatctaaagtagatagcttcccactggaaagtaaacaaaaccatccctcccaacctcaaagctaggccacactctatttcaaggcattttctttcagctgataaggtgtcctcctgaagccaagtaggtggttctggtctccaagtatcgttaagcacaggtgctatgacagaaaaagttctggggtggaagttttaagatgaggagttctgatcttaggcatcttaacagtcacaaggtgaaaagtcaaatgaaacagtacaattcttgatgagtgaggtgtcatcttccaaccacacagaggacgttttggctatgatcatctgatggcaagtgaaggagaaatgagtgatagggctttgcgttttcatccagatgctgtggccctgtgtttcacagcattaagagccataatttccaacctgcacagatcctgaacaacaaatgaataacgatgaatgtctttttggttgtaatttaacaagtcaaataaaataatcattgctgagcacaatcaca

SEQ ID NO: 12138 - DNA, 1676 bp, Homo sapiens
  source 1..1676: mol_type = unassigned DNA
tgatggtggacctgtgcaacagcaccaagggcatctgcctcacaggaccttctggaccaccaggacctccgggagccggcgggttgccaggacacaacggattggatggacagcctggtcctcagggcccaaaaggagaaaaaggagcaaatggaaaaagaggaaaaatggggatacctggagctgcaggaaatccaggggaaaggggagaaaagggagaccatggtgaactgggcctgcagggaaatgagggcccaccagggcagaagggagaaaagggtgacaaaggagatgtgtccaacgacgtgctcctggcaggtgccaaaggtgaccaaggcccacccggtccacctgggcccccaggccctccaggtcctccagggccccctggaagcagaagagccaaaggccctcggcagccaagcatgttcaacggccagtgcccaggtgagacttgtgccataccaaatgatgataccttggttggaaaagctgatgagaaagccagtgaacaccattccccacaagcagaatccatgatcacttccattggaaacccagtgcaagtactgaaagtgacagagacatttgggacttggataagagagtctgctaacaagagtgatgaccggatttgggtgacagagcatttttcaggcatcatggttaaggaattcaaggatcagccctcacttctgaatggcagttacacgttcatccaccttccatactatttccatggctgtgggcacgttgtttacaacaactctctctactaccacaaagggggttctaataccctagtgagatttgaatttggccaggaaacatcccaaactctgaagcttgaaaatgccttgtattttgatcgaaaatacctttttgcaaattccaaaacttacttcaatctagctgtagatgaaaagggcctttggattatctatgcgtcaagtgtggacggctcgagcattcttgtagcacaactggatgagaggacattctcagtggtgcaacacgtcaataccacgtaccctaaatccaaggctggcaacgccttcattgcccgaggaatcctctatgtcacagacaccaaagatatgagggtcacatttgcctttgatttgttaggagggaaacagatcaatgcaaactttgatttaagaacttcccagtctgttcttgccatgttagcatacaacatgagagatcagcatttatattcatgggaagatggccatttaatgctttatcctgtgcagtttttgtcaactaccttaaatcagtgatgtgctgcattcggctcccttcagcaaatttcaggggttttctgggaccagttctcccccaacaggaaacttgtttttttaacgtcagccagatatttagaaaataacctcaaaagtgtttatatggtcagtgagccccgcttagtgaaatagcaacagattggaagttgaaatggctgagattttctgtacctgtaggtaatttggtgattcttggtggctgctcttctcacaacttttatgtatctgcttctgtcgtttagcttttttagccacatgctgaccaaatttacctttgagttgataagtccagtggcttgagtagtgaatccctcagtgctgacttatatcttgttctttgaaaaaatgcattgactctttaagacatct

SEQ ID NO: 12139 - DNA, 4469 bp, Homo sapiens
  source 1..4469: mol_type = unassigned DNA
agatgcctcacctctaggggatgctgattctgggatgcctttttcgtctcctaggctcctcaaggccaactgcgctgggaagagggggtgtccaacagcaggagggctgtttttttgaactacaatttgccagcatacagcagagcagcaagaagataacagggcggggggcacgggattagcccaaacaaaacacactcaagaacgcgagtctgtggttcaacacgaggcagaaaacagctgggccgggtgcggggcttctccctcgcgtgtatccgctcactgcactcgctgccctggccgcgggcgccgcgcagggtgctgatgtccaggagggatctagacctcccgcggcgctcgggctagtggacgcaggtggtcccaaatgctgggaccaagctaggaaccaagcggaagctcggattgctcggcatcgggcctcgtcgttattctaccgtgagggaaactgagaccgagggcacggcagggagtcgcccgccgtctcaccagcgtgaggggttgcgccgggccccgaaaactggtttgcgccgcccggcatcgggatccgggacctctgcccgccgggcgctgcctgcgcgttcctggaactgggctgggcggagaaatcagggcccgcagagaggcattcctgccgccttccccgccgcccggggccgcaggggggcctggccaaggcttccagcacagaggagcttcggggaggctggattgcgcctgtgtctaaaaataaacaggttcctgcgtgaagaccagctgggagcccactgcctgctgccacctccaactccggccccctcaccatgcactccctggacgagccgctcgacctgaagctgagtatcaccaagctccgggcggcaagagagaagcgggagaggacgctgggtgtggtccggccccgtgctctgcacagggagctgggcctggtggatgacagccccacacctggctctccaggctccccgccctcaggcttcctgctgaactccaagttccccgagaaggtggagggacgcttttcagcagcccctctcgtggacctcagcctgtcaccaccatctgggctggactcccccaatggcagcagctcgctgtcccccgagcgccagggcaacggggacctgcctccagtgcccagtgcctcggacttccagccactgcgctatttggatggtgtccccagctccttccagttcttcctgcccctcggctccgggggggccctgcacctgcctgcctcctccttccttacccctcccaaggacaagtgcctctcgccagacctgcccctgcccaagcagctggtgtgtcgctgggccaagtgtaaccagctctttgagctcctgcaagacctggtggaccatgtcaacgattaccatgtcaagcccgagaaggatgcggggtactgctgccactgggagggctgcgcccgccatggccgaggtttcaacgccaggtacaagatgctcatccacatccgcacacacaccaacgagaagccacaccgctgtccgacctgcagcaagagcttctcccgcctggagaacctgaagatccacaaccggtcgcacacaggtgagaagccctacgtctgcccctacgagggctgcaacaagcgctattccaactccagtgaccgctttaagcacacgcgcacccactatgtggacaagccctactactgcaagatgcccggctgccacaagcgctacacggaccccagctcactgcgcaagcacatcaaggcccatggccactttgtgtcccacgagcagcaagagctcctgcagctgcgcccaccccccaagccgccactgcccgcccccgacggcggcccctatgtcagtggggcccagatcatcatccccaacccagctgccctctttggaggccctggcctgcccggcttacccctacccctggcccccggcccccttgacctcagtgccctggcctgtggcaacggtgggggcagtgggggtggggggggcatgggccctgggctgccaggccccgtcctgcctctcaatctggccaagaacccgctgctgccctcgccctttggggctggcggactgggcttgcctgtggtctccctccttgctggcgcagctggtggcaaggccgagggggagaaggggcgtgggtcggtgcccaccagggccctgggcatggagggccacaagacgccccttgaaaggacggagagcagctgctcccggccaagccccgatggactccccctgctgccaggcaccgtgctggacctgtccacgggcgtcaactcagctgccagcagcccagaggcgttggcccctggctgggtggtcatcccgccgggctcggtgctgctcaaaccggctgtggtgaactgagcccatcctgcggacagttgtggtgcccccccggcagctcccggcactgcccccgacgaacggaaactcttctgtgaaatagcaataatgtcctactgcccgggcagccccagcccagcccgccgggagcaaggatggtgctaggtcattcatggctggcctcccagcccccgggtggggacctggcctgtcatgcagggagagctgtgctcctgggtgctgaagcctcgctcctgtctgtcccccaccacctggccctcagcttctgagaggctttcccctgcccgacctcctcccgtttccctctcccaccctggcacctccctcacctagtgaccacccatggcaagttgccctctcccagcagagggggtgggtggggtggcatctgccctccctgctagcaccaggctcccccttcctgagaggagcccccagggaccagaggcctgcccttccctcctaggcttacccagcccctgccctgggggctccttggacccctttccctctgaccctgcctccagagggaaagcaagacagatgcaggcccctgcaaagccccaggtagaagcatgccccccaggacaaggcgcctcccactagttaggaggaggcccgctctgcagccgccgtcctcaccccaggccaggcctgcagtaccagacgggatagctggccactccacccctgcaccccagggtctcctccctctaccttttggggcaccctgggagcgtgggaagcaggtccgagggcccctgagctggcaaggggaggtgccaggccagctgtggtgccaagatactgagtgacctgggccctggctcagggagcatgtggggccaggcccagcgccccgtcttcctccttctacccccgctgggcctggcctgggcagcgccccctgcagaggcctttgggtccttggtcctgtaacaggaagggggaggctggctggggacgaccgaccacaggctgggacacagctcctggtctgggggctccaagtgacagcatgcaggggagggggctcccagtcagtgctgtgttgggagctttctggaggctgtggactgaaggccttgagggaagcagtggctggaggagggtgctggacccatgacacgttgcttcctctggcttttccctgctgggccgctttctcagaggcacttccccacccctaacacccagtgggcccccccaggttctgtgccactcagagggaccctggcaggggccagaaccacttaagggtggtgctggagggccttgtgccccagtcccatcccaggacgccctgagggatggacgcagccatgcaccccccatctggggcctctccctgctccctctcccacctggcagctgggagttctggcttctaggcctgccctgtcaccaggcctctgagtggccaggcccttccacctccccatctgtaaaacgaggcagctgcccggacagccttggggtccttagtggccctgcaggtcctctggcagctctgctgaccccaccctctcccggactgcccttctgtcccagaggggtcaccctgacccggcccaccttgccactgggctttggactccagccctgacagggcccagccacactggctctgcccctcgaaggggctatgagcaaggtaggagggagctggtctcctttcttcgggccccacccaggccctgagcaccccccacccctgtgagggccccaggccttaagtccctggcggggtcatgggtttgcgacttgagcagagcggaggaacagggcactggaaggccgacgagctcagcatgcgactcggtgacggaccaggctcggcagggccggtgtactttttgtggttgtcattggtgtgttgttgcacattccaggacgtcagtattttaacaggttctaagtgcctttctatcgtagcttatgttttcctcctcttggctccattgctgttagcatagagttttaaaaaaagagataagctaatgactataacaatatattcctccatgggagaggaagtttataaagaaacaataaaagtgagttgcaaagatg

SEQ ID NO: 12140 - DNA, 3705 bp, Homo sapiens
  source 1..3705: mol_type = unassigned DNA
tgaagaccagctgggagcccactgcctgctgccacctccaactccggccccctcaccatgcactccctggacgagccgctcgacctgaagctgagtatcaccaagctccgggcggcaagagagaagcgggagaggacgctgggtgtggtccggccccgtgctctgcacagggagctgggcctggtggatgacagccccacacctggctctccaggctccccgccctcaggcttcctgctgaactccaagttccccgagaaggtggagggacgcttttcagcagcccctctcgtggacctcagcctgtcaccaccatctgggctggactcccccaatggcagcagctcgctgtcccccgagcgccagggcaacggggacctgcctccagtgcccagtgcctcggacttccagccactgcgctatttggatggtgtccccagctccttccagttcttcctgcccctcggctccgggggggccctgcacctgcctgcctcctccttccttacccctcccaaggacaagtgcctctcgccagacctgcccctgcccaagcagctggtgtgtcgctgggccaagtgtaaccagctctttgagctcctgcaagacctggtggaccatgtcaacgattaccatgtcaagcccgagaaggatgcggggtactgctgccactgggagggctgcgcccgccatggccgaggtttcaacgccaggtacaagatgctcatccacatccgcacacacaccaacgagaagccacaccgctgtccgacctgcagcaagagcttctcccgcctggagaacctgaagatccacaaccggtcgcacacaggtgagaagccctacgtctgcccctacgagggctgcaacaagcgctattccaactccagtgaccgctttaagcacacgcgcacccactatgtggacaagccctactactgcaagatgcccggctgccacaagcgctacacggaccccagctcactgcgcaagcacatcaaggcccatggccactttgtgtcccacgagcagcaagagctcctgcagctgcgcccaccccccaagccgccactgcccgcccccgacggcggcccctatgtcagtggggcccagatcatcatccccaacccagctgccctctttggaggccctggcctgcccggcttacccctacccctggcccccggcccccttgacctcagtgccctggcctgtggcaacggtgggggcagtgggggtggggggggcatgggccctgggctgccaggccccgtcctgcctctcaatctggccaagaacccgctgctgccctcgccctttggggctggcggactgggcttgcctgtggtctccctccttgctggcgcagctggtggcaaggccgagggggagaaggggcgtgggtcggtgcccaccagggccctgggcatggagggccacaagacgccccttgaaaggacggagagcagctgctcccggccaagccccgatggactccccctgctgccaggcaccgtgctggacctgtccacgggcgtcaactcagctgccagcagcccagaggcgttggcccctggctgggtggtcatcccgccgggctcggtgctgctcaaaccggctgtggtgaactgagcccatcctgcggacagttgtggtgcccccccggcagctcccggcactgcccccgacgaacggaaactcttctgtgaaatagcaataatgtcctactgcccgggcagccccagcccagcccgccgggagcaaggatggtgctaggtcattcatggctggcctcccagcccccgggtggggacctggcctgtcatgcagggagagctgtgctcctgggtgctgaagcctcgctcctgtctgtcccccaccacctggccctcagcttctgagaggctttcccctgcccgacctcctcccgtttccctctcccaccctggcacctccctcacctagtgaccacccatggcaagttgccctctcccagcagagggggtgggtggggtggcatctgccctccctgctagcaccaggctcccccttcctgagaggagcccccagggaccagaggcctgcccttccctcctaggcttacccagcccctgccctgggggctccttggacccctttccctctgaccctgcctccagagggaaagcaagacagatgcaggcccctgcaaagccccaggtagaagcatgccccccaggacaaggcgcctcccactagttaggaggaggcccgctctgcagccgccgtcctcaccccaggccaggcctgcagtaccagacgggatagctggccactccacccctgcaccccagggtctcctccctctaccttttggggcaccctgggagcgtgggaagcaggtccgagggcccctgagctggcaaggggaggtgccaggccagctgtggtgccaagatactgagtgacctgggccctggctcagggagcatgtggggccaggcccagcgccccgtcttcctccttctacccccgctgggcctggcctgggcagcgccccctgcagaggcctttgggtccttggtcctgtaacaggaagggggaggctggctggggacgaccgaccacaggctgggacacagctcctggtctgggggctccaagtgacagcatgcaggggagggggctcccagtcagtgctgtgttgggagctttctggaggctgtggactgaaggccttgagggaagcagtggctggaggagggtgctggacccatgacacgttgcttcctctggcttttccctgctgggccgctttctcagaggcacttccccacccctaacacccagtgggcccccccaggttctgtgccactcagagggaccctggcaggggccagaaccacttaagggtggtgctggagggccttgtgccccagtcccatcccaggacgccctgagggatggacgcagccatgcaccccccatctggggcctctccctgctccctctcccacctggcagctgggagttctggcttctaggcctgccctgtcaccaggcctctgagtggccaggcccttccacctccccatctgtaaaacgaggcagctgcccggacagccttggggtccttagtggccctgcaggtcctctggcagctctgctgaccccaccctctcccggactgcccttctgtcccagaggggtcaccctgacccggcccaccttgccactgggctttggactccagccctgacagggcccagccacactggctctgcccctcgaaggggctatgagcaaggtaggagggagctggtctcctttcttcgggccccacccaggccctgagcaccccccacccctgtgagggccccaggccttaagtccctggcggggtcatgggtttgcgacttgagcagagcggaggaacagggcactggaaggccgacgagctcagcatgcgactcggtgacggaccaggctcggcagggccggtgtactttttgtggttgtcattggtgtgttgttgcacattccaggacgtcagtattttaacaggttctaagtgcctttctatcgtagcttatgttttcctcctcttggctccattgctgttagcatagagttttaaaaaaagagataagctaatgactataacaatatattcctccatgggagaggaagtttataaagaaacaataaaagtgagttgcaaagatg

SEQ ID NO: 12141 - DNA, 6667 bp, Homo sapiens
  source 1..6667: mol_type = unassigned DNA
atcctttatggttgaagggtgttggaggaagcagagttttcatcagctgctgaagtggcaactaatagaggtttgaatggccgtagaaaaatattgtgttacttgtttgttgtctaggggctcttggctttgggcctcagtgcaagtccattggaaaaggcagctgcaacaatctagtggtcaccagcagtcccatgatggttcagcgactgggactcatttcacctccagcaagccaggtctctacagcatgcaaccagatcagtcctagcttacagagggcaatgaatgcagccaacctgaatatacctccttcagataccaggtcccttatttcgcgtgagtctttggcgtccacgaccttgagtctgacggaaagtcagtcggcctcaagcatgaagcaggagtggtcccagggctacagggccctcccttcgctctccaaccacggctctcagaatggccttgatctaggggatctccttagccttcctcccgggacatccatgtccagcaatagtgtctctaactcattaccatcctacctttttggcacggaaagtagccactctccttaccctagtcctcggcactcatccaccaggtcccactcggcccgctccaagaagagagcgctgtccttgtccccgctgtccgatggcatcgggatagatttcaataccatcatccgcacgtcgcccacgtccttggtggcctacatcaacgggtcgagggcttcgccggccaacctgtccccgcagccggaggtctacgggcatttcctgggcgtgcgcggcagctgcattccccagccgcgcccggtgcccggcagccagaagggcgtgctggtggcccctggaggcctggcgctgccggcctacggcgaggacggggccctggagcacgagcgcatgcaacagctggagcacggcggcctgcagccaggcctggtcaaccacatggtggtgcagcatggcctgccgggccccgacagccagtcggccggcctgttcaagaccgaacgcctggaggagttcccgggcagcaccgtagacctaccccccgcgcctccgctccctcctctgccgccgcccccaggccccccacccccttaccatgcccatgcgcaccttcaccacccggagctcgggccccacgcccagcagctggccttgccccaggccaccctggacgacgacggggagatggacggcatcgggggcaagcattgctgccgctggatcgactgcagcgccctgtacgaccagcaggaggagctcgtgcggcacatcgagaaggtccacatcgaccagcgcaaaggggaggacttcacttgcttctgggccggttgccctcgaagatacaagcccttcaacgcccgctataaactgctgatccacatgagagtccactctggggagaagcccaacaagtgtacgtttgaaggttgcgagaaggccttttcaaggcttgaaaatctcaagatccacttgcggagccacacaggcgagaagccgtatttgtgccagcatccgggttgtcagaaggccttcagtaactccagtgaccgcgccaaacaccagcggacgcatctggacaccaaaccttatgcttgtcaaattccaggatgtaccaaacgctacacagacccaagttccctaagaaagcatgtgaaggcacattcttccaaagagcaacaagcaaggaaaaagttgcggtccagcacagagctccatccagacctgctcacagattgcctcaccgtgcagtccctgcagccggccacttcccctagagatgctgctgctgaagggaccgtgggacgctcccctggacccgggcctgacctctattcagctcccattttctccagcaattattcaagccgaagtggaacagctgctggggccgtaccacccccacatcctgtcagtcacccttctccaggacataatgtacaggggagccctcacaacccctcctcccagttacctccactcacagctgtggacgcaggagctgagaggtttgcaccttctgctccatctcctcaccacatcagcccccggagagttccagctccttcttcaatactgcaaagaacacagcctccctatacccagcagccatcaggttcacacctgaagtcctatcagccagaaacaaactcttcttttcaaccaaatggtatccatgtccatggattttatgggcagctgcagaagttctgtcccccacactaccccgattcccagagaattgtgccgcctgtcagctcctgcagtgtggtgccttcgtttgaggactgcctagtccctacatccatgggccaggccagttttgatgttttccacagagccttctcgactcactcgggcattacagtgtatgatttaccttcaagttcctcgagcctctttggggagtctctccgcagcggggctgaagatgctaccttcttgcagatcagcaccgtggaccgctgtcctagccagctctcctctgtctacaccgaaggctaaaagctctcttggccactcctgcacacccaggaccttgatgttgcttgccaccttttgttttcgtactctcacagactgcttgaggaaggatgtcagcccaatcagcgggccctgcagagttactgatgttctttcagaaggcaggactgaatggcagagctagctttgcaggaatcattacagttgctcctttttctctctggttttcctggactatgtgaccaggaggactgtcttttcaaagggaatttagagcctcactctcctggatacctgttacttcctggctgtcaacccttaaaggaccccagtgaaatgatgtgcatatgaaaatgtagtttggggatgactctacctgaaaactccaaacagggaaaaagacctcaattacgagaggcatagtgacctgcctcacctaatcctcacccttgctgctcctgatgcaaagccaggcacaacaagggaaatccatgtccaaagcatagtgtggtctcaactcttagaaactccctgggtttcccttttctcttagccacatgctaaccagttgcttctcagtgtttctcttcaatagaaaaataaggttttatatgccagcagcctatccttgtttttgcattttaaagacttagttatttatacgtattttaaaatgaaaaaaaaatgtaaaggtctgtgctttggatggaaatcattattattgtaatcaccccagctatagacattttgcacagctgtggttctgcctggccccacctctagcatgttagttttgcagttagcaaaggttacctgagggaaatggagtgggcacctcccgcaccaacagtcctgtagctggaaccttcctgagttgactgtttagtaactccacctcaaagactgtgttcaaagaaaaatgttgtttgactggtttacccattgcctccactctggtgctgcacccagagaagtgccagatgtgagaactgggacagactgagtcatgtgccagcttcccttggaaaaccaaacctagtgatacttgacttccagtgctcagattttactaacgtttttcaggatatccactcatctgtctgtctcttccctacacttctctccaccctctttttgcatccctcttaccctcttcctgactgtggttcatatatccccaccagccgccattgtctgatcatcttgggaaggtagaggtgacagttctcgaaaagtctacagaaagaggcaattctttttctgagttccagtttgaaggcctggaattttcacatagcacttggtcgaaaatatcaagcctaaataggaagtcattttctgtgacacctctacatagctattacagatcctaagtcctagggcatcagctataaaaattggccagtcccaaagacacagtaagttctaacattctggtactatcatatttcaagtattttttctcactttttaaaaatgtttttctgaacaaaagtgaaacaatgccatttatcaaactgagatcattacaatcttcaacaagacaactaaaacagcttgatgttagatgggattctgtgacagtttgtatactgacaggtccttccagtctccctccacagtcccacaagcggaagtattctacctgattccagagttcattccaacatgcagtagaatgaggtgaatgaagaaccaagtgtgggttttgttttcacagtgcacttggtcaatctagtttctctgagtagtgggctgtattctaagaaaagctttcacgtagacgtcaaagtctgcaaaagagatgagttagccactttaaaaaacctgctctgctttacaaaagatgcacaccaggcttcctttacaagtgaactccaaggctgcttgtaaagtaccacccttcctgcagactttgtgggtcgtgtcacttggcctaaacaagtggcctaacatatgcatgctcacagctagtagcatccctcatgcgtcctttgtcatactctggaaagaaaaaaactctgctatcttcagagaaaccatctattcatacttaaatatggaagcctttacaaggaactcaaaatacatttcatttcatttgtacaatgagaaaaaagatgaaaaggcaaggttgttattgcagttgacattgtcagccctgccttttggctttatgtaatttaaaatagaaagggggaaggaggacaagacagaagctcaactttagaaaccatggacatcacctccctctttgagaggagctgcttgtgaaccaggctccagtcttcctgtggcctctcacagtaaccctgcccctttcttacctcacaggggcaagagggactctaaagagggcgtaagcaatagaggcacctgcagccctccttcctcagcaggaaatcaatgtggagccccagagggacattttatctcagagagagcatgctggccacaggacccagtgcagccctgcttcccgcaccgtgggtctttcctgatagctgcaggcttgagattgcagcctcaggataggacacgttcagatgccttccagactacacacactatgcttagattcgagagtctttcctgaccttaaaatttgtcccttgcttactttcacactgcagaagatttatatatatattcatcattatttttgcagcagtacaagtggaaacttcaaaaaaatcattccctttcatgtcctggtctttttaagtcttgatatgtaaccattttcataaatgtccaaacagagattgtcattccccttaaaaacagaaacaaaacacaaaactagtgcttgtgaaaacacacagcgcaaagacaattatcctattgcattaaaaaaaaaatcagtctgcctagagacatttcattggctgcattgtcttaattccctaacgaaactgcatcaaaatgtcagttgtaatttagcctctgatcagctgttaaatattatttaaatatttacaggtcctgtggggtatctcccattacccatgtcgccctcaaattacataagcgatcataaaataagaagaaaaaaaaaggtctttagtagatcacagcagagttaccactgataagagtgttggctttgttcagttgtttctaaattaccagccgtcaagcacagtagcccctaaaaccaattttgagcaaggataaattcaactccctcatctgagaaccttgactttccagttgccttgaagtattgggaatagtaactgtacattttcaatttaattatttggtattttatttgactgtcttggccatgtcattttatggaagcatttttaaatagcactttttgttagtggtgtggaatttctgcggttattatttttttttttttttgcaacagatgaagcaaaaaaaaaaaagcactcattggagaaatagtgagtgtaaaaagagatttattttgtacagacagcaaagtatcctgtgtaatgttgctgacataaagcactttgggggaaaaaagtggaaatctgttttccataaatcacacagactcttgtacatagttatatacactcacgtagagaaatgaactgcatatatcatactggatatggggccgattttactctagaggcacatctggtgcttattgtcataaatcttttaaagaattaggtacacttttttctattaatatgtatagttttgtgatttgtcacagttatgtttcatataatcataagttattttgtcttgttcatgaagtcctttttttatgtcaaaagtaaaatgaagggattgtgcacttggtacagaataaaactggaaatagagaagacgccctcctgcctaaaatcctccttcagcctgtcggtttaaaacacaatggcaaccatcattgtttgtttgtttgtttttttgttttgttttaccatcagcctcttacatactgggaatggtaattataattaaaggcagatgatgcgggagggaatgttcaagtccagctttaaaatgctgcattgctttgggccagagctgtagcctggatttaattatagatatgaggaggaaatggcagtaaaaatgaatgtctccctgagtcctttacatgttgggagtgtccataaataaaacatgaagttttatttcatcagatttaattaaagcttttatacatgttt

SEQ ID NO: 12142 - DNA, 3961 bp, Homo sapiens
  source 1..3961: mol_type = unassigned DNA
cgggaccccctgtacgccgtccgcgccgtccagggtcacaccggcgacggaacccgccggcagcaattagccagcatcccggggtcggcccccagaagcattccccggcccaggacgaggatgaacaggacaggcgaggcacaaagtcgcaactgaactttttagaaacattatttgtgtgtgtatgtgtgtagcaggggagaatgagctgatgccgagggtccagccaccccgcctctgcctcctcctccccctgccgccgctgccctcgcagacgcgcgcgcacacacggcacttgggccgggtttccgcgctccgtccccccgtttggatgggggttttcatttccgaaggaggcacagcccgcggagcgctctgaagggctggagccccaagttactcctcgccagcgccggccgcccgctgtcactcgcgctggccggccgggggaagggacccgcacgccgggctttgttgtggaaatcccggttacctggcttataacccacaccatggataacttattggactttgcctgaaaggagtcattagtgacattggatatttgaccgtcttggccacaggtttttcagaatgaatggaagatcatgcagcatgagtctccaccggacatcgggaaccccacaggggcctaggatggtcagtggtcatcacattcctgccatccgagcccactccgggactcctggcccctcgccctgtggcagcacatcgagtcccactatggcaagccttgctaacaacctccatctcaagatgccctcaggaggagggatggctcctcagaacaacgtggctgagagccgcatccatctgcctgccttaagccccaggagacaaatgctcaccaatgggaagccgcgattccaggtcacccaggctggaggcatgtcagggtcacatactttaaagccaaagcagcaggagtttggaagcccttttcctccaaatcctgggaaaggggctcttggctttgggcctcagtgcaagtccattggaaaaggcagctgcaacaatctagtggtcaccagcagtcccatgatggttcagcgactgggactcatttcacctccagcaagccaggtctctacagcatgcaaccagatcagtcctagcttacagagggcaatgaatgcagccaacctgaatatacctccttcagataccaggtcccttatttcgcgtgagtctttggcgtccacgaccttgagtctgacggaaagtcagtcggcctcaagcatgaagcaggagtggtcccagggctacagggccctcccttcgctctccaaccacggctctcagaatggccttgatctaggggatctccttagccttcctcccgggacatccatgtccagcaatagtgtctctaactcattaccatcctacctttttggcacggaaagtagccactctccttaccctagtcctcggcactcatccaccaggtcccactcggcccgctccaagaagagagcgctgtccttgtccccgctgtccgatggcatcgggatagatttcaataccatcatccgcacgtcgcccacgtccttggtggcctacatcaacgggtcgagggcttcgccggccaacctgtccccgcagccggaggtctacgggcatttcctgggcgtgcgcggcagctgcattccccagccgcgcccggtgcccggcagccagaagggcgtgctggtggcccctggaggcctggcgctgccggcctacggcgaggacggggccctggagcacgagcgcatgcaacagctggagcacggcggcctgcagccaggcctggtcaaccacatggtggtgcagcatggcctgccgggccccgacagccagtcggccggcctgttcaagaccgaacgcctggaggagttcccgggcagcaccgtagacctaccccccgcgcctccgctccctcctctgccgccgcccccaggccccccacccccttaccatgcccatgcgcaccttcaccacccggagctcgggccccacgcccagcagctggccttgccccaggccaccctggacgacgacggggagatggacggcatcgggggcaagcattgctgccgctggatcgactgcagcgccctgtacgaccagcaggaggagctcgtgcggcacatcgagaaggtccacatcgaccagcgcaaaggggaggacttcacttgcttctgggccggttgccctcgaagatacaagcccttcaacgcccgctataaactgctgatccacatgagagtccactctggggagaagcccaacaagtgtacgtttgaaggttgcgagaaggccttttcaaggcttgaaaatctcaagatccacttgcggagccacacaggcgagaagccgtatttgtgccagcatccgggttgtcagaaggccttcagtaactccagtgaccgcgccaaacaccagcggacgcatctggacaccaaaccttatgcttgtcaaattccaggatgtaccaaacgctacacagacccaagttccctaagaaagcatgtgaaggcacattcttccaaagagcaacaagcaaggaaaaagttgcggtccagcacagagctccatccagacctgctcacagattgcctcaccgtgcagtccctgcagccggccacttcccctagagatgctgctgctgaagggaccgtgggacgctcccctggacccgggcctgacctctattcagctcccattttctccagcaattattcaagccgaagtggaacagctgctggggccgtaccacccccacatcctgtcagtcacccttctccaggacataatgtacaggggagccctcacaacccctcctcccagttacctccactcacagctgtggacgcaggagctgagaggtttgcaccttctgctccatctcctcaccacatcagcccccggagagttccagctccttcttcaatactgcaaagaacacagcctccctatacccagcagccatcaggttcacacctgaagtcctatcagccagaaacaaactcttcttttcaaccaaatggtatccatgtccatggattttatgggcagctgcagaagttctgtcccccacactaccccgattcccagagaattgtgccgcctgtcagctcctgcagtgtggtgccttcgtttgaggactgcctagtccctacatccatgggccaggccagttttgatgttttccacagagccttctcgactcactcgggcattacagtgtatgatttaccttcaagttcctcgagcctctttggggagtctctccgcagcggggctgaagatgctaccttcttgcagatcagcaccgtggaccgctgtcctagccagctctcctctgtctacaccgaaggctaaaagctctcttggccactcctgcacacccaggaccttgatgttgcttgccaccttttgttttcgtactctcacagactgcttgaggaaggatgtcagcccaatcagcgggccctgcagagttactgatgttctttcagaaggcaggactgaatggcagagctagctttgcaggaatcattacagttgctcctttttctctctggttttcctggactatgtgaccaggaggactgtcttttcaaagggaatttagagcctcactctcctggatacctgttacttcctggctgtcaacccttaaaggaccccagtgaaatgatgtgcatatgaaaatgtagtttggggatgactctacctgaaaactccaaacagggaaaaagacctcaattacgagaggcatagtgacctgcctcacctaatcctcacccttgctgctcctgatgcaaagccaggcacaacaagggaaatccatgtccaaagcatagtgtggtctcaactcttagaaactccctgggtttcccttttctcttagccacatgctaaccagttgcttctcagtgtttctcttcaatag

SEQ ID NO: 12143 - DNA, 700 bp, Homo sapiens
  source 1..700: mol_type = unassigned DNA
actgacctcatccatagtgtggtgtttggtctatgagcagttgattcaccagttttcagagcccaagtctaaaatcacagatcctgtgggggatctgggagcatctgccttacctttatgaaggttatggtcagttaagccttgctttcaatgggctcacttcgctatgggaagaaaattctgcagttgttaaaaacaaaaggacactgccttttccaagggagctgacagctattggtttttccggagaggattactggtgaagacagttatgaagaacaagtaactcttgtaaataaacagcatgttcttgcttaaatatttcccagaacagttctaaagaaatataatacaggggctcttggctttgggcctcagtgcaagtccattggaaaaggcagctgcaacaatctagtggtcaccagcagtcccatgatggttcagcgactgggactcatttcacctccagcaagccaggtctctacagcatgcaaccagatcagtcctagcttacagagggcaatgaatgcagccaacctgaatatacctccttcagataccaggtcccttatttcgcgtgagtctttggcgtccacgaccttgagtctgacggaaagtcagtcggcctcaagcatgaagcaggagtggtcccagggctacagggccctcccttcgctctccaaccacggctctcagaatg

SEQ ID NO: 12144 - DNA, 1327 bp, Homo sapiens
  source 1..1327: mol_type = unassigned DNA
cgggaccccctgtacgccgtccgcgccgtccagggtcacaccggcgacggaacccgccggcagcaattagccagcatcccggggtcggcccccagaagcattccccggcccaggacgaggatgaacaggacaggcgaggcacaaagtcgcaactgaactttttagaaacattatttgtgtgtgtatgtgtgtagcaggggagaatgagctgatgccgagggtccagccaccccgcctctgcctcctcctccccctgccgccgctgccctcgcagacgcgcgcgcacacacggcacttgggccgggtttccgcgctccgtccccccgtttggatgggggttttcatttccgaaggaggcacagcccgcggagcgctctgaagggctggagccccaagttactcctcgccagcgccggccgcccgctgtcactcgcgctggccggccgggggaagggacccgcacgccgggctttgttgtggaaatcccggttacctggcttataacccacaccatggataacttattggactttgcctgaaaggagtcattagtgacattggatatttgaccgtcttggccacaggtttttcagaatgaatggaagatcatgcagcatgagtctccaccggacatcgggaaccccacaggggcctaggatggtcagtggtcatcacattcctgccatccgagcccactccgggactcctggcccctcgccctgtggcagcacatcgagtcccactatggcaagccttgctaacaacctccatctcaagatgccctcaggaggagggatggctcctcagaacaacgtggctgagagccgcatccatctgcctgccttaagccccaggagacaaatgctcaccaatgggaagccgcgattccaggtcacccaggctggaggcatgtcagggtcacatactttaaagccaaagcagcaggagtttggaagcccttttcctccaaatcctgggaaaggggctcttggctttgggcctcagtgcaagtccattggaaaaggcagctgcaacaatctagtggtcaccagcagtcccatgatggttcagcgactgggactcatttcacctccagcaagccaggtctctacagcatgcaaccagatcagtcctagcttacagagggcaatgaatgcagccaacctgaatatacctccttcagataccaggtcccttatttcgcgtgagtctttggcgtccacgaccttgagtctgacggaaagtcagtcggcctcaagcatgaagcaggagtggtcccagggctacagggccctcccttcgctctccaaccacggctctcagaatg

SEQ ID NO: 12145 - DNA, 693 bp, Homo sapiens
  source 1..693: mol_type = unassigned DNA
catttgtcagatgctttcctctctgcactccagcctttgctgaatgtcctggcagttcctgaatgttcctgctgcctgcattttataaaaccaaagagcaagtagccctggaaatgtatgccaagtactctgcacagctgtctgaggcccccagccaagggcaagatataaacaatctatacccacacaggtacacaagcagacactgcatatggaagccccgcagtgcaaggacttcttacttctaacactttaaaatgtcagtggccaaacagcctgagaacatgaataatttaagcatgagatgcttttgctgatgattttgatcatttttcaggaagaataatggggctcttggctttgggcctcagtgcaagtccattggaaaaggcagctgcaacaatctagtggtcaccagcagtcccatgatggttcagcgactgggactcatttcacctccagcaagccaggtctctacagcatgcaaccagatcagtcctagcttacagagggcaatgaatgcagccaacctgaatatacctccttcagataccaggtcccttatttcgcgtgagtctttggcgtccacgaccttgagtctgacggaaagtcagtcggcctcaagcatgaagcaggagtggtcccagggctacagggccctcccttcgctctccaaccacggctctcagaatg

SEQ ID NO: 12146 - DNA, 458 bp, Homo sapiens
  source 1..458: mol_type = unassigned DNA
agttccaagttactcactggagctgacaagtcacctcggggaccgggaagtcactcaagtgtctggaaatcttggccctggctgatttgtcatcctatggatgattcaattaggggctcttggctttgggcctcagtgcaagtccattggaaaaggcagctgcaacaatctagtggtcaccagcagtcccatgatggttcagcgactgggactcatttcacctccagcaagccaggtctctacagcatgcaaccagatcagtcctagcttacagagggcaatgaatgcagccaacctgaatatacctccttcagataccaggtcccttatttcgcgtgagtctttggcgtccacgaccttgagtctgacggaaagtcagtcggcctcaagcatgaagcaggagtggtcccagggctacagggccctcccttcgctctccaaccacggctctcagaatg

SEQ ID NO: 12147 - DNA, 944 bp, Homo sapiens
  source 1..944: mol_type = unassigned DNA
agttccaagttactcactggagctgacaagtcacctcggggaccgggaagtcactcaagtgtctggaaatcttggccctggctgatttgtcatcctatggatgattcaattaggcttataacccacaccatggataacttattggactttgcctgaaaggagtcattagtgacattggatatttgaccgtcttggccacaggtttttcagaatgaatggaagatcatgcagcatgagtctccaccggacatcgggaaccccacaggggcctaggatggtcagtggtcatcacattcctgccatccgagcccactccgggactcctggcccctcgccctgtggcagcacatcgagtcccactatggcaagccttgctaacaacctccatctcaagatgccctcaggaggagggatggctcctcagaacaacgtggctgagagccgcatccatctgcctgccttaagccccaggagacaaatgctcaccaatgggaagccgcgattccaggtcacccaggctggaggcatgtcagggtcacatactttaaagccaaagcagcaggagtttggaagcccttttcctccaaatcctgggaaaggggctcttggctttgggcctcagtgcaagtccattggaaaaggcagctgcaacaatctagtggtcaccagcagtcccatgatggttcagcgactgggactcatttcacctccagcaagccaggtctctacagcatgcaaccagatcagtcctagcttacagagggcaatgaatgcagccaacctgaatatacctccttcagataccaggtcccttatttcgcgtgagtctttggcgtccacgaccttgagtctgacggaaagtcagtcggcctcaagcatgaagcaggagtggtcccagggctacagggccctcccttcgctctccaaccacggctctcagaatg

SEQ ID NO: 12148 - DNA, 871 bp, Homo sapiens
  source 1..871: mol_type = unassigned DNA
cggccccgctgcctgccctgctccaggctccacctgcgccgccgatcgcccgggtatcgcgggggcccaggccagctgagtccgttttccgcgccggggtggcgcccctccaaccgtcctaacgccgggccggcagcaaggagtgttcctgggacctcagagaccaggctcagagcctgacatccctgcgaggggacagcctcatccgcccaggccagtgggggtctctacaagtgcccaggctcaggtgcagcccccagcaatgcatcgccggagactggccctgggtctggggttctgcctgttggcgggcacaagcctcagtgtcctgtgggtgtatcttgagaactggctgccagtctcctatgtcccctattatctcccctgcccagagatcttgctggagtaccgtggcgtgatctcagctcattgcaacctccacctcccgggttcaagcaattgtcatgcctcagccacctgaatagctgggattacaggcacacacgctaatttttgtatttttagtagaaacagcatttcatcatgttggccaggttggtctttgcccccttcggccaggcttcgccccctcatcggcctcccaaagtgctgggattaaaggcgtgaaccaccacccctggccttaatttttttttttttttattattactagtgagactctcatttccctacgtcttcccgttaattgaaatttttcttgtgtgaagtgcttcttccccaccttctctgtttggtccgtttgtgggttctctatcatcactcttggctaagtatacctacaacttttttttttctttccagtttgtctatcttgtgtgtgtgcgtggcggagggagataaggtctggctc

SEQ ID NO: 12149 - DNA, 847 bp, Homo sapiens
  source 1..847: mol_type = unassigned DNA
cgcggccccgctgcctgccctgctccaggctccacctgcgccgccgatcgcccgggtatcgcgggggcccaggccagctgagtccgttttccgcgccggggtggcgcccctccaaccgtcctaacgccgggccggcagcaaggagtgttcctgggacctcagagaccaggctcagagcctgacatccctgcgaggggacagcctcatccgcccaggccagtgggggtctctacaagtgcccaggctcaggtgcagcccccagcaatgcatcgccggagactggccctgggtctggggttctgcctgttggcgggcacaagcctcagtgtcctgtgggtgtatcttgagaactggctgccagtctcctatgtcccctattatctcccctgcccagagatcttacccatgatgatggctctttcttgcctctgccaccagcaacatgaagctgcactacaagagggagaagccactccagcccgtggtatggtcacagtaccctcagcccaagctgctggagcacaggcccacacagctgctgacactcacaccctggttggcgcccatcgtctccgagggaaccttcaacccagagcttctgcagcacatctaccagccactgaacctgaccattggggtcacggtgtttgccgtggggaagtacactcatttcatccagtccttcctggagtcagccgaggagttcttcatgcgtgggtaccgggtgcactactacatcttcactgacaaccctgcagccgttcccggggtcccgctgggtccccaccggcttctcagctccatccccatccagggtcactcccactgggaggagacatccatgcgc

SEQ ID NO: 12150 - DNA, 1980 bp, Homo sapiens
  source 1..1980: mol_type = unassigned DNA
ctcttttctgtcctctttcctgtctgtcttcctcttttctgtctggcccgcggccccgctgcctgccctgctccaggctccacctgcgccgccgatcgcccgggtatcgcgggggcccaggccagctgagtccgttttccgcgccggggtggcgcccctccaaccgtcctaacgccgggccggcagcaaggagtgttcctgggacctcagagaccaggctcagagcctgacatccctgcgaggggacagcctcatccgcccaggccagtgggggtctctacaagtgcccaggctcaggtgcagcccccagcaatgcatcgccggagactggccctgggtctggggttctgcctgttggcgggcacaagcctcagtgtcctgtgggtgtatcttgagaactggctgccagtctcctatgtcccctattatctcccctgcccagagatcttcaacatgaagctgcactacaagagggagaagccactccagcccgtggtatggtcacagtaccctcagcccaagctgctggagcacaggcccacacagctgctgacactcacaccctggttggcgcccatcgtctccgagggaaccttcaacccagagcttctgcagcacatctaccagccactgaacctgaccattggggtcacggtgtttgccgtggggaagtacactcatttcatccagtccttcctggagtcagccgaggagttcttcatgcgtgggtaccgggtgcactactacatcttcactgacaaccctgcagccgttcccggggtcccgctgggtccccaccggcttctcagctccatccccatccagggtcactcccactgggaggagacatccatgcgccggatggagaccatcagccagcacattgctaagagggctcaccgggaggtggactacctcttctgccttgatgtggacatggtgtttcggaacccgtggggccctgagaccttgggagacctggtggctgccattcacccaagctactacgccgttccccgccagcagttcccctatgagcgcaggcgtgtttccactgcctttgtggcagacagcgaaggggacttctattatggtggggcagtcttcggggggcaggtggccagggtatatgagtttactaggggctgccacatggccatcctggcggacaaggccaatggcatcatggctgcctggcgggaggaaagccacctgaaccgtcacttcatctcaaacaagccgtccaaggtgctgtcccccgagtacctctgggacgacaggaagccccagccacccagcctgaagctgatccgcttttctacactggacaaggatatcagctgcctgaggagctgaccacggagctgggggttgccatggatggggacccaaagacctgcagccaccagtgcttcactagcgtgcagaccagccctgtcccgcctccctgtcagtcaggcgaattcaaccggaaaagggacgtggaaaggccactgtgaactgcagagggctgtgcacacagtagcacacaggatctcacagtaacgcggcatgggaacagtgagacagggggaggggaggcgcagttacaaaggcagggcccggcaggcttgccacgttctgcagccgtgcctttgcggggcaggctctgaagcctcagcccgactcagagtgcctgaaccctgccgcgccagtcccccgtttattgcatattgcccttaacgtagcatttctaataccctggtgtgaaggcgccctagaccccttttctctggtcacaggggtcctgggtcctttgatgtctcccaaccacatgtagccaattcctcactcaggcccccagagtgagcctttgaaatggaacaggtctaggctccctcggtttcctgcaccccaaagtgagccgcactctcaggggactagccacctccttcttaagagggtttggggcagtttataataaagggggcgtgtgctcaa

SEQ ID NO: 12151 - DNA, 1935 bp, Homo sapiens
  source 1..1935: mol_type = unassigned DNA
tcttcctcttttctgtctggcccgcggccccgctgcctgccctgctccaggctccacctgcgccgccgatcgcccgggtatcgcgggggcccaggccagctgagtccgttttccgcgccggggtggcgcccctccaaccgtcctaacgccgggccggcagcaaggagtgttcctgggacctcagagaccaggctcagagcctgacatccctgcgaggggacagcctcatccgcccaggccagtgggggtctctacaagtgcccaggctcaggtgcagcccccagcaatgcatcgccggagactggccctgggtctggggttctgcctgttggcgggcacaagcctcagtgtcctgtgggtgtatcttgagaactggctgccagtctcctatgtcccctattatctcccctgcccagagatcttcaacatgaagctgcactacaagagggagaagccactccagcccgtggtatggtcacagtaccctcagcccaagctgctggagcacaggcccacacagctgctgacactcacaccctggttggcgcccatcgtctccgagggaaccttcaacccagagcttctgcagcacatctaccagccactgaacctgaccattggggtcacggtgtttgccgtggggaatccttcctggagtcagccgaggagttcttcatgcgtgggtaccgggtgcactactacatcttcactgacaaccctgcagccgttcccggggtcccgctgggtccccaccggcttctcagctccatccccatccagggtcactcccactgggaggagacatccatgcgccggatggagaccatcagccagcacattgctaagagggctcaccgggaggtggactacctcttctgccttgatgtggacatggtgtttcggaacccgtggggccctgagaccttgggagacctggtggctgccattcacccaagctactacgccgttccccgccagcagttcccctatgagcgcaggcgtgtttccactgcctttgtggcagacagcgaaggggacttctattatggtggggcagtcttcggggggcaggtggccagggtatatgagtttactaggggctgccacatggccatcctggcggacaaggccaatggcatcatggctgcctggcgggaggaaagccacctgaaccgtcacttcatctcaaacaagccgtccaaggtgctgtcccccgagtacctctgggacgacaggaagccccagccacccagcctgaagctgatccgcttttctacactggacaaggatatcagctgcctgaggagctgaccacggagctgggggttgccatggatggggacccaaagacctgcagccaccagtgcttcactagcgtgcagaccagccctgtcccgcctccctgtcagtcaggcgaattcaaccggaaaagggacgtggaaaggccactgtgaactgcagagggctgtgcacacagtagcacacaggatctcacagtaacgcggcatgggaacagtgagacagggggaggggaggcgcagttacaaaggcagggcccggcaggcttgccacgttctgcagccgtgcctttgcggggcaggctctgaagcctcagcccgactcagagtgcctgaaccctgccgcgccagtcccccgtttattgcatattgcccttaacgtagcatttctaataccctggtgtgaaggcgccctagaccccttttctctggtcacaggggtcctgggtcctttgatgtctcccaaccacatgtagccaattcctcactcaggcccccagagtgagcctttgaaatggaacaggtctaggctccctcggtttcctgcaccccaaagtgagccgcactctcaggggactagccacctccttcttaagagggtttggggcagtttataataaagggggcgtgtgctcaa

SEQ ID NO: 12152 - DNA, 1449 bp, Homo sapiens
  source 1..1449: mol_type = unassigned DNA
ctcttttctgtctggcccgcggccccgctgcctgccctgctccaggctccacctgcgccgccgatcgcccgggtatcgcgggggcccaggccagctgagtccgttttccgcgccggggtggcgcccctccaaccgtcctaacgccgggccggcagcaaggagtgttcctgggacctcagagaccaggctcagagcctgacatccctgcgaggggacagcctcatccgcccaggccagtgggggtctctacaagtgcccaggctcaggtgcagcccccagcaatgcatcgccggagactggccctgggtctggggttctgcctgttggcgggcacaagcctcagtgtcctgtgggtgtatcttgagaactggctgccagtctcctatgtcccctattatctcccctgcccagagatcttgtcacagtaccctcagcccaagctgctggagcacaggcccacacagctgctgacactcacaccctggttggcgcccatcgtctccgagggaaccttcaacccagagcttctgcagcacatctaccagccactgaacctgaccattggggtcacggtgtttgccgtggggaagtacactcatttcatccagtccttcctggagtcagccgaggagttcttcatgcgtgggtaccgggtgcactactacatcttcactgacaaccctgcagccgttcccggggtcccgctgggtccccaccggcttctcagctccatccccatccagggtcactcccactgggaggagacatccatgcgccggatggagaccatcagccagcacattgctaagagggctcaccgggaggtggactacctcttctgccttgatgtggacatggtgtttcggaacccgtggggccctgagaccttgggagacctggtggctgccattcacccaagctactacgccgttccccgccagcagttcccctatgagcgcaggcgtgtttccactgcctttgtggcagacagcgaaggggacttctattatggtggggcagtcttcggggggcaggtggccagggtatatgagtttactaggggctgccacatggccatcctggcggacaaggccaatggcatcatggctgcctggcgggaggaaagccacctgaaccgtcacttcatctcaaacaagccgtccaaggtgctgtcccccgagtacctctgggacgacaggaagccccagccacccagcctgaagctgatccgcttttctacactggacaaggatatcagctgcctgaggagctgaccacggagctgggggttgccatggatggggacccaaagacctgcagccaccagtgcttcactagcgtgcagaccagccctgtcccgcctccctgtcagtcaggcgaattcaaccggaaaagggacgtggaaaggccactgtgaactgcagagggctgtgcacacagtagcacaca

SEQ ID NO: 12153 - DNA, 2051 bp, Homo sapiens
  source 1..2051: mol_type = unassigned DNA
agtttgcaccgaccccgatctggcagcgccgcgaagacgagcggtcaccggcgcccgacccgagcgcgcccagaggacggcggggagccaagccgacccccgagcagcgccgcgcggaccctgaggctcagaggggcagcttcaggggaggacaccccactggccaggacgccccaggctctgctgctctgccactcagctgccctcggaggagcgtacacacccaccaggactgcattgccccagctgtgcagcccctgccagatgtgggaggcagctagctgcccagaggcatgcccccctgccagccacagcgacccctgctgctgttgctgctgctgctggcctgccagccacaggtcccctccgctcaggtgatggacttcctgtttgagaagtggaagctctacggtgaccagtgtcaccacaacctgagcctgctgccccctcccacggagctggtgtgcaacagaaccttcgacaagtattcctgctggccggacacccccgccaataccacggccaacatctcctgcccctggtacctgccttggcaccacaaagtgcaacaccgcttcgtgttcaagagatgcgggcccgacggtcagtgggtgcgtggaccccgggggcagccttggcgtgatgcctcccagtgccagatggatggcgaggagattgaggtccagaaggaggtggccaagatgtacagcagcttccaggtgatgtacacagtgggctacagcctgtccctgggggccctgctcctcgccttggccatcctggggggcctcagcaagctgcactgcacccgcaatgccatccacgcgaatctgtttgcgtccttcgtgctgaaagccagctccgtgctggtcattgatgggctgctcaggacccgctacagccagaaaattggcgacgacctcagtgtcagcacctggctcagtgatggagcggtggctggctgccgtgtggccgcggtgttcatgcaatatggcatcgtggccaactactgctggctgctggtggagggcctgtacctgcacaacctgctgggcctggccaccctccccgagaggagcttcttcagcctctacctgggcatcggctggggtgcccccatgctgttcgtcgtcccctgggcagtggtcaagtgtctgttcgagaacgtccagtgctggaccagcaatgacaacatgggcttctggtggatcctgcggttccccgtcttcctggccatcctgatcaacttcttcatcttcgtccgcatcgttcagctgctcgtggccaagctgcgggcacggcagatgcaccacacagactacaagttccggctggccaagtccacgctgaccctcatccctctgctgggcgtccacgaagtggtcttcgccttcgtgacggacgagcacgcccagggcaccctgcgctccgccaagctcttcttcgacctcttcctcagctccttccagggcctgctggtggctgtcctctactgcttcctcaacaaggaggtgcagtcggagctgcggcggcgttggcaccgctggcgcctgggcaaagtgctatgggaggagcggaacaccagcaaccacagggcctcatcttcgcccggccacggccctcccagcaaggagctgcagtttgggaggggtggtggcagccaggattcatctgcggagacccccttggctggtggcctccctagattggctgagagccccttctgaaccctgctgggaccccagctagggctggactctggcacccagagggcgtcgctggacaacccagaactggacgcccagctgaggctgggggcgggggagccaacagcagcccccacctaccccccacccccagtgtggctgtctgcgagattgggcctcctctccctgcacctgccttgtccctggtgcagaggtgagcagaggagtccagggcgggagtgggggctgtgccgtgaactgcgtgccagtgtccccacgtatgtcggcacgtcccatgtgcatggaaatgtcctccaacaataaagagctcaagtggtcaccgtg

SEQ ID NO: 12154 - DNA, 3105 bp, Homo sapiens
  source 1..3105: mol_type = unassigned DNA
gttccgcaggtggcagcgatggcccagtcctgaactccccgccatggccggcgcccccggcccgctgcgccttgcgctgctgctgctcgggatggtgggcagggccggcccccgcccccagggtgccactgtgtccctctgggagacggtgcagaaatggcgagaataccgacgccagtgccagcgctccctgactgaggatccacctcctgccacagacttgttctgcaaccggaccttcgatgaatacgcctgctggccagatggggagccaggctcgttcgtgaatgtcagctgcccctggtacctgccctgggccagcagtgtgccgcagggccacgtgtaccggttctgcacagctgaaggcctctggctgcagaaggacaactccagcctgccctggagggacttgtcggagtgcgaggagtccaagcgaggggaaagaagctccccggaggagcagctcctgttcctctacatcatctacacggtgggctacgcactctccttctctgctctggttatcgcctctgcgatcctcctcggcttcagacacctgcactgcaccaggaactacatccacctgaacctgtttgcatccttcatcctgcgagcattgtccgtcttcatcaaggacgcagccctgaagtggatgtatagcacagccgcccagcagcaccagtgggatgggctcctctcctaccaggactctctgagctgccgcctggtgtttctgctcatgcagtactgtgtggcggccaattactactggctcttggtggagggcgtgtacctgtacacactgctggccttctcggtcttatctgagcaatggatcttcaggctctacgtgagcataggctggggtgttcccctgctgtttgttgtcccctggggcattgtcaagtacctctatgaggacgagggctgctggaccaggaactccaacatgaactactggctcattatccggctgcccattctctttgccattggggtgaacttcctcatctttgttcgggtcatctgcatcgtggtatccaaactgaaggccaatctcatgtgcaagacagacatcaaatgcagacttgccaagtccacgctgacactcatccccctgctggggactcatgaggtcatctttgcctttgtgatggacgagcacgcccgggggaccctgcgcttcatcaagctgtttacagagctctccttcacctccttccaggggctgatggtggccatattatactgctttgtcaacaatgaggtccagctggaatttcggaagagctgggagcgctggcggcttgagcacttgcacatccagagggacagcagcatgaagcccctcaagtgtcccaccagcagcctgagcagtggagccacggcgggcagcagcatgtacacagccacttgccaggcctcctgcagctgagactccagcgcctgccctccctggggtccttgctgcaggccgggtggccaatccaggtgggagagacactcccagggacaagggaaggaagggacacacacacacacacacacacacacacacacacacacatacatcctgctttccctccccaaacccatcagacaggtaaatgggcagtgcctcctgggaccatggacacattttctcctaggagaagcagcctcctaatttgatcacagtggcgagaggagaggaaaaacgatcgctgtgaaaatgaggaggattgcttcttgtgaaaccacaggcccttggggttcccccagacagagccgcaaatcaaccccagactcaaactcaaggtcaacggcttattagtgaaactggggcttgcaagaggaggtggttctgaaagtggctcttctaacctcagccaaacacagagcgggagtgacgggagcctcctctgcttgcatcacttggggtcaccaccctcccctgtcttctctcaaagggaagctgtttgtgtgtctgggttgcttatttccctcatcttgccccctcatctcactgcccagtttctttttgaggggctttgtttgggccactgccagcagctgtttctggaaatggctgtaggtggtgttgagaaagaatgagcattgagacggtgctcgcttctcctccaggtatttgagttgttttggtgcctgcctctgccatgcccagagaatcagggcaggcttgccaccggggaacccagccctggggtatgagctgccaagtctattttaaagacgctcaagaatcctctggggttcatctagggacacgttaggaatgtccagactgtgggtgtagattacctgccacttccaggagcccagagggccaagagagacattgcctccacctctccttggaaatactttatctgtgaccacacgctgtctcttgagaatttggatacactctctagctttaggggaccatgaagagactctcttagggaaaccaatagtccccatcagcaccatggaggcaggctccccctgcctttgaaattcccccacttgggagcttgtatatacttcactcacttttctttattgctgtgaatagtctgtgtgcacaatgggcaattctgacttctcccatctagtggaaatgagcgaaatcatggttgtagtgatgttgtttgggagagtgcagtagtaattgatttgacccactcacacttggagctaattaaggtttgccctgcctgcagcctcccccacaaataatgaacagcagaaagactggacggggaaacctatcaatcctgcccccagccatggtgaggaagccccaagccatggtgacacacagcagcactgcagatagccagacacatggctatcctagagaggctggcaaggagttcgtggctgcaaaagaagtttctggagcaagagagagctcgctcttgggagtcaggacctccggggagagcagagggttccgacggattcctttatgagtcagtctctctctcccttttaaatggtgggaaccctccccaaaacctttccccagacacattctcctgtgcccctcagagaggcatgtgatgtgcaaggaaaataataggatataaaacacatcaagtagaaaatttcttatacttc

SEQ ID NO: 12155 - DNA, 4059 bp, Homo sapiens
  source 1..4059: mol_type = unassigned DNA
atgaagctgggatcgagcagggcagggcctgggagaggaagcgcgggactcctgcctggcgtccacgagctgcccatgggcatccctgccccctgggggaccagtcctctctccttccacaggaagtgctctctctgggcccctgggaggcccttcctcactctggtcctgctggtttccatcaagcaagttacaggatccctccttgaggaaacgactcggaagtgggctcagtacaaacaggcatgtctgagagacttactcaaggaaccttctggcatattttgtaacgggacatttgatcagtacgtgtgttggcctcattcttctcctggaaatgtctctgtaccctgcccttcatacttaccttggtggagtgaagagagctcaggaagggcctacagacactgcttggctcaggggacttggcagacgatagagaacgccacggatatttggcaggatgactccgaatgctccgagaaccacagcttcaagcaaaacgtggatcgttatgccttgctgtcaaccttgcagctgatgtacaccgtgggatactccttctctcttatctccctcttcctggctctcaccctcctcttgtttcttcgaaaactccactgcacgcgcaactacatccacatgaacttgtttgcttctttcatcctgagaaccctggctgtactggtgaaggacgtcgtcttctacaactcttactccaagaggcctgacaatgagaatgggtggatgtcctacctgtcagagatgtccacctcctgccgctcagtccaggttctcttgcattactttgtgggtgccaattacttatggctgctggttgaaggcctctacctccacacgctgctggagcccacagtgcttcctgagaggcggctgtggcccagatacctgctgttgggttgggccttccctgtgctatttgttgtaccctggggtttcgcccgtgcacacctggagaacacagggtgctggacaacaaatgggaataagaaaatctggtggatcatccgaggacccatgatgctctgtgtaacagtcaatttcttcatcttcctgaaaattctcaagcttctcatttctaagctcaaagctcatcaaatgtgcttcagagattataaatacagattggcaaaatcaacactggtcctcattcctttattgggcgttcatgagatcctcttctctttcatcactgatgatcaagttgaaggatttgcaaaacttatacgacttttcattcagttgacactgagctcctttcatgggttcctggtggccttgcagtatggttttgccaatggagaggtgaaggctgagctgcggaaatactgggtccgcttcttgctagcccgccactcaggctgcagagcctgtgtcctggggaaggacttccggttcctaggaaaatgtcccaagaagctctcggaaggagatggcgctgagaagcttcggaagctgcagccctcacttaacagtgggcggctcctacatctagccatgcgaggtcttggggagctgggcgcccagccccaacaggaccatgcacgctggccccggggcagcagcctgtccgagtgcagtgagggggatgtcaccatggccaacaccatggaggagattctggaagagagtgagatctagggtggagttccaccaccctggctctgctcccagggactcttgagggggcccaggaagaggaagcaaagcaggacacacgttgctgggcacggaatcattctcgttccattcaccatgccactttgatatgaaagctatcacaaggttcttcaagctctgtatgaaagaggctgtgtgtcatgctcacagcctctgcctgctcttctcatcctaataacccccaccagtgtgttttccacaatgcccaccagaccctagggcctggctctaaattcaagccaatgaagtcccaccatgaagagaggtctcctgttatagagaagccagccaatatctcttcctttatcccttggggtgcatgctttccatctgaggttgggtttagggtgcgtgaaaacctcctaggaagcttttaaaatgcagaatcctagacttgtggctaagattctaagacagtgagtctgggaccatggccaggaattggagctgtttaataagcatcccaggtaattctgctgcaagcccacccttggagaacactgggcagggtgagagggagctagaagcgcccccatgtggccatggcaggatgctgcaagagacagtctgctctcccaggtcagctggggtgtgcctgccctccttggagagtatgtaactccacccaccagagtgccactcctctctgctcttcctctcctatcaagtcttgcctctctctctctttgcctcagttctctgtccctgcacagcaggagttctgcttgatcctccctttgaggattggccccagtgcctggggaccctctgaatgtcgtctttggtctgttcctctcctttctggctctatctacctttctgagtttggcttctaccagcctgatttacactaccattctcttggggcaaggaatgtccccaccatttttggtttgccattgatgcattgattgtcacacctgttgtcccaggaagttgacctataactctccatggccagagtccctgctgatcagaattcaatttgcccagtgggaataaatactgaaagcaggagggcccaggtaaagcaataggagtttggctggatctggacatgcccagggtggctctgagagatccaagactttgcatccaccagcctgtgggatctttcctgcctactgtgacccatggaggctgaggagggcccaggcagttggggtcaggctcaatgactgaaagtatagggcaagaggctgtaggaagatcaagggatggacatcctttggaaacagtgtgttaatgcacaggagtgtcactttcatggtatgtaaaatgcatgtgtacgtgggtggggtatgttgctatgggactaaataccaccttgtcttcgggggagtcagtttgatactcctcaagcagggctgccatatttagcaaacaaaaacaaggtactcaattaaatttgaatttcagacaaatagtcttcttgtataagtatatcccatgggcatatttaatctgagattggaattcaatcatgcatcttgtcttttactggcatctctgttttcaaggatactttgccacagggctgggactagggtgaaataatcaaggcactcatctctaaaaagctcaaagtaaatgatcaaaataaatcatattttaatgcaatattctaaaaaaacaaattaacaaactacagcccatgagccatttatagaaatgaaatttgattggagccaggggcaggataagggtgaggcaggagaggccagctcttgcaagtgcaggctctggtcctgactttcaaatgttgtctatgagggacttttaatgtgaatttttatttttagacaattgcattaaaatgttatttatattgactatggggacttttggggcccccttaaattttgcacttgaaatgggatccccacttgtgtcaccccatagtccagccctggttttaggatggggatggaggcaaaggcatcaggcaagtaatgaagcaaaggtttattttttggtgtccagattatccatagctcagtcatgaaaatctatgtctttctatttttctcctttctgcaaatgtccctgcctcggctcatcagccaattagctcctagaaagctggggtcatctcgtattcccagcaagtacccagcacagtgccggttcagagcaggtgctccacacacattcctggaatgagacagcacagaaatggctctcgggagcctcggatgctgctgggagtaagtgatccaggaccttaccgctaagaggagaaactttttttcaaagcatttataaatactccctccacccctcactccacaaatggggtgatcaacacttactgcttgctcttgttctgctaatgattaaaacaagtttatttaattt

SEQ ID NO: 12156 - DNA, 1641 bp, Homo sapiens
  source 1..1641: mol_type = unassigned DNA
gaggagattttgcctttgtggttagcctcagcccagcctggacaagcttaatgccttagaaagaaataccctgcctcaaaaagacacctgcctctaaactggctcgagccccatcgccttctgccagccattcctctgtagctcgaaccccagcctgtctcagccagcttcgtgcattgagcagaaccttcagggtggagcccgctgaccgccttgttctttctcctcagcctgtcaaggaagtcccagaaagcacagctgacttagggaaggtctgggaaaaatctccctgcttttgggggggcaggggcgggggatgagccagggccgagaaggaactctgaagactccgtagattgctctagaccgcctcagacactctcggcgcagcgtggagaggatttgtgcaaacatttcctctgtggaccaagaggaatgcaagaggaggctgcctgcggtgcatcttggacggctagagagatgtacccctacttgtgaaggtgcacgaggaagatgaagctgggatcgagcagggcagggcctgggagaggaagcgcgggactcctgcctggcgtccacgagctgcccatgggcatccctgccccctgggggaccagtcctctctccttccacaggaagtgctctctctgggcccctgggaggcccttcctcactctggtcctgctggtttccatcaagcaagttacaggatccctccttgaggaaacgactcggaagtgggctcagtacaaacaggcatgtctgagagacttactcaaggaaccttctggcatattttgtaacgggacatttgatcagtacgtgtgttggcctcattcttctcctggaaatgtctctgtaccctgcccttcatacttaccttggtggagtgaagagagctcaggaagggcctacagacactgcttggctcaggggacttggcagacgatagagaacgccacggatatttggcaggatgactccgaatgctccgagaaccacagcttcaagcaaaacgtggatcgttatgccttgctgtcaaccttgcagctgatgtacaccgtgggatactccttctctcttatctccctcttcctggctctcaccctcctcttgtttcttcgaaaactccactgcacgcgcaactacatccacatgaacttgtttgcttctttcatcctgagaaccctggctgtactggtgaaggacgtcgtcttctacaactcttactccaagaggcctgacaatgagaatgggtggatgtcctacctgtcagagatgtccacctcctgccgctcagtccaggttctcttgcattactttgtgggtgccaattacttatggctgctggttgaaggcctctacctccacacgctgctggagcccacagtgcttcctgagaggcggctgtggcccagatacctgctgttgggttgggccttccctgtgctatttgttgtaccctggggtttcgcccgtgcacacctggagaacacagggtgctggacaacaaatgggaataagaaaatctggtggatcatccgaggacccatgatgctctgtgtaacagcacttggactagaggaaacgggcttgaagagaaatgggagcattccctttggtcacaaggaagacatttaa

SEQ ID NO: 12157 - DNA, 2175 bp, Homo sapiens
  source 1..2175: mol_type = unassigned DNA
gaggagattttgcctttgtggttagcctcagcccagcctggacaagcttaatgccttagaaagaaataccctgcctcaaaaagacacctgcctctaaactggctcgagccccatcgccttctgccagccattcctctgtagctcgaaccccagcctgtctcagccagcttcgtgcattgagcagaaccttcagggtggagcccgctgaccgccttgttctttctcctcagcctgtcaaggaagtcccagaaagcacagctgacttagggaaggtctgggaaaaatctccctgcttttgggggggcaggggcgggggatgagccagggccgagaaggaactctgaagactccgtagattgctctagaccgcctcagacactctcggcgcagcgtggagaggatttgtgcaaacatttcctctgtggaccaagaggaatgcaagaggaggctgcctgcggtgcatcttggacggctagagagatgtacccctacttgtgaaggtgcacgaggaagatgaagctgggatcgagcagggcagggcctgggagaggaagcgcgggactcctgcctggcgtccacgagctgcccatgggcatccctgccccctgggggaccagtcctctctccttccacaggaagtgctctctctgggcccctgggaggcccttcctcactctggtcctgctggtttccatcaagcaagttacaggatccctccttgaggaaacgactcggaagtgggctcagtacaaacaggcatgtctgagagacttactcaaggaaccttctggcatattttgtaacgggacatttgatcagtacgtgtgttggcctcattcttctcctggaaatgtctctgtaccctgcccttcatacttaccttggtggagtgaagagagctcaggaagggcctacagacactgcttggctcaggggacttggcagacgatagagaacgccacggatatttggcaggatgactccgaatgctccgagaaccacagcttcaagcaaaacgtggatcgttatgccttgctgtcaaccttgcagctgatgtacaccgtgggatactccttctctcttatctccctcttcctggctctcaccctcctcttgtttcttcgaaaactccactgcacgcgcaactacatccacatgaacttgtttgcttctttcatcctgagaaccctggctgtactggtgaaggacgtcgtcttctacaactcttactccaagaggcctgacaatgagaatgggtggatgtcctacctgtcagagatgtccacctcctgccgctcagtccaggttctcttgcattactttgtgggtgccaattacttatggctgctggttgaaggcctctacctccacacgctgctggagcccacagtgcttcctgagaggcggctgtggcccagatacctgctgttgggttgggccttccctgtgctatttgttgtaccctggggtttcgcccgtgcacacctggagaacacagggtgctggacaacaaatgggaataagaaaatctggtggatcatccgaggacccatgatgctctgtgtaacagtcaatttcttcatcttcctgaaaattctcaagcttctcatttctaagctcaaagctcatcaaatgtgcttcagagattataaatacagattggcaaaatcaacactggtcctcattcctttattgggcgttcatgagatcctcttctctttcatcactgatgatcaagttgaaggatttgcaaaacttatacgacttttcattcagttgacactgagctcctttcatgggttcctggtggccttgcagtatggttttgccaatggagaggtgaaggctgagctgcggaaatactgggtccgcttcttgctagcccgccactcaggctgcagagcctgtgtcctggggaaggacttccggttcctaggaaaatgtcccaagaagctctcggaaggagatggcgctgagaagcttcggaagctgcagccctcacttaacagtgggcggctcctacatctagccatgcgaggtcttggggagctgggcgcccagccccaacaggaccatgcacgctggccccggggcagcagcctgtccgagtgcagtgagggggatgtcaccatggccaacaccatggaggagattctggaagagaagagaagccag

SEQ ID NO: 12158 - DNA, 1758 bp, Homo sapiens
  source 1..1758: mol_type = unassigned DNA
acgccacggatatttggcaggatgactccgaatgctccgagaaccacagcttcaagcaaaacgtggatcgttatgccttgctgtcaaccttgcagctgatgtacaccgtgggatactccttctctcttatctccctcttcctggctctcaccctcctcttgtttcttcgaaaactccactgcacgcgcaactacatccacatgaacttgtttgcttctttcatcctgagaaccctggctgtactggtgaaggacgtcgtcttctacaactcttactccaagaggcctgacaatgagaatgggtggatgtcctacctgtcagagatgtccacctcctgccgctcagtccaggttctcttgcattactttgtgggtgccaattacttatggctgctggttgaaggcctctacctccacacgctgctggagcccacagtgcttcctgagaggcggctgtggcccagatacctgctgttgggttgggccttccctgtgctatttgttgtaccctggggtttcgcccgtgcacacctggagaacacagggtgctggacaacaaatgggaataagaaaatctggtggatcatccgaggacccatgatgctctgtgtaacagcacttggactagaggaaacgggcttgaagagaaatgggagcattccctttggtcacaaggaagacatttaaccatgaacttgtaaaacactgacatataccccagagaaaggcattagatcttcatgtctatcagtttacaagaagataatctgtcctgaacaataaggagctaaacctgctgccctcccaatctgcacagctctaggattctaggactctgtgcattggttctagggctccccagagagtggaatttatgtgtcccaccagacatggaagggaaaagaaaggccatgcagaaagaagtgaaagaggcaggctaggagtcaggagcctgggctctatgactgacttgtgatgtgtccttcagccaggtgagttggcctctctgggcctctgtttcttcatctatgaaatcagtcttgaactagaccagtggttttcaaccagaggagattctgacccctggggacatttggctgtgtctggagacatttttaattgtcataaattggggatggggataggaggagaatgttgctactggcatctagtgggtggaggtcagggatgctgctcaacaccctacaacacacagaaccacccccagaataaataattatcctgccccaaatattaagagtgccaacattgaaaaaccctggactagacagtagctgcacattaaaacaacctggggaggattaaaaaaatacccagcccagacttacccagactgatggaatcaaatctcctgccatgtagagcttccttagcactggaatctcattcagccactctcttgtatcttcctttagcattcattgagcaccttcactgggcttggcttggtgctaggttatttcagagtttctatcctcagggaattcagaatttaatagttatcattctgagactcatcagactatgactgaaccaatatctgccttcatttttggtcatatgaccacatgttgcaattttccactgatctgaatagacataaccccaactctaaaagagaattccttaaaccacaacgtggaaggaacctggattcctgaatgactgtatggagcagaactccctccactgcactagactgtgacataaccaataaaataaaataagataaaataaa

SEQ ID NO: 12159 - DNA, 4743 bp, Homo sapiens
  source 1..4743: mol_type = unassigned DNA
ttagttgccattcggagtgaggagtgggtagaagcggcggcggcggcggcggcgtttgcggtggcgcggactccgaggagcgccagcacctcgaggccctttctctctaccctggtccccagaagcaggggtcccggccctccttgcagctgccgggttctcccgtgcgtgcagccctgcgagggctgaggagaaggctgcgagcggccctcggggctgcgtgatccgggccgttgccctgtcagcacgatgcctggagcggtggcggcggcggctccgggctccttgcggccccggccgtgaccgccacaccgagcccagccgggcggttgcggccgttggacgtttgttttcgcagccttcccctcccccctcgccgaggcggcgggggtgtgcgttggggagggggagccccgagactcctcccccacagcgatacccccgcccctcccccttacacactcgcacgcactatcgcgccggctcccacacgctcgcgcgcctcccgccccgcgcctccgtgtcggccggcggcgtccagggcccgcagagccaccatgtccactgcctcctcctcctcctcctccagttcctctcagacccctcatcccccgtcgcagaggatgaggcgcagcgccgcggggtccccgcccgccgtcgccgccgccgggagcgggaacggtgcgggcggcggcggcggcgtgggctgcgccccggctgcgggagccggccggctgctgcagcccatccgcgccacggtgccctaccagctcttgcggggcagccagcacagtcccacgcgtccgcccgtcgccgctgccgccgcctcgctgggcagcctcccggggcccggcgcggcccgcggccccagcccgtccagcccgacgccgccggcggccgcagccccggccgagcaggcgccgcgggccaagggccgcccgagacggtccccagagagccaccggaggagcagctcacctgagagacggagccccggctcgcccgtgtgcagagcggacaaggcaaaatctcagcaagttcggacctctagtacaataaggcgaacctcctctttggatacaataacaggaccttacctcacaggacagtggccacgggatcctcatgttcactacccttcatgcatgaaagacaaagctactcagacacctagctgttgggcagaagagggtgcagaaaagaggtcacatcagcgttctgcgtcatgggggagtgctgatcaactaaaagagcagatcgccaaactgaggcagcaactacaacgcagtaaacagagtagtcgtcacagtaaggagaaagatcgccagtcacctcttcatggcaaccatataacaatcagtcacactcaggctactggatcaaggtcagttcctatgccactgtcaaatatatcagtgccaaaatcatctgtttcgcgtgtgccctgcaatgtagaaggaataagtcctgaattagaaaaggtattcattaaagaaaataatgggaaggaagaagtatccaagccgttggacataccagatggtcgaagagctccacttcctgctcattaccggagcagtagtactcgcagcattgacactcagactccttctgtccaggagcgcagcagtagctgcagcagtcattcaccctgtgtctcccctttttgtcccccggaatcccaggatggtagcccttgctcaacagaagatttgctctatgatcgtgataaagacagtgggagtagctcaccgttacccaagtatgcttcatctcccaaaccaaacaacagctacatgttcaaacgggagcccccagagggatgtgagcgagtgaaggtctttgaggaaatggcgtctcgtcagcctatctcggcccctctcttttcatgtcctgacaaaaacaaggttaatttcatcccaaccggatcagctttctgtcctgtaaaacttctaggccccctcttacctgcttctgaccttatgctcaagaactcccctaactctggccagagctcagctttggcaactctgaccgttgagcagctctcatcccgggtttcctttacgtctctttctgatgacaccagcacagcgggctccatggaggcctctgtccagcagccatcccagcagcagcagctcctgcaggaactgcagggtgaggaccacatctctgctcagaactatgtgatcatctaaaaaagggggagctggcctccaccctatgttccatggattcggaacaagatttcagacatctgcatgagtgacaaactttctgaacaccaccaccaccaataatacttatcagcatcataaagtatctcttaaacactgatcttggcagggacggaactcctattcagcagtttttgtggaaagcagtaatgcttgcaaaacgtgtgtgtcattcagcattttaagtggagactatgcatttcatagtatatttgacagattagtactgtgtcctgtgttttgttccagattcttcagtataaataagctctatatcaaaaagttgcctgtctaaatagaaaatgtcttgctgtgttttgtcctatggaaaatactgtaattcaggattatgtttacaattgatccaggtgtttgtttctaacttctgtaatacatacaatgcaaaaaaaaaaaaaaaaaaatggccacaacagttgcacagtgcccaccctatggcctagcttcaggtacttcagttgaagtctaaactcaggtaacttggaatgtatatcatattgggatattaaatatttcacagctaaaaagctaaagagggaacatcactcttttgcctttccttattttatgcatttccctttcctcattacattccacattcttagaataagaagtgcattcaatcctaggagaatgataatcctggacatgggtgaacatgaggagaaccagcaaaatctgtggtgtttgacatcactttgtcatgtggttacaagtaaaacaactgttgcattcactgtttcaacatgtgtacatgtggcttttttaaaagttcaggtgttgctcagtaaaggactgtgacaatgttgcaaataaagtgttcagtactggactgtacataaacattccacattgtgtgtgatgaaatttaaagacaagaatgtctagagttaatttcaaaataagtgaagtgtttgacggaatggttgagatttttttgtttatgttagccatcagggtcataactgttaccattttatctaaagacatatttatatttagtttctcccttggaaattctttattttgcaggtgaaaaagtgacatactttttgttattgtcttcctcaagcagtttaggtgcatgatcttcatttacatagaatacttgggtctcagaattgatgcaacataagcaggtttttttggtgacttacaagagcaatagtttgaagctatctcatttaagcctctcataatgcataatcatgagtagttttgaaatttgcaacctgtgaggtagagcataaactcaagaaaatagccttgaacttgcagacttttgacacaagttctccacaaagtgtgaagagagccccaggcattcctgattggtcaatgggagagcctaactttcattgttttcttcagtacaaagagtatccaaaagctaagtttttgtattccactactttcagttcaataaaacctagagttgtttcatctgcgcctaaagtgtatggcacaattttcttaagaattaggggaaccaggtgcctacagttaaaggaacgtttcagttcctttcattcattcctgggtttttcttttattttctaagaaggttgaagaaggatgagtgatagagaagaaagcaacaccattgatttttttttttaagaaatgatatatatatgtatatgtttgtgtgtgtgtgtgtgtgtgtgtgtgtgtgtattctgtgcattattttgtcatgatctcaattctcttctttccaccaaagtttgtcgtaatattttctcctgaaggtgcattctggctcctttaaattagtcagtgttatattgtaggagactgtcatggaaaaaaggactcagtttactttcgtcattttcacaggggaaccttttaaaacaatcttttcagcagcagatacctttaaccctaataatctcaggccttgatgaaaatactatattttgtagattatggttaaagggggaaaattactagttccgtaagataaatatgagctccatttgacttctgatgtctggtttagcattacataatatgttgatcttacactctgcttttgtccaaataaaatgcaatagtatcaatatcaatttcagaaaaatggactgaatatgcttttttggtgatgaaatctcatgtacgatatttatagtgatgtgcttttattttctcatgagatactaaatattaattgtgttgtacatttgttcttagcatatattaaagttttgaaccaaatgtgttaaagcttacgctttgccatgtaaatttcccagaagttgttgagctcaaatgtatcctacatccagctgtagaaatttgtcagaaattgtttaaattttgtatataattgtactgtttaattctagccattgcgctgaacagtatttgagttaccatataatatggctttacacaaggaaatgtgtggcttttgttttgtattttttcagtatagaagttcctgtgtcttatttaaataaagttattagtaaaactgaaa

SEQ ID NO: 12160 - DNA, 1912 bp, Homo sapiens
  source 1..1912: mol_type = unassigned DNA
gcgcatgctccgtcgcctgcccgccctggccgctcgccgcccgcccgcccgacggagacgcagtcccagctatctgacttcatgtgaaagatggctaatgcagaagtgagtgtcccagtgggggatgtggttgtggtacctactgaaggaaatgaaggggagaatcctgaagacactaaaacccaagtgattttgcagttacagcctgtgcaacaaggtttgtttatcgatggacacttttacaacaggatttatgaagctgggtcggagaacaacacggcagttgtagcagtagaaactcacacgatacacaaaattgaagaagggattgatacaggcactatagaagcaaatgaggatatggaaattgcttaccccataacttgtggggagagcaaagccatcctcctctggaagaagtttgtatgtccaggaataaacgtgaagtgtgtcaagttcaatgatcagttgatcagccccaagcactttgttcatctggctggcaagtccactctgaaggactggaagagagctattcgtctgggtgggatcatgctcaggaaaatgatggactccggacagattgatttttaccaacatgacaaagtttgctccaatacctgcagaagcaccaaatttgatcttctgatcagcagtgcaagagctccagtgccaggacagcagacaagtgtggtgcagacacccacttcggctgatggtagcatcacgcagattgccatctcagaagagagcatggaagaggcagggctggaatggaactcagctctcaccgctgctgtcaccatggccacggaggagggtgtaaagaaagactcagaggaaatttcagaggacactttgatgttctggaaaggaatagctgatgtagggctgatggaagaggttgtctgcaatatacagaaggaaatagaggagctactcaggggagttcagcagcggctcatccaggctcccttccaagtcacagatgctgctgttctcaacaatgtagcacacacatttggcctaatggacacagtcaagaaggttttagacaacagaaggaaccaagtagagcagggagaagaacagtttctctatactctgacagacttggaacgccagttggaggagcagaagaagcaaggccaggatcacaggctgaaatctcagacagttcaaaatgtggtactgatgcctgtgagcactcctaagcctccaaaaaggccccggctccagcggccagcctccaccactgtcttgagcccttctcctcctgtccagcagcctcagttcacagtcatctcacccatcaccatcaccccagtgggtcagtcattttccatgggcaatattccagtggccaccctcagccagggctccagtcctgtgactgtccacacactgccttctggccctcagctcttccgctatgccacagtggtctcctctgccaagagcagctcaccagacacagtgaccatccacccttcatctagcttggcgctgctgagctctactgccatgcaggatgggagtacactgggcaacatgaccaccatggttagccctgtggaattggtggccatggagtccggcctaacctcggcaattcaggctgttgaaagcacctcagaggatgggcagaccatcattgagattgatccagccccggacccagaagctgaagatactgagggcaaagcagtcatcttggagacagagctgaggactgaggagaaagttgtggctgagatggaagaacaccagcatcaagttcacaatgtggagattgtggtcttagaggattaactggggatctcagggccaggagttatgttttgatttggaattttaattatttgtttatttttatcattgtcccactcatttccacataggaccctttttt

SEQ ID NO: 12161 - DNA, 1894 bp, Homo sapiens
  source 1..1894: mol_type = unassigned DNA
ctgcgcatgctccgtcgcctgcccgccctggccgctcgccgcccgcccgcccgacggagacgtcccagctatctgacttcatgtgaaagatggctaatgcagaagtgagtgtcccagtgggggatgtggttgtggtacctactgaaggaaatgaaggggagaatcctgaagacactaaaacccaagtgattttgcagttacagcctgtgcaacaagggatttatgaagctgggtcggagaacaacacggcagttgtagcagtagaaactcacacgatacacaaaattgaagaagggattgatacaggcactatagaagcaaatgaggatatggaaattgcttaccccataacttgtggggagagcaaagccatcctcctctggaagaagtttgtatgtccaggaataaacgtgaagtgtgtcaagttcaatgatcagttgatcagccccaagcactttgttcatctggctggcaagtccactctgaaggactggaagagagctattcgtctgggtgggatcatgctcaggaaaatgatggactccggacagattgatttttaccaacatgacaaagtttgctccaatacctgcagaagcaccaaatttgatcttctgatcagcagtgcaagagctccagtgccaggacagcagacaagtgtggtgcagacacccacttcggctgatggtagcatcacgcagattgccatctcagaagagagcatggaagaggcagggctggaatggaactcagctctcaccgctgctgtcaccatggccacggaggagggtgtaaagaaagactcagaggaaatttcagaggacactttgatgttctggaaaggaatagctgatgtagggctgatggaagaggttgtctgcaatatacagaaggaaatagaggagctactcaggggagttcagcagcggctcatccaggctcccttccaagtcacagatgctgctgttctcaacaatgtagcacacacatttggcctaatggacacagtcaagaaggttttagacaacagaaggaaccaagtagagcagggagaagaacagtttctctatactctgacagacttggaacgccagttggaggagcagaagaagcaaggccaggatcacaggctgaaatctcagacagttcaaaatgtggtactgatgcctgtgagcactcctaagcctccaaaaaggccccggctccagcggccagcctccaccactgtcttgagcccttctcctcctgtccagcagcctcagttcacagtcatctcacccatcaccatcaccccagtgggtcagtcattttccatgggcaatattccagtggccaccctcagccagggctccagtcctgtgactgtccacacactgccttctggccctcagctcttccgctatgccacagtggtctcctctgccaagagcagctcaccagacacagtgaccatccacccttcatctagcttggcgctgctgagctctactgccatgcaggatgggagtacactgggcaacatgaccaccatggttagccctgtggaattggtggccatggagtccggcctaacctcggcaattcaggctgttgaaagcacctcagaggatgggcagaccatcattgagattgatccagccccggacccagaagctgaagatactgagggcaaagcagtcatcttggagacagagctgaggactgaggagaaagttgtggctgagatggaagaacaccagcatcaagttcacaatgtggagattgtggtcttagaggattaactggggatctcagggccaggagttatgttttgatttggaattttaattatttgtttatttttatcattgtcccactcatttccacataggacccttttttaaaaaaaaaaaaa

SEQ ID NO: 12162 - DNA, 6410 bp, Homo sapiens
  source 1..6410: mol_type = unassigned DNA
aagcccggcctggcggcggcggtggcggtagctgccgtggcggcctctgcgcatgctccgtcgcctgcccgccctggccgctcgccgcccgcccgcccgacggagacgcagtcccagctatctgacttcatgtgaaagatggctaatgcagaagtgagtgtcccagtgggggatgtggttgtggtacctactgaaggaaatgaaggggagaatcctgaagacactaaaacccaagtgattttgcagttacagcctgtgcaacaagggatttatgaagctgggtcggagaacaacacggcagttgtagcagtagaaactcacacgatacacaaaattgaagaagggattgatacaggcactatagaagcaaatgaggatatggaaattgcttaccccataacttgtggggagagcaaagccatcctcctctggaagaagtttgtatgtccaggaataaacgtgaagtgtgtcaagttcaatgatcagttgatcagccccaagcactttgttcatctggctggcaagtccactctgaaggactggaagagagctattcgtctgggtgggatcatgctcaggaaaatgatggactccggacagattgatttttaccaacatgacaaagtttgctccaatacctgcagaagcaccaaatttgatcttctgatcagcagtgcaagagctccagtgccaggacagcagacaagtgtggtgcagacacccacttcggctgatggtagcatcacgcagattgccatctcagaagagagcatggaagaggcagggctggaatggaactcagctctcaccgctgctgtcaccatggccacggaggagggtgtaaagaaagactcagaggaaatttcagaggacactttgatgttctggaaaggaatagctgatgtagggctgatggaagaggttgtctgcaatatacagaaggaaatagaggagctactcaggggagttcagcagcggctcatccaggctcccttccaagtcacagatgctgctgttctcaacaatgtagcacacacatttggcctaatggacacagtcaagaaggttttagacaacagaaggaaccaagtagagcagggagaagaacagtttctctatactctgacagacttggaacgccagttggaggagcagaagaagcaaggccaggatcacaggctgaaatctcagacagttcaaaatgtggtactgatgcctgtgagcactcctaagcctccaaaaaggccccggctccagcggccagcctccaccactgtcttgagcccttctcctcctgtccagcagcctcagttcacagtcatctcacccatcaccatcaccccagtgggtcagtcattttccatgggcaatattccagtggccaccctcagccagggctccagtcctgtgactgtccacacactgccttctggccctcagctcttccgctatgccacagtggtctcctctgccaagagcagctcaccagacacagtgaccatccacccttcatctagcttggcgctgctgagctctactgccatgcaggatgggagtacactgggcaacatgaccaccatggttagccctgtggaattggtggccatggagtccggcctaacctcggcaattcaggctgttgaaagcacctcagaggatgggcagaccatcattgagattgatccagccccggacccagaagctgaagatactgagggcaaagcagtcatcttggagacagagctgaggactgaggagaaagttgtggctgagatggaagaacaccagcatcaagttcacaatgtggagattgtggtcttagaggattaactggggatctcagggccaggagttatgttttgatttggaattttaattatttgtttatttttatcattgtcccactcatttccacataggacccttttttaaaaaaaaaaaaacaaaatcttattgttgtaactgaaaatgttgggttcttcccactccctcattgaaaaatggacaaaacaagctgcccttccagaagttgagagtaggtcattcaatgtcctaatcatcttacaccaagaaagtaatttcttttaggggaagtgtcaagataacaagtaaccctgtccagaaagccatttccaggctcgtctgtgtgtgtaggcatgtggttttattcttgtaaagatgcattgaccaaactctggaacacagatctgacactggaaggcaacccactcgcatgtggatgctgaagggcactttattttgtatcctgaaaagggcctacagaggccagtacaaaactctcaaacaaaaggaagttgactctgctttgaggggaaggtggcatgccagcactagcttaaaaagggaagtgctagccgggcgtggtggctcacgcctgcaatcccagcactttgggaggccgaggcgggtggatcacgaggtcaggagtttgagaccagcctggccaacatggtgaaaccccgtatctactaaaaatacgaaaaaaaaattagccgggtgtggtggcgggagcctgtaatcccagctattcaggaggccaaggcaggagaatcgcttgaacctgggaaggcagaggttgcagtgagccaagatcgcaccactgcactccagcctgggcaacaagagcgagactccatctcaaaaaaaaaaaaaaaaaaaagtgctttggcaagtatggggcagggaaatcatcttacttccagaggtgcaactgacgcctctggagatctccaaaagttagtaccgtgagtgccattttgagaagaaggtggtaataagtggaaggtacatctccacagagcaagtggcagcagtggcctgtggttttgcagaaatggaaagccaaggccgggtgcggtggctcatgcctgtaatcccagcactttgggaggccgaggtgggtgaatcacctgaggtcaggagtttgaggccagcctggccaacatggtgaaaccccgtctctactgaaaatacaaaaaaaaaaaattagctgggcatggtggcacgcgcctgtaatcccagctacttgggaggctgaggcaggagaattgcttgaacctgggaggcggaggttgcagtgagctgagatcatgccattgcactctagcctgggcgaggagtgaaactccgtctcaaaaaaaaagaaagaaatggaaagccaaggatgctgcagctgtgctttggggttcaaggtaatagcttaccttgttccacactttgtcaaagcactcaccctcctaagctaggaccagtccattcatttgaaactgtgcaatgtgatgtaaatggctctggttcttagactgtggctgtcacagggatggggctccaaggccatcattttcattgcatggctccaagagcagggagttcctcaatgaaaccagctgccttttttggtggggccatttttttggctttggaacccaaagcagccactcatttggtgcttcctcttgttctgccctccatccctcaactcttaatggcatctgtctcctagaacccacgctcttcagctttttggctgatttggagaacagtgacaggtgcctgcctgccttcgtccccttttagattcatttataccacagatgtttctgtgagatactgagatcataaaaagctttaggcttggcagagaggactcaacacccccaggctttcctgaggcaccaactagatgtctcttgagtgagctggactccctgggaaagaagcattgtctgcaacattatattataggaaatgtaccaggaatgtcaataataatgctttgggggggggggttattttgttttgttttgtttttaatgttgtttgtatatttagagctgggccattttccgtgctgcgatttcttctctttgaccctcttcagtgtttggggcaagagtggaccctggtttttatttctttgattgcattgtttactgcactaggaaaaatatagagatacagggaaactacagacaaatttaaggaaaaataggtcaaaaaagaaagcacacaccttaagagtgggaggaatatttttattaaaaacaaaacttggacctgtagtttttttttttcttttttatttttaagaaggcacctttcagaagccatgtttcttccaacagatgttggaaaccccatcgagcaagtaaaagttgcattctccatccctcagatggctgtatgtagtcaaagaaaccctgtaacatggtaaggttgctgttttttttttttttttctttttgagatggagtcttgctctgtagcccaggctggagtgcaatggtgtgatctcagctcactgcaacctccgcctccttggttcaagtgattctcctgcctcagcctcctgagtagctgggattacaggctcccaccaccacgcccgggtaatttttgtatttttagtagagacggggttttgccatgttggccaggctggtcttgaactcctgacctcaagcgatccgcccgccttggcctcccaaagtgttgggattacaggcatgagccaccgcacccagcctgaaggtgactcttaagaatgagatttatgaactccatacagttgtagatttcagtttttaaatagtctggggttttatttttcttttcaaaatatctaatagacttagcaatcaatttagaacaaatatttggcccttaatatatctttagtgagggaagtagcttttatttcctgcttgtttaggttttctgttggtacataaaaacaaaattgctgtctcagactgaatctacttgaatctaggaaggcacatctcatccctattgtggtttttagggacacttttctctttcccagagatgagaggaccaattcaggacagaagagccctcgtgaataccaacgtgctagctcaggttcccttctttcctccatcagagctattggtagggttttaaggtcgtgtgtgcatcatgcttccaatgtcaagagatttcctcaaacagcctgtttactagatgaattttccagctggtgaaatacatgagctttgttgttttcctggtcttccaatagcctgtcattattgttagatattatggcacctgttgttgaatgtaggttcccttacagccctggtctagatgatcctagatggggtgagacatatgcaagccattggtatgtgcataagcagttgcaatgaaccttaggctgacttggtagtaggcatttgtctttctgttcatgcattgaataaacatttttaagaaccatctatgtgccaggctttgtgctaggcactgacagtagagagatgaagacatagtccttgcacttaaggaattcatactccagatgtctggagttaagaaatacatatttcagccaggcatggtggctcacacctagaatcccagcactttcagaagctgaggcagaattgcttgaggccaagagtttaagactagcctggtcaacatagccagaccccatctctataaaaaaatgtaaaaattagtcaagtcttgtggctcgcacttgtagacacaattactcaggatgctgaggcaagaggattttgcttgggcctaggagttcaaggctgtagtgagctatgactttgccactgtactctagcccaggtaacagggcaacatccccagctcagaaaaccaaaactacacatttcattataattgtttttttttgtaattttatgtattttatgcattgaaaaacattatttaagaattggttcataggtttcagcagactgccaaaggcacaaacaagcagctctcctttactgaggtactgaaacagatcctactgcgtaagtgctgtgtgtgatagggctattggctaggagctgagagaacaaagcatgaagtgcctaacccagcttagcggtgtagaggtggggtcagcaaataagggagatcttcctggagaaggcatatacctaagctgatttaggagagaccacttttggctaggtttattgtactacttgattttcaagtaattgggcttatttattctagagaaaaagtcttcagtctcttgcttctgcctgcaaagcaaggcagagtcagcaacatgggcagtctccccactggagaacgctgagtcatgcatgggcttctccaagtttccatcagatgggatccagtgttgaatccagtgcaggactggagtctagctggcaaagggtaaatgcccccaaagccttcctgccatatggtttccacgaaggcctgagagtcagctgtacaactgtcttgtcttggccatgtccctgtttggtccctgccttgttctcttccctttctcaatttccaagctccacccactcctaaaaacaccagtcattctgaagtaaaaaatggacaataaacatgaatattcaagattcaaa

SEQ ID NO: 12163 - DNA, 1124 bp, Homo sapiens
  source 1..1124: mol_type = unassigned DNA
ctggcggcggcggtggcggtagctgccgtggcggcctctgcgcatgctccgtcgcctgcccgccctggccgctcgccgcccgcccgcccgacggagacggatttatgaagctgggtcggagaacaacacggcagttgtagcagtagaaactcacacgatacacaaaattgaagaagggattgatacaggcactatagaagcaaatgaggatatggaaattgcttaccccataacttgtggggagagcaaagccatcctcctctggaagaagtttgtatgtccaggaataaacgtgaagtgtgtcaagttcaatgatcagttgatcagccccaagcactttgttcatctggctggcaagtccactctgaaggactggaagagagctattcgtctgggtgggatcatgctcaggaaaatgatggactccggacagattgatttttaccaacatgacaaagtttgctccaatacctgcagaagcaccaaatttgatcttctgatcagcagtgcaagagctccagtgccaggacagcagacaagtgtggtgcagacacccacttcggctgatggtagcatcacgcagattgccatctcagaagagagcatggaagaggcagggctggaatggaactcagctctcaccgctgctgtcaccatggccacggaggagggtgtaaagaaagactcagaggaaatttcagaggacactttgatgttctggaaaggaatagctgatgtagggctgatggaagaggttgtctgcaatatacagaaggaaatagaggagctactcaggggagttcagcagcggctcatccaggctcccttccaagtcacagatgctgctgttctcaacaatgtagcacacacatttggcctaatggacacagtcaagaaggttttagacaacagaaggaaccaagtagagcagggagaagaacagtttctctatactctgacagacttggaacgccagttggaggagcagaagaagcaaggccaggatcacaggctgaaatctcagacagttcaaaatgtggtactgatgcctgtgagcactcctaagcctccaaaaaggccccggctccagcggccagcctccaccactgtcttgagcccttctc

SEQ ID NO: 12164 - DNA, 4559 bp, Homo sapiens
  source 1..4559: mol_type = unassigned DNA
gcgaggacttcttggagtgctttctgcacctgaaactcagttcagggattggggctggctttgagttcaggccaggagagacggaagaactggcaagccgggagcctgcgtccagggaagttgcttggaattccaggcccctcctgtcctcctgctctgagccccacgtggagggagtggctctgtgctttctacccaagggtttcggcttatccagtgggaaaaacgggtggagtgcgcttacaccgccctcggaaccagagcctggagtagcccttctgttgccgctcgtttttgtcaggaggtagcagtctgggactcaagggtgggtctttggagctgattagagatgcctttgtgagtgctatgttgtgtggatgtggagatgactccatccctgtgccctgccttgcttcctccaggacttgggaccctggaggactgacgctgctggcctgggcgtccccttccgctgagccatggcgactcccgacgtgagtgtgcacatggaggaggtggtggttgtgacaactccggacactgcagtggacggcagtggtgtggagggggtgaagaccgtgttggtgacgaccaacttggcccctcacgggggcgacctgacggaagataacatggagacagaaaatgcagcggcagcagctgccgcggccttcacagcctcctcccagctcaaggaagccgtgttagtgaagatggctgaagagggggagaacctggaagctgagattgtgtaccccatcacctgtggagacagcagagccaacctcatctggaggaagtttgtgtgtcccggcatcaatgtgaaatgtgttcagtacgacgagcatgtaatcagcccaaaggaatttgtgcacctggccgggaagtccaccctgaaggactggaagagagccatccgcatgaacggcatcatgctcaggaagatcatggactccggggaactggacttctaccagcatgacaaggtctgctccaacacctgccgcagcacaaagattgacctctcaggagcccgtgtgtccctgagcagccccacgtcggccgagtacattcccctcacgcccgccgcagccgacgtgaatgggtctcctgcgaccatcaccatagagacctgtgaagaccctggcgactggaccgcggccattggagatgacacatttaccttctggcgggggctgaaggacgccggcctgctggacgaggtcatccaggagttccaccaggagctggtggagaccatgagaggcctgcagcagcgggtccaggaccctcccctgcagcttcgagatgctgtacttctcaacaacatcgtgcagaacttcggcatgctggacctggtgaagaaggtgctggccagccacaagtgccagatggaccgctcgcgggagcagtacgcccgggacctggcagccctggagcagcagtgtgatgagcatcgtcgccgagccaaggagctgaagcacaagtcccagcacctcagcaacgtgctcatgacgctgacgccggtctccctgccaccgcctgtgaagcggccccggcttgcacgtgccacatcaggaccggccgccatggcctcgcaggtgctcacccagtctgcccagctggcgcttggcccgggcgtgcccgtcccccagctgaccagcgtgccccttggtaaagtggtgtccaccctgccgtccaccgtcctgggcaagggttcccttcaggcgccccccgccagctccccggcctccccgctgctcgggggatacacagtcttggcctcttccggctccacctaccccagcacagtggagatccacccggacgcgtccagcctcacggtcctgagcacggccgccgtgcaggacggtagcacggtgttcaaggtggtcagcccgctacagctgctcacgttgcctggcctgggccccaccctgcagaacgtggcccaggcctcgcctggctccagcacaattgtgacagtgcccgcaggggctgcccccgggcctgaggagcacacggccaccattgaggtggctgccatggcagaggaccacgagcggaagtagccgacaggagggcgaggcccctgggacggacagggctggctgtctctcagccgcggcagcagggagcgggcagaggccgcagggctggctcgggcaggtgggtcacgtggtctgcagaaccaaagagaggaatcgccaaaacaaatcacgagaagagagaaggggacagaacagcgagagcaacctggaaaatcggtcttcaggtcccacgtttcctcccccttttttcttgggaaatatatttttccatctgttgcttattaatactgtttacacattgggccttgatcaggagccaggtgggcgggggctagggggagcctgggtgcagcagagacagaggaagcagagccaggtgccgagcgcgaccctgcaggtgctggacgcggtgcagcaggtcacgaggcccccatgtctgcacccagccaggtccctggggacgttactaactcatgacttgggagctaagcccaagtgtgaaacctctggatcctatggatttggtttcttcccacagttttctgtaggtttagtgtggctggcgccccgttctcctccagttgggaacatgcacccggagcttggggtgcagatcctgatgggtgcctgcctcccccgcccccagccggtgctcaggtggcccaggggccgcacagacgaggcgtggtccaggcattgttgcacatgtactgagggtgtttttaagtgaattgcttagtaggcttctaggaagagtcagatttatagcattttcaaccaaaataatggtgagtgcctaggcttcccgagttagctctttgggtggcccctgagcccctgtgagtgcacttgaccgggtgcggaggtcctgggcagcctgtccctgagccggcccctcccaggggtctgagatccatgaggtgtgtccctagggcttcagtcctggggcagaggcataaacagaaccagtcactatggaggtcgaggattcccatgtgggcccttcagcttgggctgcttggccacggaacagcccttggctccctggcccccggcccccatgcagcccctgggctggcccttggtggtctctgtccaagggagagcccctgggtgttcaggaggctgccccgggtgggctgctcagggcagctgccgaaggtggagcccagagcctgtctggaagggctgtctgtggctgtcctgagacctggccttggactcacaaggaagaccaggctgaggcccctccaggccagggtcctggggcaggcatctcagggagcagccagcccaggcctcctgccgtctccaacagggcatgtcccgggaggaccctgagtgccagattcccctggacgctcctgctgattctgtcggcagttgaaggcccgtctgaggccccgcaatgcgagggtcctgtgtcccacttcactgctccgaagggaactggctggctgtccgtccagtgagcggcccagaccccacctctgcgccattgtcaccagggccctgtcctggctgccctcacccatgtcaagctactgaggctgtgtcttgtttgttttctctgttacatttttgtttgctgttgtcacagtcagctggtttcggcgtgatgttgatcttttgatgtacatactccgttttaaactcatttccactctagttgagttctgcagcatgcagcggtatgaccctacgggggtcaggagagccctgcggcccccacccaccagctcagaacctgtcactaatacagctgcctgtgaccctgggacccgcaaccttccagctgcttccctttgtcaaagtcacgagtgcgtctgccttgacagccctcgtcaacagaacttccagtgggttgtgggttcatttcctttctttttaagaacagggttgggaccttttctgcccctgccccttagctactgaggcatagggagaggaagttaatttcagagccatacaaaaataagccacaaccagcttcagaattaattcccaatcccccattccaccagggctgggagcccattcccagtgcttcccaaggccctcggggacatctaccgccaacccagctgcttctggcaggggctccaagccccagcgtggggaagggccctggagaagccctcatcctcatgggaaccacactgcagtgggtggggaaggttgttgtcagcaccgcccccggctcctccaggtcctgctggctcctcgggggcagggttccctggacctcccagttctgcgccttggggccagccagtactcagagaggaggaccttctcaaccacgtacagaacacgggttttcatggctgcctttggtttggttttctgagaagataggattggattggattttgcagagggtgagaacttctctgtgcctgctcagaggcgccctagggaagggccatgtttgagttttgctttgtatgttgttttgcaagtatctgcctggtactttgatttaaaataaaaacaattttcatagtt

SEQ ID NO: 12165 - DNA, 4011 bp, Homo sapiens
  source 1..4011: mol_type = unassigned DNA
tgccctgcaggttgtgccctccgggatcctgattctattctctcctcccttcacttcaccaggggcgacctgacggaagataacatggagacagaaaatgcagcggcagcagctgccgcggccttcacagcctcctcccagctcaaggaagccgtgttagtgaagatggctgaagagggggagaacctggaagctgagattgtgtaccccatcacctgtggagacagcagagccaacctcatctggaggaagtttgtgtgtcccggcatcaatgtgaaatgtgttcagtacgacgagcatgtaatcagcccaaaggaatttgtgcacctggccgggaagtccaccctgaaggactggaagagagccatccgcatgaacggcatcatgctcaggaagatcatggactccggggaactggacttctaccagcatgacaaggtctgctccaacacctgccgcagcacaaagattgacctctcaggagcccgtgtgtccctgagcagccccacgtcggccgagtacattcccctcacgcccgccgcagccgacgtgaatgggtctcctgcgaccatcaccatagagacctgtgaagaccctggcgactggaccgcggccattggagatgacacatttaccttctggcgggggctgaaggacgccggcctgctggacgaggtcatccaggagttccaccaggagctggtggagaccatgagaggcctgcagcagcgggtccaggaccctcccctgcagcttcgagatgctgtacttctcaacaacatcgtgcagaacttcggcatgctggacctggtgaagaaggtgctggccagccacaagtgccagatggaccgctcgcgggagcagtacgcccgggacctggcagccctggagcagcagtgtgatgagcatcgtcgccgagccaaggagctgaagcacaagtcccagcacctcagcaacgtgctcatgacgctgacgccggtctccctgccaccgcctgtgaagcggccccggcttgcacgtgccacatcaggaccggccgccatggcctcgcaggtgctcacccagtctgcccagctggcgcttggcccgggcgtgcccgtcccccagctgaccagcgtgccccttggtaaagtggtgtccaccctgccgtccaccgtcctgggcaagggttcccttcaggcgccccccgccagctccccggcctccccgctgctcgggggatacacagtcttggcctcttccggctccacctaccccagcacagtggagatccacccggacgcgtccagcctcacggtcctgagcacggccgccgtgcaggacggtagcacggtgttcaaggtggtcagcccgctacagctgctcacgttgcctggcctgggccccaccctgcagaacgtggcccaggcctcgcctggctccagcacaattgtgacagtgcccgcaggggctgcccccgggcctgaggagcacacggccaccattgaggtggctgccatggcagaggaccacgagcggaagtagccgacaggagggcgaggcccctgggacggacagggctggctgtctctcagccgcggcagcagggagcgggcagaggccgcagggctggctcgggcaggtgggtcacgtggtctgcagaaccaaagagaggaatcgccaaaacaaatcacgagaagagagaaggggacagaacagcgagagcaacctggaaaatcggtcttcaggtcccacgtttcctcccccttttttcttgggaaatatatttttccatctgttgcttattaatactgtttacacattgggccttgatcaggagccaggtgggcgggggctagggggagcctgggtgcagcagagacagaggaagcagagccaggtgccgagcgcgaccctgcaggtgctggacgcggtgcagcaggtcacgaggcccccatgtctgcacccagccaggtccctggggacgttactaactcatgacttgggagctaagcccaagtgtgaaacctctggatcctatggatttggtttcttcccacagttttctgtaggtttagtgtggctggcgccccgttctcctccagttgggaacatgcacccggagcttggggtgcagatcctgatgggtgcctgcctcccccgcccccagccggtgctcaggtggcccaggggccgcacagacgaggcgtggtccaggcattgttgcacatgtactgagggtgtttttaagtgaattgcttagtaggcttctaggaagagtcagatttatagcattttcaaccaaaataatggtgagtgcctaggcttcccgagttagctctttgggtggcccctgagcccctgtgagtgcacttgaccgggtgcggaggtcctgggcagcctgtccctgagccggcccctcccaggggtctgagatccatgaggtgtgtccctagggcttcagtcctggggcagaggcataaacagaaccagtcactatggaggtcgaggattcccatgtgggcccttcagcttgggctgcttggccacggaacagcccttggctccctggcccccggcccccatgcagcccctgggctggcccttggtggtctctgtccaagggagagcccctgggtgttcaggaggctgccccgggtgggctgctcagggcagctgccgaaggtggagcccagagcctgtctggaagggctgtctgtggctgtcctgagacctggccttggactcacaaggaagaccaggctgaggcccctccaggccagggtcctggggcaggcatctcagggagcagccagcccaggcctcctgccgtctccaacagggcatgtcccgggaggaccctgagtgccagattcccctggacgctcctgctgattctgtcggcagttgaaggcccgtctgaggccccgcaatgcgagggtcctgtgtcccacttcactgctccgaagggaactggctggctgtccgtccagtgagcggcccagaccccacctctgcgccattgtcaccagggccctgtcctggctgccctcacccatgtcaagctactgaggctgtgtcttgtttgttttctctgttacatttttgtttgctgttgtcacagtcagctggtttcggcgtgatgttgatcttttgatgtacatactccgttttaaactcatttccactctagttgagttctgcagcatgcagcggtatgaccctacgggggtcaggagagccctgcggcccccacccaccagctcagaacctgtcactaatacagctgcctgtgaccctgggacccgcaaccttccagctgcttccctttgtcaaagtcacgagtgcgtctgccttgacagccctcgtcaacagaacttccagtgggttgtgggttcatttcctttctttttaagaacagggttgggaccttttctgcccctgccccttagctactgaggcatagggagaggaagttaatttcagagccatacaaaaataagccacaaccagcttcagaattaattcccaatcccccattccaccagggctgggagcccattcccagtgcttcccaaggccctcggggacatctaccgccaacccagctgcttctggcaggggctccaagccccagcgtggggaagggccctggagaagccctcatcctcatgggaaccacactgcagtgggtggggaaggttgttgtcagcaccgcccccggctcctccaggtcctgctggctcctcgggggcagggttccctggacctcccagttctgcgccttggggccagccagtactcagagaggaggaccttctcaaccacgtacagaacacgggttttcatggctgcctttggtttggttttctgagaagataggattggattggattttgcagagggtgagaacttctctgtgcctgctcagaggcgccctagggaagggccatgtttgagttttgctttgtatgttgttttgcaagtatctgcctggtactttgatttaaaataaaaacaattttcatagtt

SEQ ID NO: 12166 - DNA, 4223 bp, Homo sapiens
  source 1..4223: mol_type = unassigned DNA
gcggccgccgccgccgcccgccgccgccgcagctcccgacgccgccgcccccgccgggtgcctaagcaggcccggcgcggccccaggacttgggaccctggaggactgacgctgctggcctgggcgtccccttccgctgagccatggcgactcccgacgtgagtgtgcacatggaggaggtggtggttgtgacaactccggacactgcagtggacggcagtggtgtggagggggtgaagaccgtgttggtgacgaccaacttggcccctcacgggggcgacctgacggaagataacatggagacagaaaatgcagcggcagcagctgccgcggccttcacagcctcctcccagctcaaggaagccgtgttagtgaagatggctgaagagggggagaacctggaagctgagattgtgtaccccatcacctgtggagacagcagagccaacctcatctggaggaagtttgtgtgtcccggcatcaatgtgaaatgtgttcagtacgacgagcatgtaatcagcccaaaggaatttgtgcacctggccgggaagtccaccctgaaggactggaagagagccatccgcatgaacggcatcatgctcaggaagatcatggactccggggaactggacttctaccagcatgacaaggtctgctccaacacctgccgcagcacaaagattgacctctcaggagcccgtgtgtccctgagcagccccacgtcggccgagtacattcccctcacgcccgccgcagccgacgtgaatgggtctcctgcgaccatcaccatagagacctgtgaagaccctggcgactggaccgcggccattggagatgacacatttaccttctggcgggggctgaaggacgccggcctgctggacgaggtcatccaggagttccaccaggagctggtggagaccatgagaggcctgcagcagcgggtccaggaccctcccctgcagcttcgagatgctgtacttctcaacaacatcgtgcagaacttcggcatgctggacctggtgaagaaggtgctggccagccacaagtgccagatggaccgctcgcgggagcagtacgcccgggacctggcagccctggagcagcagtgtgatgagcatcgtcgccgagccaaggagctgaagcacaagtcccagcacctcagcaacgtgctcatgacgctgacgccggtctccctgccaccgcctgtgaagcggccccggcttgcacgtgccacatcaggaccggccgccatggcctcgcaggtgctcacccagtctgcccagctggcgcttggcccgggcgtgcccgtcccccagctgaccagcgtgccccttggtaaagtggtgtccaccctgccgtccaccgtcctgggcaagggttcccttcaggcgccccccgccagctccccggcctccccgctgctcgggggatacacagtcttggcctcttccggctccacctaccccagcacagtggagatccacccggacgcgtccagcctcacggtcctgagcacggccgccgtgcaggacggtagcacggtgttcaaggtggtcagcccgctacagctgctcacgttgcctggcctgggccccaccctgcagaacgtggcccaggcctcgcctggctccagcacaattgtgacagtgcccgcaggggctgcccccgggcctgaggagcacacggccaccattgaggtggctgccatggcagaggaccacgagcggaagtagccgacaggagggcgaggcccctgggacggacagggctggctgtctctcagccgcggcagcagggagcgggcagaggccgcagggctggctcgggcaggtgggtcacgtggtctgcagaaccaaagagaggaatcgccaaaacaaatcacgagaagagagaaggggacagaacagcgagagcaacctggaaaatcggtcttcaggtcccacgtttcctcccccttttttcttgggaaatatatttttccatctgttgcttattaatactgtttacacattgggccttgatcaggagccaggtgggcgggggctagggggagcctgggtgcagcagagacagaggaagcagagccaggtgccgagcgcgaccctgcaggtgctggacgcggtgcagcaggtcacgaggcccccatgtctgcacccagccaggtccctggggacgttactaactcatgacttgggagctaagcccaagtgtgaaacctctggatcctatggatttggtttcttcccacagttttctgtaggtttagtgtggctggcgccccgttctcctccagttgggaacatgcacccggagcttggggtgcagatcctgatgggtgcctgcctcccccgcccccagccggtgctcaggtggcccaggggccgcacagacgaggcgtggtccaggcattgttgcacatgtactgagggtgtttttaagtgaattgcttagtaggcttctaggaagagtcagatttatagcattttcaaccaaaataatggtgagtgcctaggcttcccgagttagctctttgggtggcccctgagcccctgtgagtgcacttgaccgggtgcggaggtcctgggcagcctgtccctgagccggcccctcccaggggtctgagatccatgaggtgtgtccctagggcttcagtcctggggcagaggcataaacagaaccagtcactatggaggtcgaggattcccatgtgggcccttcagcttgggctgcttggccacggaacagcccttggctccctggcccccggcccccatgcagcccctgggctggcccttggtggtctctgtccaagggagagcccctgggtgttcaggaggctgccccgggtgggctgctcagggcagctgccgaaggtggagcccagagcctgtctggaagggctgtctgtggctgtcctgagacctggccttggactcacaaggaagaccaggctgaggcccctccaggccagggtcctggggcaggcatctcagggagcagccagcccaggcctcctgccgtctccaacagggcatgtcccgggaggaccctgagtgccagattcccctggacgctcctgctgattctgtcggcagttgaaggcccgtctgaggccccgcaatgcgagggtcctgtgtcccacttcactgctccgaagggaactggctggctgtccgtccagtgagcggcccagaccccacctctgcgccattgtcaccagggccctgtcctggctgccctcacccatgtcaagctactgaggctgtgtcttgtttgttttctctgttacatttttgtttgctgttgtcacagtcagctggtttcggcgtgatgttgatcttttgatgtacatactccgttttaaactcatttccactctagttgagttctgcagcatgcagcggtatgaccctacgggggtcaggagagccctgcggcccccacccaccagctcagaacctgtcactaatacagctgcctgtgaccctgggacccgcaaccttccagctgcttccctttgtcaaagtcacgagtgcgtctgccttgacagccctcgtcaacagaacttccagtgggttgtgggttcatttcctttctttttaagaacagggttgggaccttttctgcccctgccccttagctactgaggcatagggagaggaagttaatttcagagccatacaaaaataagccacaaccagcttcagaattaattcccaatcccccattccaccagggctgggagcccattcccagtgcttcccaaggccctcggggacatctaccgccaacccagctgcttctggcaggggctccaagccccagcgtggggaagggccctggagaagccctcatcctcatgggaaccacactgcagtgggtggggaaggttgttgtcagcaccgcccccggctcctccaggtcctgctggctcctcgggggcagggttccctggacctcccagttctgcgccttggggccagccagtactcagagaggaggaccttctcaaccacgtacagaacacgggttttcatggctgcctttggtttggttttctgagaagataggattggattggattttgcagagggtgagaacttctctgtgcctgctcagaggcgccctagggaagggccatgtttgagttttgctttgtatgttgttttgcaagtatctgcctggtactttgatttaaaataaaaacaattttcatagtt

SEQ ID NO: 12167 - DNA, 2421 bp, Homo sapiens
  source 1..2421: mol_type = unassigned DNA
agtgcagaagccctgggctgccagcctcaggcagctctccatccaagcagccgttgctgccacaggcgggccttacgctccaaggctacagcatgtgctaggcctcagcaggcaggagcatctctgcctcccaaagcatctacctcttagcccctcggagagatggcgatggatgtcacaaggagccaggcccagacagccttgactctggtagagcagatcctggcagagttccagctgcaggaggaggacctgaagaaggtgatgagacggatgcagaaggagatggaccgcggcctgaggctggagacccatgaagaggccagtgtgaagatgctgcccacctacgtgcgctccaccccagaaggctcagaagtcggggacttcctctccctggacctgggtggcactaacttcagggtgatgctggtgaaggtgggagaaggtgaggaggggcagtggagcgtgaagaccaaacaccagatgtactccatccccgaggacgccatgaccggcactgctgagatgctcttcgactacatctctgagtgcatctccgacttcctggacaagcatcagatgaaacacaagaagctgcccctgggcttcaccttctcctttcctgtgaggcacgaagacatcgataagggcatccttctcaactggaccaagggcttcaaggcctcaggagcagaagggaacaatgtcgtggggcttctgcgagacgctatcaaacggagaggggactttgaaatggatgtggtggcaatggtgaatgacacggtggccacgatgatctcctgctactacgaagaccatcagtgcgaggtcggcatgatcgtgggcacgggctgcaatgcctgctacatggaggagatgcagaatgtggagctggtggagggggacgagggccgcatgtgcgtcaataccgagtggggcgccttcggggactccggcgagctggacgagttcctgctggagtatgaccgcctggtggacgagagctctgcaaaccccggtcagcagctgtatgagaagctcataggtggcaagtacatgggcgagctggtgcggcttgtgctgctcaggctcgtggacgaaaacctgctcttccacggggaggcctccgagcagctgcgcacacgcggagccttcgagacgcgcttcgtgtcgcaggtggagagcgacacgggcgaccgcaagcagatctacaacatcctgagcacgctggggctgcgaccctcgaccaccgactgcgacatcgtgcgccgcgcctgcgagagcgtgtctacgcgcgctgcgcacatgtgctcggcggggctggcgggcgtcatcaaccgcatgcgcgagagccgcagcgaggacgtaatgcgcatcactgtgggcgtggatggctccgtgtacaagctgcaccccagcttcaaggagcggttccatgccagcgtgcgcaggctgacgcccagctgcgagatcaccttcatcgagtcggaggagggcagtggccggggcgcggccctggtctcggcggtggcctgtaagaaggcctgtatgctgggccagtgagagcagtggccgcaagcgcagggaggatgccacagccccacagcacccaggctccatggggaagtgctccccacacgtgctcgcagcctggcggggcaggaggcctggccttgtcaggacccaggccgcctgccataccgctggggaacagagcgggcctcttccctcagtttttcggtgggacagccccagggccctaacgggggtgcggcaggagcaggaacagagactctggaagccccccacctttctcgctggaatcaatttcccagaagggagttgctcactcaggactttgatgcatttccacactgtcagagctgttggcctcgcctgggcccaggctctgggaaggggtgccctctggatcctgctgtggcctcacttccctgggaactcatcctgtgtggggaggcagctccaacagcttgaccagacctagacctgggccaaaagggcagccaggggctgctcatcacccagtcctggccattttcttgcctgaggctcaagaggcccagggagcaatgggagggggctccatggaggaggtgtcccaagctttgaatacccccagagaccttttctctcccataccatcactgagtggcttgtgattctgggatggaccctcgcagcaggtgcaagagacagagcccccaagcctctgccccaaggggcccacaaaggggagaagggccagccctacatcttcagctcccatagcgctggctcaggaagaaaccccaagcagcattcagcacaccccaagggacaaccccatcatatgacatgccaccctctccatgcccaacctaagattgtgtgggttttttaattaaaaatgttaaaagtttt

SEQ ID NO: 12168 - DNA, 2539 bp, Homo sapiens
  source 1..2539: mol_type = unassigned DNA
aagccctgggctgccagcctcaggcagctctccatccaagcagccgttgctgccacaggcgggccttacgctccaaggctacagcatgtgctaggcctcagcaggcaggagcatctctgcctcccaaagcatctacctcttagcccctcggagagatggcgatggatgtcacaaggagccaggcccagacagccttgactctgccagactctcctctgaactcgggcctcacatggccaactgctacttggaacaaatcgccccttggctggcagatgtgttaacatgcccagaccaagatcccaactcccacaacccaactcccaggtagagcagatcctggcagagttccagctgcaggaggaggacctgaagaaggtgatgagacggatgcagaaggagatggaccgcggcctgaggctggagacccatgaagaggccagtgtgaagatgctgcccacctacgtgcgctccaccccagaaggctcagaagtcggggacttcctctccctggacctgggtggcactaacttcagggtgatgctggtgaaggtgggagaaggtgaggaggggcagtggagcgtgaagaccaaacaccagatgtactccatccccgaggacgccatgaccggcactgctgagatgctcttcgactacatctctgagtgcatctccgacttcctggacaagcatcagatgaaacacaagaagctgcccctgggcttcaccttctcctttcctgtgaggcacgaagacatcgataagggcatccttctcaactggaccaagggcttcaaggcctcaggagcagaagggaacaatgtcgtggggcttctgcgagacgctatcaaacggagaggggactttgaaatggatgtggtggcaatggtgaatgacacggtggccacgatgatctcctgctactacgaagaccatcagtgcgaggtcggcatgatcgtgggcacgggctgcaatgcctgctacatggaggagatgcagaatgtggagctggtggagggggacgagggccgcatgtgcgtcaataccgagtggggcgccttcggggactccggcgagctggacgagttcctgctggagtatgaccgcctggtggacgagagctctgcaaaccccggtcagcagctgtatgagaagctcataggtggcaagtacatgggcgagctggtgcggcttgtgctgctcaggctcgtggacgaaaacctgctcttccacggggaggcctccgagcagctgcgcacacgcggagccttcgagacgcgcttcgtgtcgcaggtggagagcgacacgggcgaccgcaagcagatctacaacatcctgagcacgctggggctgcgaccctcgaccaccgactgcgacatcgtgcgccgcgcctgcgagagcgtgtctacgcgcgctgcgcacatgtgctcggcggggctggcgggcgtcatcaaccgcatgcgcgagagccgcagcgaggacgtaatgcgcatcactgtgggcgtggatggctccgtgtacaagctgcaccccagcttcaaggagcggttccatgccagcgtgcgcaggctgacgcccagctgcgagatcaccttcatcgagtcggaggagggcagtggccggggcgcggccctggtctcggcggtggcctgtaagaaggcctgtatgctgggccagtgagagcagtggccgcaagcgcagggaggatgccacagccccacagcacccaggctccatggggaagtgctccccacacgtgctcgcagcctggcggggcaggaggcctggccttgtcaggacccaggccgcctgccataccgctggggaacagagcgggcctcttccctcagtttttcggtgggacagccccagggccctaacgggggtgcggcaggagcaggaacagagactctggaagccccccacctttctcgctggaatcaatttcccagaagggagttgctcactcaggactttgatgcatttccacactgtcagagctgttggcctcgcctgggcccaggctctgggaaggggtgccctctggatcctgctgtggcctcacttccctgggaactcatcctgtgtggggaggcagctccaacagcttgaccagacctagacctgggccaaaagggcagccaggggctgctcatcacccagtcctggccattttcttgcctgaggctcaagaggcccagggagcaatgggagggggctccatggaggaggtgtcccaagctttgaatacccccagagaccttttctctcccataccatcactgagtggcttgtgattctgggatggaccctcgcagcaggtgcaagagacagagcccccaagcctctgccccaaggggcccacaaaggggagaagggccagccctacatcttcagctcccatagcgctggctcaggaagaaaccccaagcagcattcagcacaccccaagggacaaccccatcatatgacatgccaccctctccatgcccaacctaagattgtgtgggttttttaattaaaaatgttaaaagtttta

SEQ ID NO: 12169 - DNA, 2729 bp, Homo sapiens
  source 1..2729: mol_type = unassigned DNA
gagcaggaaatgccgagcggcgcctgagccccagggaagcaggctaggatgtgagagacacagtcacctgcagcctaattactcaaaagctgtccccaggtcacagaagggagaggacatttcccactgaatctgtctgaaggacactaagccccacagctcaacacaaccaggagagaaagcgctgaggacgccacccaagcgcccagcaatggccctgcctggagaacatccaggctcagtgaggaagggtccagaagggaatgcttgccgactcgttggagaacaatgaaaaggaggaaactgtgactgaacctcaaaccccaaaccagcccgaggagaaccacattctcccagggacccagggcgggccgtgacccctgcggcggagaagccttggatatttccacttcagaagcctactggggaaggctgaggggtcccagctccccacgctggctgctgtgcagatgctggacgacagagccaggatggaggccgccaagaaggagaaggtagagcagatcctggcagagttccagctgcaggaggaggacctgaagaaggtgatgagacggatgcagaaggagatggaccgcggcctgaggctggagacccatgaagaggccagtgtgaagatgctgcccacctacgtgcgctccaccccagaaggctcagaagtcggggacttcctctccctggacctgggtggcactaacttcagggtgatgctggtgaaggtgggagaaggtgaggaggggcagtggagcgtgaagaccaaacaccagatgtactccatccccgaggacgccatgaccggcactgctgagatgctcttcgactacatctctgagtgcatctccgacttcctggacaagcatcagatgaaacacaagaagctgcccctgggcttcaccttctcctttcctgtgaggcacgaagacatcgataagggcatccttctcaactggaccaagggcttcaaggcctcaggagcagaagggaacaatgtcgtggggcttctgcgagacgctatcaaacggagaggggactttgaaatggatgtggtggcaatggtgaatgacacggtggccacgatgatctcctgctactacgaagaccatcagtgcgaggtcggcatgatcgtgggcacgggctgcaatgcctgctacatggaggagatgcagaatgtggagctggtggagggggacgagggccgcatgtgcgtcaataccgagtggggcgccttcggggactccggcgagctggacgagttcctgctggagtatgaccgcctggtggacgagagctctgcaaaccccggtcagcagctgtatgagaagctcataggtggcaagtacatgggcgagctggtgcggcttgtgctgctcaggctcgtggacgaaaacctgctcttccacggggaggcctccgagcagctgcgcacacgcggagccttcgagacgcgcttcgtgtcgcaggtggagagcgacacgggcgaccgcaagcagatctacaacatcctgagcacgctggggctgcgaccctcgaccaccgactgcgacatcgtgcgccgcgcctgcgagagcgtgtctacgcgcgctgcgcacatgtgctcggcggggctggcgggcgtcatcaaccgcatgcgcgagagccgcagcgaggacgtaatgcgcatcactgtgggcgtggatggctccgtgtacaagctgcaccccagcttcaaggagcggttccatgccagcgtgcgcaggctgacgcccagctgcgagatcaccttcatcgagtcggaggagggcagtggccggggcgcggccctggtctcggcggtggcctgtaagaaggcctgtatgctgggccagtgagagcagtggccgcaagcgcagggaggatgccacagccccacagcacccaggctccatggggaagtgctccccacacgtgctcgcagcctggcggggcaggaggcctggccttgtcaggacccaggccgcctgccataccgctggggaacagagcgggcctcttccctcagtttttcggtgggacagccccagggccctaacgggggtgcggcaggagcaggaacagagactctggaagccccccacctttctcgctggaatcaatttcccagaagggagttgctcactcaggactttgatgcatttccacactgtcagagctgttggcctcgcctgggcccaggctctgggaaggggtgccctctggatcctgctgtggcctcacttccctgggaactcatcctgtgtggggaggcagctccaacagcttgaccagacctagacctgggccaaaagggcagccaggggctgctcatcacccagtcctggccattttcttgcctgaggctcaagaggcccagggagcaatgggagggggctccatggaggaggtgtcccaagctttgaatacccccagagaccttttctctcccataccatcactgagtggcttgtgattctgggatggaccctcgcagcaggtgcaagagacagagcccccaagcctctgccccaaggggcccacaaaggggagaagggccagccctacatcttcagctcccatagcgctggctcaggaagaaaccccaagcagcattcagcacaccccaagggacaaccccatcatatgacatgccaccctctccatgcccaacctaagattgtgtgggttttttaattaaaaatgttaaaagttttaaa

SEQ ID NO: 12170 - DNA, 2186 bp, Homo sapiens
  source 1..2186: mol_type = unassigned DNA
gtgaccagaggggtttgtgtggctgaagaggcaggaggaacagtgtatccacagcgtgggaccatgccaggcacaaaacggtttcaacatgtcattgagaccccggagcctggcaagtgggagttgtctgggtacgaggcagctgtgccaatcacggagaagtcaaacccactgacccaggatctagacaaagcagatgctgagaacattgttcgactgctagggcaatgtgatgctgagatcttccaggaggaggggcaagccctgtccacataccagagactctacagcgaatccattctgaccaccatggtacaggtggctgggaaagttcaggaagtgctgaaggagccagatggggggctggttgtgctgagtggagggggcacctctggccggatggcattcctcatgtcggtgtcctttaatcagctgatgaaaggtctgggacagaaacctctttacacctacctcattgcaggtggtgacaggtctgtggtggcctctagggaggggacagaagatagtgccttgcacgggattgaggaactgaagaaggtggctgccgggaagaagagagtgattgtcattggcatttctgtgggactctctgctccctttgtggcaggccagatggactgctgcatgaacaacacagctgtcttcttgccagtcctggttggcttcaatccagtgagcatggccagaaatgaccccattgaagactggagttcaacattccgacaagtagcagagcggatgcagaaaatgcaggagaaacagaaagcttttgtgctcaatcctgccatcgggcccgagggtctcagcggctcctcccggatgaaaggtggaagtgccaccaagattctgctggaaaccctgttattagcagcccataagactgtggaccagggcattgcagcatctcaaagatgcctcctggaaatcttgcggacatttgagcgagctcatcaggtgacctacagccaaagccccaagattgccaccctgatgaagagtgtcagcaccagtctggagaagaaaggccacgtgtacctggttggctggcagaccctgggcatcattgccatcatggatggagtagagtgcatccacacctttggtgctgatttccgagatgtccgtggctttctcattggtgatcacagtgacatgtttaaccagaaggctgagctcaccaaccagggtccccagttcaccttctcccaggaggacttcctgacttccatccttccctctctcacggaaatcgatactgtggtcttcattttcaccctggatgacaacctcacggaggtgcagactatagtggagcaggtgaaagagaagaccaaccacatccaggccctggcacacagcaccgtgggtcagaccttgctgatccctctgaagaagctctttccctccatcatcagcatcacatggccactgcttttctttgaatatgaagggaacttcatccagaagttccagcgtgagctaagcaccaaatgggtgctgaatacagtgagtacaggtgctcatgtgcttcttggtaagatcctacaaaaccacatgttggaccttcggattagcaactccaagctcttctggcgggcgctggccatgctgcagcggttctctggacagtccaaggctcgatgcatcgagagcctcctccgagcgatccactttccccagccactgtcagatgatattcgggctgctcccatctcctgccatgtccaggttgcacatgagaaggaacaggtgatacccatcgccttgctgagcctcctattccggtgctcgatcactgaggctcaggcacacctggctgcagctccttctgtctgtgaggctgtcaggagtgctcttgctgggccaggtcagaagcgcactgcggaccccctcgagatcctagagcctgacgttcagtgaacccatgtttctgggtgggtgaaaggggcccaaccctgcccacttcagcccagcccgcccaaggggacttgtgccagcagaacatgtgggaggaagaagccccgtttccagggcatccgcagcccagggtagggagaaatattctctccactttgggggagagttcttgctctcgacctagtggtttctactctcaccgacttattctgatttcagaaataaaatgaaatgtcttattttggaaa

SEQ ID NO: 12171 - DNA, 2116 bp, Homo sapiens
  source 1..2116: mol_type = unassigned DNA
agaggggtttgtgtggctgaagaggcaggaggaacagtgtatccacagcgtgggaccatgccaggcacaaaacggtttcaacatgtcattgagaccccggagcctggcaagtgggagttgtctgggtacgaggcagctgtgccaatcacggagaagtcaaacccactgacccaggatctagacaaagcagatgctgagaacattgttcgactgctagggcaatgtgatgctgagatcttccaggaggaggggcaagccctgtccacataccagagactctacagcgaatccattctgaccaccatggtacaggtggctgggaaagttcaggaagtgctgaaggagccagatggggggctggttgtgctgagtggagggggcacctctggccggatggcattcctcatgtcggtgtcctttaatcagctgatgaaaggtctgggacagaaacctctttacacctacctcattgcaggtggtgacaggtggctgccgggaagaagagagtgattgtcattggcatttctgtgggactctctgctccctttgtggcaggccagatggactgctgcatgaacaacacagctgtcttcttgccagtcctggttggcttcaatccagtgagcatggccagaaatgaccccattgaagactggagttcaacattccgacaagtagcagagcggatgcagaaaatgcaggagaaacagaaagcttttgtgctcaatcctgccatcgggcccgagggtctcagcggctcctcccggatgaaaggtggaagtgccaccaagattctgctggaaaccctgttattagcagcccataagactgtggaccagggcattgcagcatctcaaagatgcctcctggaaatcttgcggacatttgagcgagctcatcaggtgacctacagccaaagccccaagattgccaccctgatgaagagtgtcagcaccagtctggagaagaaaggccacgtgtacctggttggctggcagaccctgggcatcattgccatcatggatggagtagagtgcatccacacctttggtgctgatttccgagatgtccgtggctttctcattggtgatcacagtgacatgtttaaccagaaggctgagctcaccaaccagggtccccagttcaccttctcccaggaggacttcctgacttccatccttccctctctcacggaaatcgatactgtggtcttcattttcaccctggatgacaacctcacggaggtgcagactatagtggagcaggtgaaagagaagaccaaccacatccaggccctggcacacagcaccgtgggtcagaccttgctgatccctctgaagaagctctttccctccatcatcagcatcacatggccactgcttttctttgaatatgaagggaacttcatccagaagttccagcgtgagctaagcaccaaatgggtgctgaatacagtgagtacaggtgctcatgtgcttcttggtaagatcctacaaaaccacatgttggaccttcggattagcaactccaagctcttctggcgggcgctggccatgctgcagcggttctctggacagtccaaggctcgatgcatcgagagcctcctccgagcgatccactttccccagccactgtcagatgatattcgggctgctcccatctcctgccatgtccaggttgcacatgagaaggaacaggtgatacccatcgccttgctgagcctcctattccggtgctcgatcactgaggctcaggcacacctggctgcagctccttctgtctgtgaggctgtcaggagtgctcttgctgggccaggtcagaagcgcactgcggaccccctcgagatcctagagcctgacgttcagtgaacccatgtttctgggtgggtgaaaggggcccaaccctgcccacttcagcccagcccgcccaaggggacttgtgccagcagaacatgtgggaggaagaagccccgtttccagggcatccgcagcccagggtagggagaaatattctctccactttgggggagagttcttgctctcgacctagtggtttctactctcaccgacttattctgatttcagaaataaaatgaaatgtcttattttggaaagtt

SEQ ID NO: 12172 - DNA, 5122 bp, Homo sapiens
  source 1..5122: mol_type = unassigned DNA
cccctgtccctggctcacgtgatcgcgcctagggagaaaacgtctgactccagccaccggccttcaaggcacggctttttattccttcggctggtcggcctctcgcccttcagctacctgtgcgtccctccgtcccgtcccgtcccggggtcaccccggagcctgtccgctatgcggctcctgcctctagccccaggtcggctccggcggggcagcccccgccacctgccctcctgcagcccagcgctgctactgctggtgctgggcggctgcctgggggtcttcggggtggctgcgggaacccggaggcccaacgtggtgctgctcctcacggacgaccaggacgaagtgctcggcggcatgacaccgctaaagaaaaccaaagctctcatcggagagatggggatgactttttccagtgcttatgtgccaagtgctctctgctgccccagcagagccagtatcctgacaggaaagtacccacataatcatcacgttgtgaacaacactctggaggggaactgcagtagtaagtcctggcagaagatccaagaaccaaatactttcccagcaattctcagatcaatgtgtggttatcagaccttttttgcagggaaatatttaaatgagtacggagccccagatgcaggtggactagaacacgttcctctgggttggagttactggtatgccttggaaaagaattctaagtattataattacaccctgtctatcaatgggaaggcacggaagcatggtgaaaactatagtgtggactacctgacagatgttttggctaatgtctccttggactttctggactacaagtccaactttgagcccttcttcatgatgatcgccactccagcgcctcattcgccttggacagctgcacctcagtaccagaaggctttccagaatgtctttgcaccaagaaacaagaacttcaacatccatggaacgaacaagcactggttaattaggcaagccaagactccaatgactaattcttcaatacagtttttagataatgcatttaggaaaaggtggcaaactctcctctcagttgatgaccttgtggagaaactggtcaagaggctggagttcactggggagctcaacaacacttacatcttctatacctcagacaatggctatcacacaggacagttttccttgccaatagacaagagacagctgtatgagtttgatatcaaagttccactgttggttcgaggacctgggatcaaaccaaatcagacaagcaagatgctggttgccaacattgacttgggtcctactattttggacattgctggctacgacctaaataagacacagatggatgggatgtccttattgcccattttgagaggtgccagtaacttgacctggcgatcagatgtcctggtggaataccaaggagaaggccgtaacgtcactgacccaacatgcccttccctgagtcctggcgtatctcaatgcttcccagactgtgtatgtgaagatgcttataacaatacctatgcctgtgtgaggacaatgtcagcattgtggaatttgcagtattgcgagtttgatgaccaggaggtgtttgtagaagtctataatctgactgcagacccagaccagatcactaacattgctaaaaccatagacccagagcttttaggaaagatgaactatcggttaatgatgttacagtcctgttctgggccaacctgtcgcactccaggggtttttgaccccggatacaggtttgacccccgtctcatgttcagcaatcgcggcagtgtcaggactcgaagattttccaaacatcttctgtagcgacctcacacagcctctgcagatggatccctgcacgcctctttctgatgaagtgattgtagtaggtgtctgtagctagtcttcaagaccacacctggaagagtttctgggctggctttaagtcctgtttgaaaaagcaacccagtcagctgacttcctcgtgcaatgtgttaaactgtgaactctgcccatgtgtcaggagtggctgtctctggtctcttcctttagctgacaaggacactcctgaggtctttgttctcactgtattctttttatcctggggccacagttcttgattattcctcttgtggttaaagactgaatttgtaaacccattcagataaatggcagtactttaggacacacacaaacacacagacacaccttttgatatgtaagcttgacctaaagtcaaaggacctgtgtagcatttcagattgagcacttcactatcaaaaatactaacatcacatggcttgaagagtaaccatcagagctgaatcatccaagtaagaacaagtaccattgttgattgataagtagagatacattttttatgatgttcatcacagtgtggtaaggttgcaaattcaaaacatgtcacccaagctctgttcatgtttttgtgaattctaggctggtgctgcactgaaatagagcagtaagcttgtgataaaggccaattccaggtagctcttgaaggtgatagccatctactttccagtggctgccaaccacagggagtgccagttaacactggaaggattaaggcaaggtcccttctcttgagactcccctctgagatctgaaaaatgaagtggcttaggaacatcagcagtgaagaactgccaagagttggtgaaggttgtctcttccgagggccttctgaagacagggctcttgaacagacaagtggaagggctgtaccagggataaaggaaagaagtgcctgtccagcagggagcttgaatttaagttccatgtatgaagtcattggctctatctgcatttttctgtcattctcttcatttgttttaaggtggaaaattttcttacagttgatgcaaagtatcaactactttaccctaccttctccccttttagatgggttcttcctgagttttggagtcttgtatgattatcagtattcccctgtcaaaatcaaatctattcaggtttcttcactgttgagaacacctaaatgtttttatttttgagaagtggggacagagtctcactatgtcacccaggctggagtgcaatggcatgatctcagctcactgcaaccttcgcctcctgggttcaagcgattctcctgcctccgcctcctgagtagctgggattataggcacgcaccaccacgcccagctaattttttgtatttttagtagagacagagtttcaccatgttggccaggctggtcttgaactcctgaccttgtgatccacccacctcggcctcccagagtgctgggattacaggcatgagccaccacgcttggctaagaacacctaaatttttatgtttcttggctcaaaaaccagttccatttctaatgttgtcctcacaagaaggctaattggtggtgagacagcaggggaggaggaagagctgtggtttgtaacttgttcaactcaggcaataagcgattttagctttatttaaagtcttctgtccagctttaagcactttgtaagacatggctgaaagtagcttttctatcagaattgcagatagtcatgttgggctaacagtcaattggatatattcctttacctcacatgaccccagcaactgtggtggtatctagaggtgaaacaggcaagtgaaatggacacctctgctgtgaatgttttagagaaggaaattcaaaaaatgttgtaactgaaagcactgttgaatatgggtatcggctttctttttcactttgactcttaacattatcagtcaacttccacattaatgaaagttgaccatagttatttccaaataaaaagaaaccaactcttaccaggtcttggactgtgatgtcatattattcagttttatgcttgttcctgagcagaactcataagagtgacatagtcagctgctgacggcacctcagccacgccactcttactcagttcagtgggtgtgcttgcgtggtaggatgtggtgcagccctctctacgctcttctatttttggtatatttcctatctaaccttcaaatagcttccaattctttttttcttggactggcttcattctgaatttgtgctaaaataatctttcataaagagacctcagtttatagcgtaacagactacacaatgcactgatgttttcataatgtttaagggacccactgcaagaagcttgctgcctccttttaattgtattcatttagattttgattttccatgttaagaaggtgaggtccatgttggtgcccttcagagtagagaaccatgtaaacattaggaatgaacagaggccttaggaatgaatagagagtttgccttatacaatttcctgttacaaagctctccctctcatgcaaagtagggaacaccttttgagcatctttgaatttgacaaatggtgctgttgcaaacactttttttttgagatgaagtctcgcggttgtcacccgggctggagtgcagtggcgtgatctcggctcactgcaacttccacctcctgggttccagcagttctcctgcctcagcctcccaagtagctgagattacaggcgcctgccaccccacctggctgatttttgtaattttagtagagacggggtttcaccatgttggccaggctgattaactcctgacctcaggtgatccacctttctcggcctcccaaagtgctgggattacgggtgtgagccaccgtgcccggcctgcaaacacattttaattgacaacactagggctgttgtacaaaatagtaatgatagccatggaagttttaccttattctgtgagaagtgttcttaaacttattaagtgtctaaactaaggtttagtgcttttttaaaggaaagttgtcccaggattcatcctaaagaaagcaaaagttaattcaactgatccaccaatggaattagatgggtagagttgggttcttgagttttaccaccacttagttcccactgaattttgtaacttcctgtgtttgcatcctctgttcctattctgcccttgctctgtgtcatctcagtcatttgacttagaaagtgcccttcaaaaggaccctgttcactgctgcacttttcaatgaattaaaatttatttctgttcta

SEQ ID NO: 12173 - DNA, 1824 bp, Homo sapiens
  source 1..1824: mol_type = unassigned DNA
gtctgactccagccaccggccttcaaggcacggctttttattccttcggctggtcggcctctcgcccttcagctacctgtgcctgccctcctgcagcccagcgctgctactgctggtgctgggcggctgcctgggggtcttcggggtggctgcgggaacccggaggcccaacgtggtgctgctcctcacggacgaccaggacgaagtgctcggcggcatgtatgtgccaagtgctctctgctgccccagcagagccagtatcctgacaggaaagtacccacataatcatcacgttgtgaacaacactctggaggggaactgcagtagtaagtcctggcagaagatccaagaaccaaatactttcccagcaattctcagatcaatgtgtggttatcagaccttttttgcagggaaatatttaaatgagtacggagccccagatgcaggtggactagaacacgttcctctgggttggagttactggtatgccttggaaaagaattctaagtattataattacaccctgtctatcaatgggaaggcacggaagcatggtgaaaactatagtgtggactacctgacagatgttttggctaatgtctccttggactttctggactacaagtccaactttgagcccttcttcatgatgatcgccactccagcgcctcattcgccttggacagctgcacctcagtaccagaaggctttccagaatgtctttgcaccaagaaacaagaacttcaacatccatggaacgaacaagcactggttaattaggcaagccaagactccaatgactaattcttcaatacagtttttagataatgcatttaggaaaaggtggcaaactctcctctcagttgatgaccttgtggagaaactggtcaagaggctggagttcactggggagctcaacaacacttacatcttctatacctcagacaatggctatcacacaggacagttttccttgccaatagacaagagacagctgtatgagtttgatatcaaagttccactgttggttcgaggacctgggatcaaaccaaatcagacaagcaagatgctggttgccaacattgacttgggtcctactattttggacattgctggctacgacctaaataagacacagatggatgggatgtccttattgcccattttgagaggtgccagtaacttgacctggcgatcagatgtcctggtggaataccaaggagaaggccgtaacgtcactgacccaacatgcccttccctgagtcctggcgtatctcaatgcttcccagactgtgtatgtgaagatgcttataacaatacctatgcctgtgtgaggacaatgtcagcattgtggaatttgcagtattgcgagtttgatgaccaggaggtgtttgtagaagtctataatctgactgcagacccagaccagatcactaacattgctaaaaccatagacccagagcttttaggaaagatgaactatcggttaatgatgttacagtcctgttctgggccaacctgtcgcactccaggggtttttgaccccggatacaggtttgacccccgtctcatgttcagcaatcgcggcagtgtcaggactcgaagattttccaaacatcttctgtagcgacctcacacagcctctgcagatggatccctgcacgcctctttctgatgaagtgattgtagtaggtgtctgtagctagtcttcaagaccacacctggaagagtttctgggctggctttaagtcctgtttgaaaaagcaacccagtcagctgacttcctcgtgcaatgtgttaaactgtgaactctgcccatgtgtc

SEQ ID NO: 12174 - DNA, 2020 bp, Homo sapiens
  source 1..2020: mol_type = unassigned DNA
acgtgatcgcgcctagggagaaaacgtctgactccagccaccggccttcaaggcacggctttttattccttcggctggtcggcctctcgcccttcagctacctgtgcgtccctccgtcccgtcccgtcccggggtcaccccggagcctgtccgctatgcggctcctgcctctagccccaggtcggctccggcggggcagcccccgccacctgccctcctgcagcccagcgctgctactgctggtgctgggcggctgcctgggggtcttcggggtggctgcgggaacccggaggcccaacgtggtgctgctcctcacggacgaccaggacgaagtgctcggcggcatgtatgtgccaagtgctctctgctgccccagcagagccagtatcctgacaggaaagtacccacataatcatcacgttgtgaacaacactctggaggggaactgcagtagtaagtcctggcagaagatccaagaaccaaatactttcccagcaattctcagatcaatgtgtggttatcagaccttttttgcagggaaatatttaaatgagtacggagccccagatgcaggtggactagaacacgttcctctgggttggagttactggtatgccttggaaaagaattctaagtattataattacaccctgtctatcaatgggaaggcacggaagcatggtgaaaactatagtgtggactacctgacagatgttttggctaatgtctccttggactttctggactacaagtccaactttgagcccttcttcatgatgatcgccactccagcgcctcattcgccttggacagctgcacctcagtaccagaaggctttccagaatgtctttgcaccaagaaacaagaacttcaacatccatggaacgaacaagcactggttaattaggcaagccaagactccaatgactaattcttcaatacagtttttagataatgcatttaggaaaaggtggcaaactctcctctcagttgatgaccttgtggagaaactggtcaagaggctggagttcactggggagctcaacaacacttacatcttctatacctcagacaatggctatcacacaggacagttttccttgccaatagacaagagacagctgtatgagtttgatatcaaagttccactgttggttcgaggacctgggatcaaaccaaatcagacaagcaagatgctggttgccaacattgacttgggtcctactattttggacattgctggctacgacctaaataagacacagatggatgggatgtccttattgcccattttgagaggtgccagtaacttgacctggcgatcagatgtcctggtggaataccaaggagaaggccgtaacgtcactgacccaacatgcccttccctgagtcctggcgtatctcaatgcttcccagactgtgtatgtgaagatgcttataacaatacctatgcctgtgtgaggacaatgtcagcattgtggaatttgcagtattgcgagtttgatgaccaggaggtgtttgtagaagtctataatctgactgcagacccagaccagatcactaacattgctaaaaccatagacccagagcttttaggaaagatgaactatcggttaatgatgttacagtcctgttctgggccaacctgtcgcactccaggggtttttgaccccggatacaggtttgacccccgtctcatgttcagcaatcgcggcagtgtcaggactcgaagattttccaaacatcttctgtagcgacctcacacagcctctgcagatggatccctgcacgcctctttctgatgaagtgattgtagtaggtgtctgtagctagtcttcaagaccacacctggaagagtttctgggctggctttaagtcctgtttgaaaaagcaacccagtcagctgacttcctcgtgcaatgtgttaaactgtgaactctgcccatgtgtcaggagtggctgtctctggtctcttcctttagctgacaaggacactcctgaggtctttgttctcactgta

SEQ ID NO: 12175 - DNA, 5089 bp, Homo sapiens
  source 1..5089: mol_type = unassigned DNA
agtctggaattcagatgcctattggtgactgctccgtggcagctaaaccaagaaaacagctgctctgctcattatttcaaaccacactagggtacagagctcgtgcttcgggatggaaacctatggttatctgcagagggagtcatgctttcaaggacctcataaatacatatcgaatgattgaacaagatgactttgacattaacaccaggctacacacaattgtgaggggagaagatgaggcagccatggtggagtcagtaggcctggccctagtgaagctgccagatgtccttaatcgcctgaagcctgatatcatgattgttcatggagacaggtttgatgccctggctctggccacatctgctgccttgatgaacatccgaatccttcacattgaaggtggggaagtcagtgggaccattgatgactctatcagacatgccataacaaaactggctcattatcatgtgtgctgcacccgcagtgcagagcagcacctgatatccatgtgtgaggaccatgatcgcatccttttggcaggctgcccttcctatgacaaacttctctcagccaagaacaaagactacatgagcatcattcgcatgtggctaggtgatgatgtaaaatctaaagattacattgttgcactacagcaccctgtgaccactgacattaagcattccataaaaatgtttgaattaacattggatgcacttatctcatttaacaagcggaccctagtcctgtttccaaatattgacgcagggagcaaagagatggttcgagtgatgcggaagaagggcattgagcatcatcccaactttcgtgcagttaaacacgtcccatttgaccagtttatacagttggttgcccatgctggctgtatgattgggaacagcagctgtggggttcgagaagttggagcttttggaacacctgtgatcaacctgggaacacgtcagattggaagagaaacaggggagaatgttcttcatgtccgggatgctgacacccaagacaaaatattgcaagcactgcaccttcagtttggtaaacagtacccttgttcaaagatatatggggatggaaatgctgttccaaggattttgaagtttctcaaatctatcgatcttcaagagccactgcaaaagaaattctgctttcctcctgtgaaggagaatatctctcaagatattgaccatattcttgaaactctaagtgccttggccgttgatcttggcgggacgaacctccgagttgcaatagtcagcatgaagggtgaaatagttaagaagtatactcagttcaatcctaaaacctatgaagagaggattaatttaatcctacagatgtgtgtggaagctgcagcagaagctgtaaaactgaactgcagaattttgggagtaggcatttccacaggtggccgtgtaaatcctcgggaaggaattgtgctgcattcaaccaaactgatccaagagtggaactctgtggaccttaggacccccctttctgacactttgcatctccctgtgtgggtagacaatgatggcaactgtgctgccctggcggaaaggaaatttggccaaggaaagggactggaaaactttgttacacttatcacaggcacaggaatcggtggtggaattatccatcagcatgaattgatccacggaagctccttctgtgctgcagaactgggccaccttgttgtgtctctggatgggcctgattgttcctgtggaagccatgggtgcattgaagcatacgcctctggaatggccttgcagagggaggcaaaaaagctccatgatgaggacctgctcttggtggaagggatgtcagtgccaaaagatgaggctgtgggtgcgctccatctcatccaagctgcgaaacttggcaatgcgaaggcccagagcatcctaagaacagctggaacagctttgggtcttggggttgtgaacatcctccataccatgaatccctcccttgtgatcctctccggagtcctggccagtcactatatccacattgtcaaagacgtcattcgccagcaggccttgtcctccgtgcaggacgtggatgtggtggtttcggatttggttgaccccgccctgctgggtgctgccagcatggttctggactacacaacacgcaggatctactagacctccaggaacagacatggaccttctctccagagctcctgagtggaatcaagttcttgtctttaggatgaccgtttcttaacaatcaaatctggtattgaactgcaggtgactttggcagagaaatgttttcacttttggtctcctcttccagagtcacctttccccactcctatttttgtagatgctattctttctgatgtcttcttactaggggtcattttagctcaaaccctgtaagttacagtcacaattttctgtgccaaagcagctacaataatagagaggaagccttcttagaactctgcttactaatgtattaataccactgagaccttcaggccttgcctgggatatcacttcatcctgaagtttgcattaataatccttccaggccgggcacagtggctcacgcctgtaatcccagcactttgggaggccgaggcgggcggatcacgaggtcaggagatcgagaccgccctggctaacatggtgaaacatggtgaaaccccgtctctactaaaaatacaaaaaattagctgggtgtggtggcgggtcccagctactcgggaggctgaggcaggagaatggcatgaaccagggaggcggagctggcagtgaactgagaccgcaccactgcactccagcctgggtgacagagcaagactccatctcaaaaataataataataaataataataataataataataataataataatccttccagctgggcgcagtggctcacgcctgtaatcccaacattttgggaggccgagatgggcggatcacctgaggtcaggagttcaagaccagcctggccaacatggtgaaaccccatctctactaaaatacaaaaattagccgggcgtggtggcatgtgcctgtagtcccagctactcgggaggctgaggcaggagaattgcttgaacccgggaggcggaggttgcagtgagccgagatcatgccactgcactccaccctgggtgacagagcgagactccgtctacacacacacacacacacacacacacatccttcctcctctaaccccaaactaagatcacagaaggtgatccagtcagagaacagagggaaatcttaccaggaagggcttaagtacacttttttttaaaacagctttattgtttttaaagcctacaatttgataagccttgacatatgtatacctgtgaaagcatcaccacaatcaagacactggacatatctatcactcccccatctcagatatcccccctaatcctggataccatttgttgaaagatgttattactctagctgaacttacaagagactttagaccagggatctaaattacagtggccttagtgaccttgtccttatcttcttaggacagctgagaagccactgggacttagagcctttaaaaggagattaactgtcccaaaaggatctttgctactgaccagcagacacttcttccttcagtagcctttcatactgtgttgagtaacaccctagggtgtccattaaagttttgagttttacctagagcccagagccatgaatcaggattctgtctacatgattcgtgttttcattggtgtcaaaatacaaaagccaaagttctggctatgaattgttaacttggaagaaatactaactgccaccacttattaagtgcctactgtgtgccaggctctgaactaggtgcttcatatacattatcctaaattatctcaacatatgaggtaggtgttttaatttttattttatagaacttggtgtgtttgactgttaagctatggggctagagagagggtttgatcccaggtccctctgtgcttttgctgctgagccacacaacctctcatttcaaaaacactttcaaaatgctaacatattctaattcactctaggccaccaaaaactttaatactaatatctgatttgtaaatgacttaatgtatccttgaccctatcagctgaatttaatgaaatattcctctctgctgtgaaattttaccagtatagtatttggtctagtgacaggtgttctatttttttgagacgggtctcactctgtcacccaggctggagtgcagtggctcaatgcaacctctgccccccaagttcaagtgattctcctgcctcagcctcttgagtagctgggattacaggcacatgcaccacgcccggctgatttttttttgtatttttagtagacagggtttcaccatgttggccaggctggtcttgaactcctgacctcaggtgatccgcccgcctctgcctcccaaagtgctgggattacaggtgtaagccatcacacctggccctagtgacaggtttttatgggtacttttagatgatctaagaaatcatgtgcatatatctttcagatttctattttgggaaaatgaaggtttctacaacatattgtttcagtgttcaaataaactgaaggactcaacattacatttgaactatatccttcctagtgggttagtgtgaaaaagagtttggctgattcctaaaactctgccagccctgcagtaatctccagggcctggttattgttcagacattccatggtgattcctgggaaggaagcttggctgctcagtttctgagtctggggtgagataatgttctgggaagggacatctgttctttggtgtaatctctcatggtgaaatctgctctgtacatcagacaattgcattgctaccaagtttcataccaaatatttgaaaggatggtattgaatctaaaaccaaatattagtttttattaaactcatgggaaggctaatatattccaacgtaaattattacatatggttaagtaattgcatgttaatttattttaatgtaaatatttttgttactgttctgagccaaattctaaagaaaaaataaatacatttccttgttg

SEQ ID NO: 12176 - DNA, 5314 bp, Homo sapiens
  source 1..5314: mol_type = unassigned DNA
gtgggcgtggctgggcgagcgaggagtggggacaaggtcgagcgacgagtcgtctacccgcgcgcccgagcgcggaaaccgaggggcaggctcgcgctctgcctgcttcgtggcgcttggttcgtccctcgcccgaggagcgcggtggcggcgtgggagggagcctctgacggcgtctggaactctattttaagaacctctcaaaacgaaacaagcaaatcatggagaagaatggaaataaccgaaagctgcgggtttgtgttgctacttgtaaccgtgcagattattctaaacttgccccgatcatgtttggcattaaaaccgaacctgagttctttgaacttgatgttgtggtacttggctctcacctgatagatgactatggaaatacatatcgaatgattgaacaagatgactttgacattaacaccaggctacacacaattgtgaggggagaagatgaggcagccatggtggagtcagtaggcctggccctagtgaagctgccagatgtccttaatcgcctgaagcctgatatcatgattgttcatggagacaggtttgatgccctggctctggccacatctgctgccttgatgaacatccgaatccttcacattgaaggtggggaagtcagtgggaccattgatgactctatcagacatgccataacaaaactggctcattatcatgtgtgctgcacccgcagtgcagagcagcacctgatatccatgtgtgaggaccatgatcgcatccttttggcaggctgcccttcctatgacaaacttctctcagccaagaacaaagactacatgagcatcattcgcatgtggctaggtgatgatgtaaaatctaaagattacattgttgcactacagcaccctgtgaccactgacattaagcattccataaaaatgtttgaattaacattggatgcacttatctcatttaacaagcggaccctagtcctgtttccaaatattgacgcagggagcaaagagatggttcgagtgatgcggaagaagggcattgagcatcatcccaactttcgtgcagttaaacacgtcccatttgaccagtttatacagttggttgcccatgctggctgtatgattgggaacagcagctgtggggttcgagaagttggagcttttggaacacctgtgatcaacctgggaacacgtcagattggaagagaaacaggggagaatgttcttcatgtccgggatgctgacacccaagacaaaatattgcaagcactgcaccttcagtttggtaaacagtacccttgttcaaagatatatggggatggaaatgctgttccaaggattttgaagtttctcaaatctatcgatcttcaagagccactgcaaaagaaattctgctttcctcctgtgaaggagaatatctctcaagatattgaccatattcttgaaactctaagtgccttggccgttgatcttggcgggacgaacctccgagttgcaatagtcagcatgaagggtgaaatagttaagaagtatactcagttcaatcctaaaacctatgaagagaggattaatttaatcctacagatgtgtgtggaagctgcagcagaagctgtaaaactgaactgcagaattttgggagtaggcatttccacaggtggccgtgtaaatcctcgggaaggaattgtgctgcattcaaccaaactgatccaagagtggaactctgtggaccttaggacccccctttctgacactttgcatctccctgtgtgggtagacaatgatggcaactgtgctgccctggcggaaaggaaatttggccaaggaaagggactggaaaactttgttacacttatcacaggcacaggaatcggtggtggaattatccatcagcatgaattgatccacggaagctccttctgtgctgcagaactgggccaccttgttgtgtctctggatgggcctgattgttcctgtggaagccatgggtgcattgaagcatacgcctctggaatggccttgcagagggaggcaaaaaagctccatgatgaggacctgctcttggtggaagggatgtcagtgccaaaagatgaggctgtgggtgcgctccatctcatccaagctgcgaaacttggcaatgcgaaggcccagagcatcctaagaacagctggaacagctttgggtcttggggttgtgaacatcctccataccatgaatccctcccttgtgatcctctccggagtcctggccagtcactatatccacattgtcaaagacgtcattcgccagcaggccttgtcctccgtgcaggacgtggatgtggtggtttcggatttggttgaccccgccctgctgggtgctgccagcatggttctggactacacaacacgcaggatctactagacctccaggaacagacatggaccttctctccagagctcctgagtggaatcaagttcttgtctttaggatgaccgtttcttaacaatcaaatctggtattgaactgcaggtgactttggcagagaaatgttttcacttttggtctcctcttccagagtcacctttccccactcctatttttgtagatgctattctttctgatgtcttcttactaggggtcattttagctcaaaccctgtaagttacagtcacaattttctgtgccaaagcagctacaataatagagaggaagccttcttagaactctgcttactaatgtattaataccactgagaccttcaggccttgcctgggatatcacttcatcctgaagtttgcattaataatccttccaggccgggcacagtggctcacgcctgtaatcccagcactttgggaggccgaggcgggcggatcacgaggtcaggagatcgagaccgccctggctaacatggtgaaacatggtgaaaccccgtctctactaaaaatacaaaaaattagctgggtgtggtggcgggtcccagctactcgggaggctgaggcaggagaatggcatgaaccagggaggcggagctggcagtgaactgagaccgcaccactgcactccagcctgggtgacagagcaagactccatctcaaaaataataataataaataataataataataataataataataataatccttccagctgggcgcagtggctcacgcctgtaatcccaacattttgggaggccgagatgggcggatcacctgaggtcaggagttcaagaccagcctggccaacatggtgaaaccccatctctactaaaatacaaaaattagccgggcgtggtggcatgtgcctgtagtcccagctactcgggaggctgaggcaggagaattgcttgaacccgggaggcggaggttgcagtgagccgagatcatgccactgcactccaccctgggtgacagagcgagactccgtctacacacacacacacacacacacacacatccttcctcctctaaccccaaactaagatcacagaaggtgatccagtcagagaacagagggaaatcttaccaggaagggcttaagtacacttttttttaaaacagctttattgtttttaaagcctacaatttgataagccttgacatatgtatacctgtgaaagcatcaccacaatcaagacactggacatatctatcactcccccatctcagatatcccccctaatcctggataccatttgttgaaagatgttattactctagctgaacttacaagagactttagaccagggatctaaattacagtggccttagtgaccttgtccttatcttcttaggacagctgagaagccactgggacttagagcctttaaaaggagattaactgtcccaaaaggatctttgctactgaccagcagacacttcttccttcagtagcctttcatactgtgttgagtaacaccctagggtgtccattaaagttttgagttttacctagagcccagagccatgaatcaggattctgtctacatgattcgtgttttcattggtgtcaaaatacaaaagccaaagttctggctatgaattgttaacttggaagaaatactaactgccaccacttattaagtgcctactgtgtgccaggctctgaactaggtgcttcatatacattatcctaaattatctcaacatatgaggtaggtgttttaatttttattttatagaacttggtgtgtttgactgttaagctatggggctagagagagggtttgatcccaggtccctctgtgcttttgctgctgagccacacaacctctcatttcaaaaacactttcaaaatgctaacatattctaattcactctaggccaccaaaaactttaatactaatatctgatttgtaaatgacttaatgtatccttgaccctatcagctgaatttaatgaaatattcctctctgctgtgaaattttaccagtatagtatttggtctagtgacaggtgttctatttttttgagacgggtctcactctgtcacccaggctggagtgcagtggctcaatgcaacctctgccccccaagttcaagtgattctcctgcctcagcctcttgagtagctgggattacaggcacatgcaccacgcccggctgatttttttttgtatttttagtagacagggtttcaccatgttggccaggctggtcttgaactcctgacctcaggtgatccgcccgcctctgcctcccaaagtgctgggattacaggtgtaagccatcacacctggccctagtgacaggtttttatgggtacttttagatgatctaagaaatcatgtgcatatatctttcagatttctattttgggaaaatgaaggtttctacaacatattgtttcagtgttcaaataaactgaaggactcaacattacatttgaactatatccttcctagtgggttagtgtgaaaaagagtttggctgattcctaaaactctgccagccctgcagtaatctccagggcctggttattgttcagacattccatggtgattcctgggaaggaagcttggctgctcagtttctgagtctggggtgagataatgttctgggaagggacatctgttctttggtgtaatctctcatggtgaaatctgctctgtacatcagacaattgcattgctaccaagtttcataccaaatatttgaaaggatggtattgaatctaaaaccaaatattagtttttattaaactcatgggaaggctaatatattccaacgtaaattattacatatggttaagtaattgcatgttaatttattttaatgtaaatatttttgttactgttctgagccaaattctaaagaaaaaataaatacatttccttgttgaaa

SEQ ID NO: 12177 - DNA, 5298 bp, Homo sapiens
  source 1..5298: mol_type = unassigned DNA
agtctggaattcagatgcctattggtgactgctccgtggcagctaaaccaagaaaacagctgctctgctcattatttcaaaccacactagggtacagagctcgtgcttcgggatggaaacctatggttatctgcagagggagtcatgctttcaaggacctcatgaactctattttaagaacctctcaaaacgaaacaagcaaatcatggagaagaatggaaataaccgaaagctgcgggtttgtgttgctacttgtaaccgtgcagattattctaaacttgccccgatcatgtttggcattaaaaccgaacctgagttctttgaacttgatgttgtggtacttggctctcacctgatagatgactatggaaatacatatcgaatgattgaacaagatgactttgacattaacaccaggctacacacaattgtgaggggagaagatgaggcagccatggtggagtcagtaggcctggccctagtgaagctgccagatgtccttaatcgcctgaagcctgatatcatgattgttcatggagacaggtttgatgccctggctctggccacatctgctgccttgatgaacatccgaatccttcacattgaaggtggggaagtcagtgggaccattgatgactctatcagacatgccataacaaaactggctcattatcatgtgtgctgcacccgcagtgcagagcagcacctgatatccatgtgtgaggaccatgatcgcatccttttggcaggctgcccttcctatgacaaacttctctcagccaagaacaaagactacatgagcatcattcgcatgtggctaggtgatgatgtaaaatctaaagattacattgttgcactacagcaccctgtgaccactgacattaagcattccataaaaatgtttgaattaacattggatgcacttatctcatttaacaagcggaccctagtcctgtttccaaatattgacgcagggagcaaagagatggttcgagtgatgcggaagaagggcattgagcatcatcccaactttcgtgcagttaaacacgtcccatttgaccagtttatacagttggttgcccatgctggctgtatgattgggaacagcagctgtggggttcgagaagttggagcttttggaacacctgtgatcaacctgggaacacgtcagattggaagagaaacaggggagaatgttcttcatgtccgggatgctgacacccaagacaaaatattgcaagcactgcaccttcagtttggtaaacagtacccttgttcaaagatatatggggatggaaatgctgttccaaggattttgaagtttctcaaatctatcgatcttcaagagccactgcaaaagaaattctgctttcctcctgtgaaggagaatatctctcaagatattgaccatattcttgaaactctaagtgccttggccgttgatcttggcgggacgaacctccgagttgcaatagtcagcatgaagggtgaaatagttaagaagtatactcagttcaatcctaaaacctatgaagagaggattaatttaatcctacagatgtgtgtggaagctgcagcagaagctgtaaaactgaactgcagaattttgggagtaggcatttccacaggtggccgtgtaaatcctcgggaaggaattgtgctgcattcaaccaaactgatccaagagtggaactctgtggaccttaggacccccctttctgacactttgcatctccctgtgtgggtagacaatgatggcaactgtgctgccctggcggaaaggaaatttggccaaggaaagggactggaaaactttgttacacttatcacaggcacaggaatcggtggtggaattatccatcagcatgaattgatccacggaagctccttctgtgctgcagaactgggccaccttgttgtgtctctggatgggcctgattgttcctgtggaagccatgggtgcattgaagcatacgcctctggaatggccttgcagagggaggcaaaaaagctccatgatgaggacctgctcttggtggaagggatgtcagtgccaaaagatgaggctgtgggtgcgctccatctcatccaagctgcgaaacttggcaatgcgaaggcccagagcatcctaagaacagctggaacagctttgggtcttggggttgtgaacatcctccataccatgaatccctcccttgtgatcctctccggagtcctggccagtcactatatccacattgtcaaagacgtcattcgccagcaggccttgtcctccgtgcaggacgtggatgtggtggtttcggatttggttgaccccgccctgctgggtgctgccagcatggttctggactacacaacacgcaggatctactagacctccaggaacagacatggaccttctctccagagctcctgagtggaatcaagttcttgtctttaggatgaccgtttcttaacaatcaaatctggtattgaactgcaggtgactttggcagagaaatgttttcacttttggtctcctcttccagagtcacctttccccactcctatttttgtagatgctattctttctgatgtcttcttactaggggtcattttagctcaaaccctgtaagttacagtcacaattttctgtgccaaagcagctacaataatagagaggaagccttcttagaactctgcttactaatgtattaataccactgagaccttcaggccttgcctgggatatcacttcatcctgaagtttgcattaataatccttccaggccgggcacagtggctcacgcctgtaatcccagcactttgggaggccgaggcgggcggatcacgaggtcaggagatcgagaccgccctggctaacatggtgaaacatggtgaaaccccgtctctactaaaaatacaaaaaattagctgggtgtggtggcgggtcccagctactcgggaggctgaggcaggagaatggcatgaaccagggaggcggagctggcagtgaactgagaccgcaccactgcactccagcctgggtgacagagcaagactccatctcaaaaataataataataaataataataataataataataataataataatccttccagctgggcgcagtggctcacgcctgtaatcccaacattttgggaggccgagatgggcggatcacctgaggtcaggagttcaagaccagcctggccaacatggtgaaaccccatctctactaaaatacaaaaattagccgggcgtggtggcatgtgcctgtagtcccagctactcgggaggctgaggcaggagaattgcttgaacccgggaggcggaggttgcagtgagccgagatcatgccactgcactccaccctgggtgacagagcgagactccgtctacacacacacacacacacacacacacatccttcctcctctaaccccaaactaagatcacagaaggtgatccagtcagagaacagagggaaatcttaccaggaagggcttaagtacacttttttttaaaacagctttattgtttttaaagcctacaatttgataagccttgacatatgtatacctgtgaaagcatcaccacaatcaagacactggacatatctatcactcccccatctcagatatcccccctaatcctggataccatttgttgaaagatgttattactctagctgaacttacaagagactttagaccagggatctaaattacagtggccttagtgaccttgtccttatcttcttaggacagctgagaagccactgggacttagagcctttaaaaggagattaactgtcccaaaaggatctttgctactgaccagcagacacttcttccttcagtagcctttcatactgtgttgagtaacaccctagggtgtccattaaagttttgagttttacctagagcccagagccatgaatcaggattctgtctacatgattcgtgttttcattggtgtcaaaatacaaaagccaaagttctggctatgaattgttaacttggaagaaatactaactgccaccacttattaagtgcctactgtgtgccaggctctgaactaggtgcttcatatacattatcctaaattatctcaacatatgaggtaggtgttttaatttttattttatagaacttggtgtgtttgactgttaagctatggggctagagagagggtttgatcccaggtccctctgtgcttttgctgctgagccacacaacctctcatttcaaaaacactttcaaaatgctaacatattctaattcactctaggccaccaaaaactttaatactaatatctgatttgtaaatgacttaatgtatccttgaccctatcagctgaatttaatgaaatattcctctctgctgtgaaattttaccagtatagtatttggtctagtgacaggtgttctatttttttgagacgggtctcactctgtcacccaggctggagtgcagtggctcaatgcaacctctgccccccaagttcaagtgattctcctgcctcagcctcttgagtagctgggattacaggcacatgcaccacgcccggctgatttttttttgtatttttagtagacagggtttcaccatgttggccaggctggtcttgaactcctgacctcaggtgatccgcccgcctctgcctcccaaagtgctgggattacaggtgtaagccatcacacctggccctagtgacaggtttttatgggtacttttagatgatctaagaaatcatgtgcatatatctttcagatttctattttgggaaaatgaaggtttctacaacatattgtttcagtgttcaaataaactgaaggactcaacattacatttgaactatatccttcctagtgggttagtgtgaaaaagagtttggctgattcctaaaactctgccagccctgcagtaatctccagggcctggttattgttcagacattccatggtgattcctgggaaggaagcttggctgctcagtttctgagtctggggtgagataatgttctgggaagggacatctgttctttggtgtaatctctcatggtgaaatctgctctgtacatcagacaattgcattgctaccaagtttcataccaaatatttgaaaggatggtattgaatctaaaaccaaatattagtttttattaaactcatgggaaggctaatatattccaacgtaaattattacatatggttaagtaattgcatgttaatttattttaatgtaaatatttttgttactgttctgagccaaattctaaagaaaaaataaatacatttccttgttgaaa

SEQ ID NO: 12178 - DNA, 1133 bp, Homo sapiens
  source 1..1133: mol_type = unassigned DNA
aactctattttaagaacctctcaaaacgaaacaagcaaatcatggagaagaatggaaataaccgaaagctgcgggtttgtgttgctacttgtaaccgtgcagattattctaaacttgccccgatcatgtttggcattaaaaccgaacctgagttctttgaacttgatgttgtggtacttggctctcacctgatagatgactatggaaatacatatcgaatgattgaacaagatgactttgacattaacaccaggctacacacaattgtgaggggagaagatgaggcagccatggtggagtcagtaggcctggccctagtgaagctgccagatgtccttaatcgcctgaagcctgatatcatgattgttcatggagacaggtttgatgccctggctctggccacatctgctgccttgatgaacatccgaatccttcacattgaaggtggggaagtcagtgggaccattgatgactctatcagacatgccataacaaaactggctcattatcatgtgtgctgcacccgcagtgcagagcagcacctgatatccatgtgtgaggaccatgatcgcatccttttggcaggctgcccttcctatgacaaacttctctcagccaagaacaaagactacatgagcatcattcgcatgtggctaggtgatgatgtaaaatctaaagattacattgttgcactacagcaccctgtgaccactgacattaagcattccataaaaatgtttgaattaacattggatgcacttatctcatttaacaagcggaccctagtcctgtttccaaatattgacgcagggagcaaagagatggttcgagtgatgcggaagaagggcattgagcatcatcccaactttcgtgcagttaaacacgtcccatttgaccagtttatacagttggttgcccatgctggctgtatgattgggaacagcagctgtggggttcgagaagttggagctctgactaggctttatacatacgtgagttgttataagcacacacacacacacacacacacacatccttcctcctctaaccccaaactaagatcacagaaggtgatccagtcagagaacagagggaaatcttaccaggaagggcttaagtacacttttttttaa

SEQ ID NO: 12179 - DNA, 3657 bp, Homo sapiens
  source 1..3657: mol_type = unassigned DNA
aactctattttaagaacctctcaaaacgaaacaagcaaatcatggagaagaatggaaataaccgaaagctgcgggtttgtgttgctacttgtaaccgtgcagattattctaaacttgccccgatcatgtttggcattaaaaccgaacctgagttctttgaacttgatgttgtggtacttggctctcacctgatagatgactatggaaatacatatcgaatgattgaacaagatgactttgacattaacaccaggctacacacaattgtgaggggagaagatgaggcagccatggtggagtcagtaggcctggccctagtgaagctgccagatgtccttaatcgcctgaagcctgatatcatgattgttcatggagacaggtttgatgccctggctctggccacatctgctgccttgatgaacatccgaatccttcacattgaaggtggggaagtcagtgggaccattgatgactctatcagacatgccataacaaaactggctcattatcatgtgtgctgcacccgcagtgcagagcagcacctgatatccatgtgtgaggaccatgatcgcatccttttggcaggctgcccttcctatgacaaacttctctcagccaagaacaaagactacatgagcatcattcgcatgtggctaggtgatgatgtaaaatctaaagattacattgttgcactacagcaccctgtgaccactgacattaagcattccataaaaatgtttgaattaacattggatgcacttatctcatttaacaagcggaccctagtcctgtttccaaatattgacgcagggagcaaagagatggttcgagtgatgcggaagaagggcattgagcatcatcccaactttcgtgcagttaaacacgtcccatttgaccagtttatacagttggttgcccatgctggctgtatgattgggaacagcagctgtggggttcgagaagttggagcttttggaacacctgtgatcaacctgggaacacgtcagattggaagagaaacaggggagaatgttcttcatgtccgggatgctgacacccaagacaaaatattgcaagcactgcaccttcagtttggtaaacagtacccttgttcaaagatatatggggatggaaatgctgttccaaggattttgaagtttctcaaatctatcgatcttcaagagccactgcaaaagaaattctgctttcctcctgtgaaggagaatatctctcaagatattgaccatattcttgaaactctaagtgccttggccgttgatcttggcgggacgaacctccgagttgcaatagtcagcatgaagggtgaaatagttaagaagtatactcagttcaatcctaaaacctatgaagagaggattaatttaatcctacagatgtgtgtggaagctgcagcagaagctgtaaaactgaactgcagaattttgggagtaggcatttccacaggtggccgtgtaaatcctcgggaaggaattgtgctgcattcaaccaaactgatccaagagtggaactctgtggaccttaggacccccctttctgacactttgcatctccctgtgtgggtagacaatgatggcaactgtgctgccctggcggaaaggaaatttggccaaggaaagggactggaaaactttgttacacttatcacaggcacaggaatcggtggtggaattatccatcagcatgaattgatccacggaagctccttctgtgctgcagaactgggccaccttgttgtgtctctggatgggcctgattgttcctgtggaagccatgggtgcattgaagcatacgcctctggaatggccttgcagagggaggcaaaaaagctccatgatgaggacctgctcttggtggaagggatgtcagtgccaaaagatgaggctgtgggtgcgctccatctcatccaagctgcgaaacttggcaatgcgaaggcccagagcatcctaagaacagctggaacagctttgggtcttggggttgtgaacatcctccataccatgaatccctcccttgtgatcctctccggagtcctggccagtcactatatccacattgtcaaagacgtcattcgccagcaggccttgtcctccgtgcaggacgtggatgtggtggtttcggatttggttgaccccgccctgctgggtgctgccagcatggttctggactacacaacacgcaggatctactagacctccaggaacagacatggaccttctctccagagctcctgagtggaatcaagttcttgtctttaggatgaccgtttcttaacaatcaaatctggtattgaactgcaggtgactttggcagagaaatgttttcacttttggtctcctcttccagagtcacctttccccactcctatttttgtagatgctattctttctgatgtcttcttactaggggtcattttagctcaaaccctgtaagttacagtcacaattttctgtgccaaagcagctacaataatagagaggaagccttcttagaactctgcttactaatgtattaataccactgagaccttcaggccttgcctgggatatcacttcatcctgaagtttgcattaataatccttccaggccgggcacagtggctcacgcctgtaatcccagcactttgggaggccgaggcgggcggatcacgaggtcaggagatcgagaccgccctggctaacatggtgaaacatggtgaaaccccgtctctactaaaaatacaaaaaattagctgggtgtggtggcgggtcccagctactcgggaggctgaggcaggagaatggcatgaaccccaggctggagtgcagtggctcaatgcaacctctgccccccaagttcaagtgattctcctgcctcagcctcttgagtagctgggattacaggcacatgcaccacgcccggctgatttttttttgtatttttagtagacagggtttcaccatgttggccaggctggtcttgaactcctgacctcaggtgatccgcccgcctctgcctcccaaagtgctgggattacaggtgtaagccatcacacctggccctagtgacaggtttttatgggtacttttagatgatctaagaaatcatgtgcatatatctttcagatttctattttgggaaaatgaaggtttctacaacatattgtttcagtgttcaaataaactgaaggactcaacattacatttgaactatatccttcctagtgggttagtgtgaaaaagagtttggctgattcctaaaactctgccagccctgcagtaatctccagggcctggttattgttcagacattccatggtgattcctgggaaggaagcttggctgctcagtttctgagtctggggtgagataatgttctgggaagggacatctgttctttggtgtaatctctcatggtgaaatctgctctgtacatcagacaattgcattgctaccaagtttcataccaaatatttgaaaggatggtattgaatctaaaaccaaatattagtttttattaaactcatgggaaggctaatatattccaacgtaaattattacatatggttaagtaattgcatgttaatttattttaatgtaaatatttttgttactgttctgagccaaattctaaagaaaaaataaatacatttccttgttg

SEQ ID NO: 12180 - DNA, 2174 bp, Homo sapiens
  source 1..2174: mol_type = unassigned DNA
cggcgtctggaactctattttaagaacctctcaaaacgaaacaagcaaatcatggagaagaatggaaataaccgaaagctgcgggtttgtgttgctacttgtaaccgtgcagattattctaaacttgccccgatcatgtttggcattaaaaccgaacctgagttctttgaacttgatgttgtggtacttggctctcacctgatagatgactatggaaatacatatcgaatgattgaacaagatgactttgacattaacaccaggctacacacaattgtgaggggagaagatgaggcagccatggtggagtcagtaggcctggccctagtgaagctgccagatgtccttaatcgcctgaagcctgatatcatgattgttcatggagacaggtttgatgccctggctctggccacatctgctgccttgatgaacatccgaatccttcacattgaaggtggggaagtcagtgggaccattgatgactctatcagacatgccataacaaaactggctcattatcatgtgtgctgcacccgcagtgcagagcagcacctgatatccatgtgtgaggaccatgatcgcatccttttggcaggctgcccttcctatgacaaacttctctcagccaagaacaaagactacatgagcatcattcgcatgtggctaggtgatgatgtaaaatctaaagattacattgttgcactacagcaccctgtgaccactgacattaagcattccataaaaatgtttgaattaacattggatgcacttatctcatttaacaagcggaccctagtcctgtttccaaatattgacgcagggagcaaagagatggttcgagtgatgcggaagaagggcattgagcatcatcccaactttcgtgcagttaaacacgtcccatttgaccagtttatacagttggttgcccatgctggctgtatgattgggaacagcagctgtggggttcgagaagttggagcttttggaacacctgtgatcaacctgggaacacgtcagattggaagagaaacaggggagaatgttcttcatgtccgggatgctgacacccaagacaaaatattgcaagcactgcaccttcagtttggtaaacagtacccttgttcaaagatatatggggatggaaatgctgttccaaggattttgaagtttctcaaatctatcgatcttcaagagccactgcaaaagaaattctgctttcctcctgtgaaggagaatatctctcaagatattgaccatattcttgaaactctaagtgccttggccgttgatcttggcgggacgaacctccgagttgcaatagtcagcatgaagggtgaaatagttaagaagtatactcagttcaatcctaaaacctatgaagagaggattaatttaatcctacagatgtgtgtggaagctgcagcagaagctgtaaaactgaactgcagaattttgggagtaggaatcggtggtggaattatccatcagcatgaattgatccacggaagctccttctgtgctgcagaactgggccaccttgttgtgtctctggatgggcctgattgttcctgtggaagccatgggtgcattgaagcatacgcctctggaatggccttgcagagggaggcaaaaaagctccatgatgaggacctgctcttggtggaagggatgtcagtgccaaaagatgaggctgtgggtgcgctccatctcatccaagctgcgaaacttggcaatgcgaaggcccagagcatcctaagaacagctggaacagctttgggtcttggggttgtgaacatcctccataccatgaatccctcccttgtgatcctctccggagtcctggccagtcactatatccacattgtcaaagacgtcattcgccagcaggccttgtcctccgtgcaggacgtggatgtggtggtttcggatttggttgaccccgccctgctgggtgctgccagcatggttctggactacacaacacgcaggatctactagacctccaggaacagacatggaccttctctccagagctcctgagtggaatcaagttcttgtctttaggatgaccgtttcttaacaatcaaatctggtattgaactgcaggtgactttggcagagaaatgttttcacttttggtctcctcttccagagtcacctttccccactcctat

SEQ ID NO: 12181 - DNA, 2190 bp, Homo sapiens
  source 1..2190: mol_type = unassigned DNA
tacccgcgcgcccgagcgcggaaaccgaggggcaggctcgcgctctgcctgcttcgtggcgcttggttcgtccctcgcccgaggagcgcggtggcggcgtgggagggagcctctgacggcgtctgaaatacatatcgaatgattgaacaagatgactttgacattaacaccaggctacacacaattgtgaggggagaagatgaggcagccatggtggagtcagtaggcctggccctagtgaagctgccagatgtccttaatcgcctgaagcctgatatcatgattgttcatggagacaggtttgatgccctggctctggccacatctgctgccttgatgaacatccgaatccttcacattgaaggtggggaagtcagtgggaccattgatgactctatcagacatgccataacaaaactggctcattatcatgtgtgctgcacccgcagtgcagagcagcacctgatatccatgtgtgaggaccatgatcgcatccttttggcaggctgcccttcctatgacaaacttctctcagccaagaacaaagactacatgagcatcattcgcatgtggctagggagcaaagagatggttcgagtgatgcggaagaagggcattgagcatcatcccaactttcgtgcagttaaacacgtcccatttgaccagtttatacagttggttgcccatgctggctgtatgattgggaacagcagctgtggggttcgagaagttggagcttttggaacacctgtgatcaacctgggaacacgtcagattggaagagaaacaggggagaatgttcttcatgtccgggatgctgacacccaagacaaaatattgcaagcactgcaccttcagtttggtaaacagtacccttgttcaaagatatatggggatggaaatgctgttccaaggattttgaagtttctcaaatctatcgatcttcaagagccactgcaaaagaaattctgctttcctcctgtgaaggagaatatctctcaagatattgaccatattcttgaaactctaagtgccttggccgttgatcttggcgggacgaacctccgagttgcaatagtcagcatgaagggtgaaatagttaagaagtatactcagttcaatcctaaaacctatgaagagaggattaatttaatcctacagatgtgtgtggaagctgcagcagaagctgtaaaactgaactgcagaattttgggagtaggcatttccacaggtggccgtgtaaatcctcgggaaggaattgtgctgcattcaaccaaactgatccaagagtggaactctgtggaccttaggacccccctttctgacactttgcatctccctgtgtgggtagacaatgatggcaactgtgctgccctggcggaaaggaaatttggccaaggaaagggactggaaaactttgttacacttatcacaggcacaggaatcggtggtggaattatccatcagcatgaattgatccacggaagctccttctgtgctgcagaactgggccaccttgttgtgtctctggatgggcctgattgttcctgtggaagccatgggtgcattgaagcatacgcctctggaatggccttgcagagggaggcaaaaaagctccatgatgaggacctgctcttggtggaagggatgtcagtgccaaaagatgaggctgtgggtgcgctccatctcatccaagctgcgaaacttggcaatgcgaaggcccagagcatcctaagaacagctggaacagctttgggtcttggggttgtgaacatcctccataccatgaatccctcccttgtgatcctctccggagtcctggccagtcactatatccacattgtcaaagacgtcattcgccagcaggccttgtcctccgtgcaggacgtggatgtggtggtttcggatttggttgaccccgccctgctgggtgctgccagcatggttctggactacacaacacgcaggatctactagacctccaggaacagacatggaccttctctccagagctcctgagtggaatcaagttcttgtctttaggatgaccgtttcttaacaatcaaatctggtattgaactgcaggtgactttggcagagaaatgttttcacttttggtctcctcttccagagtcacctttccccactcctatttttgtagatgctattctttctgatgtcttcttacta

SEQ ID NO: 12182 - DNA, 2273 bp, Homo sapiens
  source 1..2273: mol_type = unassigned DNA
cggcgcagtcgctgcagccgccgcgggaggcgtccgtgacaagatgaagctcatcatcctggagcactattctcaggcgagcgagtgggcggctaaatacatcaggaaccgcatcatccagtttaacccagggccagagaagtacttcaccctggggctccccactgggagtaccccacttggctgctacaagaagctgattgaatactataagaatggggacctgtcctttaaatatgtgaagaccttcaacatggatgagtacgtgggccttcctcgagaccacccggagagttaccactccttcatgtggaacaacttcttcaagcacattgacatccacccagaaaacacccacattctggatgggaatgcagtcgacctacaggcagaatgtgatgcctttgaagagaagatcaaggctgcaggtgggatcgagctatttgttggaggcatcggccctgatggacacattgccttcaacgagccaggctccagtctggtgtccaggacccgtgtgaagacgctggccatggataccatcctggccaatgctaggttcttcgatggagaactcaccaaggtgcccaccatggccttgacggtgggggtgggcactgtcatggatgctagagaggtgatgatccttatcacaggtgctcacaaggcatttgctctgtacaaggccatcgaggagggagtgaaccacatgtggaccgtgtctgccttccagcagcatccccgcaccgtgtttgtgtgtgacgaggatgccaccttggagctgaaagtgaagactgtcaagtatttcaaaggtttaatgcttgttcataacaagttggtggaccccttgtacagtatcaaagagaaagaaactgagaaaagccaatcttcgaagaaaccatacagcgattagcctgtgctgggacctagtgtcaagtacccatagggaaaggcaggtctttctggaaattgtctttagaagaaagaattgtatttctttaatctagtatggttactccagataagtgggtgaacttattgttcttggccatgaggctgggagcctagtcacggagtttagctatagggagaatgtttgtaacttaatcagaaaaaaaatatctgcaaaatgtactccatcattttgatgtctgccaaacccaggttgggagttttaaactttttgttctgcttcagccatggttcacacatatgacacactcccgtcaggaatttctctccttacacgcactgattttcaagtgggagggaattaggggcttatgtatattggataccacctctttgaagagtcttgagagtccttcttgcacaggcctgccccttggttgagaaccattgttccaagtgaaggcacaaactctcaatatctaaaataagtgcaaggaagcagtctctttggtcagtaacaagtgcaatggaaagaaaacgatcccttccttcttccactttcacagcttttctctgaactaggagaacctgggggtggatttgggtgggtggggccaaagaggaggcttctattgataaatccagagcctcaaggggcccagccacgtcaaacttctctccctcagggactctccagcaccaaaaggcagaaggtggaagccgtttttcccccagagccctgtgtttttgtgaaagcctcactgtggctcctctgttttacatactcattagtaagtgggaggtccactggggcaacagacactgccacaatttcagtgttgtgttcagccaaggggacggtctgggcaggcagcttaagtgtgagtttagtcacaactcctgagtgtcccgctctcctgcttacctaggaggtgagtgccaggaaaatacaccaaatgcttctagtattgtttccccacttaaaatagtcctgcttaaattcacatggtgtggtctgatgttctgagagcatcaggaaatacaacccttttgcccatttacccttctccccggatcccaaggtggtctgttgctctggcttcctttcattgtcttaggccttcatggagtggatgctgcctcctcctggctgtttttgtgcctgtttgaagctactgctgcctccatttctgggaaagacctttgagagcctagcccaggcctaagggctatgtttggtaccagtgttttgtctttagcttttctatgtgattgtgccgtcattctgttttaagctcatggatcaatggatttgtttacaatgtgatattttctattaaatccagtattttcaaataaca

SEQ ID NO: 12183 - DNA, 2163 bp, Homo sapiens
  source 1..2163: mol_type = unassigned DNA
gcagtcgctgcagccgccgcgggaggcgtccgtgacaagatgaagctcatcatcctggagcactattctcaggcgagcgagtgggcggctaaatacatcaggaaccgcatcatccagtttaacccagggccagagaagtacttcaccctggggctccccactggccttcctcgagaccacccggagagttaccactccttcatgtggaacaacttcttcaagcacattgacatccacccagaaaacacccacattctggatgggaatgcagtcgacctacaggcagaatgtgatgcctttgaagagaagatcaaggctgcaggtgggatcgagctatttgttggaggcatcggccctgatggacacattgccttcaacgagccaggctccagtctggtgtccaggacccgtgtgaagacgctggccatggataccatcctggccaatgctaggttcttcgatggagaactcaccaaggtgcccaccatggccttgacggtgggggtgggcactgtcatggatgctagagaggtgatgatccttatcacaggtgctcacaaggcatttgctctgtacaaggccatcgaggagggagtgaaccacatgtggaccgtgtctgccttccagcagcatccccgcaccgtgtttgtgtgtgacgaggatgccaccttggagctgaaagtgaagactgtcaagtatttcaaaggtttaatgcttgttcataacaagttggtggaccccttgtacagtatcaaagagaaagaaactgagaaaagccaatcttcgaagaaaccatacagcgattagcctgtgctgggacctagtgtcaagtacccatagggaaaggcaggtctttctggaaattgtctttagaagaaagaattgtatttctttaatctagtatggttactccagataagtgggtgaacttattgttcttggccatgaggctgggagcctagtcacggagtttagctatagggagaatgtttgtaacttaatcagaaaaaaaatatctgcaaaatgtactccatcattttgatgtctgccaaacccaggttgggagttttaaactttttgttctgcttcagccatggttcacacatatgacacactcccgtcaggaatttctctccttacacgcactgattttcaagtgggagggaattaggggcttatgtatattggataccacctctttgaagagtcttgagagtccttcttgcacaggcctgccccttggttgagaaccattgttccaagtgaaggcacaaactctcaatatctaaaataagtgcaaggaagcagtctctttggtcagtaacaagtgcaatggaaagaaaacgatcccttccttcttccactttcacagcttttctctgaactaggagaacctgggggtggatttgggtgggtggggccaaagaggaggcttctattgataaatccagagcctcaaggggcccagccacgtcaaacttctctccctcagggactctccagcaccaaaaggcagaaggtggaagccgtttttcccccagagccctgtgtttttgtgaaagcctcactgtggctcctctgttttacatactcattagtaagtgggaggtccactggggcaacagacactgccacaatttcagtgttgtgttcagccaaggggacggtctgggcaggcagcttaagtgtgagtttagtcacaactcctgagtgtcccgctctcctgcttacctaggaggtgagtgccaggaaaatacaccaaatgcttctagtattgtttccccacttaaaatagtcctgcttaaattcacatggtgtggtctgatgttctgagagcatcaggaaatacaacccttttgcccatttacccttctccccggatcccaaggtggtctgttgctctggcttcctttcattgtcttaggccttcatggagtggatgctgcctcctcctggctgtttttgtgcctgtttgaagctactgctgcctccatttctgggaaagacctttgagagcctagcccaggcctaagggctatgtttggtaccagtgttttgtctttagcttttctatgtgattgtgccgtcattctgttttaagctcatggatcaatggatttgtttacaatgtgatattttctattaaatccagtattttcaaat

SEQ ID NO: 12184 - DNA, 2319 bp, Homo sapiens
  source 1..2319: mol_type = unassigned DNA
ggcgcagtcgctgcagccgccgcgggaggcgtccgtgaggaaacggctcagagagaacttaggtcctttgaccgaggtcctgcaggtggacaagatgaagctcatcatcctggagcactattctcaggcgagcgagtgggcggctaaatacatcaggaaccgcatcatccagtttaacccagggccagagaagtacttcaccctggggctccccactgggagtaccccacttggctgctacaagaagctgattgaatactataagaatggggacctgtcctttaaatatgtgaagaccttcaacatggatgagtacgtgggccttcctcgagaccacccggagagttaccactccttcatgtggaacaacttcttcaagcacattgacatccacccagaaaacacccacattctggatgggaatgcagtcgacctacaggcagaatgtgatgcctttgaagagaagatcaaggctgcaggtgggatcgagctatttgttggaggcatcggccctgatggacacattgccttcaacgagccaggctccagtctggtgtccaggacccgtgtgaagacgctggccatggataccatcctggccaatgctaggttcttcgatggagaactcaccaaggtgcccaccatggccttgacggtgggggtgggcactgtcatggatgctagagaggtgatgatccttatcacaggtgctcacaaggcatttgctctgtacaaggccatcgaggagggagtgaaccacatgtggaccgtgtctgccttccagcagcatccccgcaccgtgtttgtgtgtgacgaggatgccaccttggagctgaaagtgaagactgtcaagtatttcaaaggtttaatgcttgttcataacaagttggtggaccccttgtacagtatcaaagagaaagaaactgagaaaagccaatcttcgaagaaaccatacagcgattagcctgtgctgggacctagtgtcaagtacccatagggaaaggcaggtctttctggaaattgtctttagaagaaagaattgtatttctttaatctagtatggttactccagataagtgggtgaacttattgttcttggccatgaggctgggagcctagtcacggagtttagctatagggagaatgtttgtaacttaatcagaaaaaaaatatctgcaaaatgtactccatcattttgatgtctgccaaacccaggttgggagttttaaactttttgttctgcttcagccatggttcacacatatgacacactcccgtcaggaatttctctccttacacgcactgattttcaagtgggagggaattaggggcttatgtatattggataccacctctttgaagagtcttgagagtccttcttgcacaggcctgccccttggttgagaaccattgttccaagtgaaggcacaaactctcaatatctaaaataagtgcaaggaagcagtctctttggtcagtaacaagtgcaatggaaagaaaacgatcccttccttcttccactttcacagcttttctctgaactaggagaacctgggggtggatttgggtgggtggggccaaagaggaggcttctattgataaatccagagcctcaaggggcccagccacgtcaaacttctctccctcagggactctccagcaccaaaaggcagaaggtggaagccgtttttcccccagagccctgtgtttttgtgaaagcctcactgtggctcctctgttttacatactcattagtaagtgggaggtccactggggcaacagacactgccacaatttcagtgttgtgttcagccaaggggacggtctgggcaggcagcttaagtgtgagtttagtcacaactcctgagtgtcccgctctcctgcttacctaggaggtgagtgccaggaaaatacaccaaatgcttctagtattgtttccccacttaaaatagtcctgcttaaattcacatggtgtggtctgatgttctgagagcatcaggaaatacaacccttttgcccatttacccttctccccggatcccaaggtggtctgttgctctggcttcctttcattgtcttaggccttcatggagtggatgctgcctcctcctggctgtttttgtgcctgtttgaagctactgctgcctccatttctgggaaagacctttgagagcctagcccaggcctaagggctatgtttggtaccagtgttttgtctttagcttttctatgtgattgtgccgtcattctgttttaagctcatggatcaatggatttgtttacaatgtgatattttctattaaatccagtattttcaaa

SEQ ID NO: 12185 - DNA, 543 bp, Homo sapiens
  source 1..543: mol_type = unassigned DNA
gcagtcgctgcagccgccgcgggaggcgtccgttctgtgaagtaggtactattgtcccaatttttacataggaggaaacggctcagagagaacttaggtcctttgaccgaggtcctgcaggtggacaagatgaagctcatcatcctggagcactattctcaggcgagcgagtgggcggctaaatacatcaggaaccgcatcatccagtttaacccagggccagagaagtacttcaccctggggctccccactgggagtaccccacttggctgctacaagaagctgattgaatactataagaatggggacctgtcctttaaatatgtgaagaccttcaacatggatgagtacgtgggccttcctcgagaccacccggagagttaccactccttcatgtggaacaacttcttcaagcacattgacatccacccagaaaacacccacattctggatgggaatgcagtcgacctacaggcagaatgtgatgcctttgaagagaagatcaaggctgcaggtgggatcgagctatttgttggaggcatc

SEQ ID NO: 12186 - DNA, 2622 bp, Homo sapiens
  source 1..2622: mol_type = unassigned DNA
cggggaccttcctcgcgggccggagcgcggagcgctgccccagccctacggcactcggggtcgggaccccggggagccgccctcacacattttccaggagggatcggaggggcgatggggtggtaatgggggtgggggacacgctgtaccccaccgacgaccgcgcgggccaccttcgcctctttccttcacactcccactaaccgcagtgctgggggaacaaaatgtcctccttctggagcgattaccttttcccttttgtgctttgggggaaactgaagacccagaggggttcgcaaagcaagtctgtgaagtaggtactattgtcccaatttttacataggaggaaacggctcagagagaacttaggtcctttgaccgaggtcctgcaggtggacaagatgaagctcatcatcctggagcactattctcaggcgagcgagtgggcggctaaatacatcaggaaccgcatcatccagtttaacccagggccagagaagtacttcaccctggggctccccactgggagtaccccacttggctgctacaagaagctgattgaatactataagaatggggacctgtcctttaaatatgtgaagaccttcaacatggatgagtacgtgggccttcctcgagaccacccggagagttaccactccttcatgtggaacaacttcttcaagcacattgacatccacccagaaaacacccacattctggatgggaatgcagtcgacctacaggcagaatgtgatgcctttgaagagaagatcaaggctgcaggtgggatcgagctatttgttggaggcatcggccctgatggacacattgccttcaacgagccaggctccagtctggtgtccaggacccgtgtgaagacgctggccatggataccatcctggccaatgctaggttcttcgatggagaactcaccaaggtgcccaccatggccttgacggtgggggtgggcactgtcatggatgctagagaggtgatgatccttatcacaggtgctcacaaggcatttgctctgtacaaggccatcgaggagggagtgaaccacatgtggaccgtgtctgccttccagcagcatccccgcaccgtgtttgtgtgtgacgaggatgccaccttggagctgaaagtgaagactgtcaagtatttcaaaggtttaatgcttgttcataacaagttggtggaccccttgtacagtatcaaagagaaagaaactgagaaaagccaatcttcgaagaaaccatacagcgattagcctgtgctgggacctagtgtcaagtacccatagggaaaggcaggtctttctggaaattgtctttagaagaaagaattgtatttctttaatctagtatggttactccagataagtgggtgaacttattgttcttggccatgaggctgggagcctagtcacggagtttagctatagggagaatgtttgtaacttaatcagaaaaaaaatatctgcaaaatgtactccatcattttgatgtctgccaaacccaggttgggagttttaaactttttgttctgcttcagccatggttcacacatatgacacactcccgtcaggaatttctctccttacacgcactgattttcaagtgggagggaattaggggcttatgtatattggataccacctctttgaagagtcttgagagtccttcttgcacaggcctgccccttggttgagaaccattgttccaagtgaaggcacaaactctcaatatctaaaataagtgcaaggaagcagtctctttggtcagtaacaagtgcaatggaaagaaaacgatcccttccttcttccactttcacagcttttctctgaactaggagaacctgggggtggatttgggtgggtggggccaaagaggaggcttctattgataaatccagagcctcaaggggcccagccacgtcaaacttctctccctcagggactctccagcaccaaaaggcagaaggtggaagccgtttttcccccagagccctgtgtttttgtgaaagcctcactgtggctcctctgttttacatactcattagtaagtgggaggtccactggggcaacagacactgccacaatttcagtgttgtgttcagccaaggggacggtctgggcaggcagcttaagtgtgagtttagtcacaactcctgagtgtcccgctctcctgcttacctaggaggtgagtgccaggaaaatacaccaaatgcttctagtattgtttccccacttaaaatagtcctgcttaaattcacatggtgtggtctgatgttctgagagcatcaggaaatacaacccttttgcccatttacccttctccccggatcccaaggtggtctgttgctctggcttcctttcattgtcttaggccttcatggagtggatgctgcctcctcctggctgtttttgtgcctgtttgaagctactgctgcctccatttctgggaaagacctttgagagcctagcccaggcctaagggctatgtttggtaccagtgttttgtctttagcttttctatgtgattgtgccgtcattctgttttaagctcatggatcaatggatttgtttacaatgtgatattttctattaaatccagtatttt

SEQ ID NO: 12187 - DNA, 473 bp, Homo sapiens
  source 1..473: mol_type = unassigned DNA
gtgtaagtgggtagcagggctggcggggaccttcctcgcgggccggagcgcggagcgctgccccagccctacggcactcggggtcgggaccccggggagccgccctcacacattttccaggagggatcggaggggcgatggggtggtaatgggggtgggggacacgctgtaccccaccgacgaccgcgcgggccaccttcgcctctttccttcacactcccactaaccgcagtgctgggggaacaaaatgtcctccttctggagcgattaccttttcccttttgtgctttgggggaaactgaagacccagaggggttcgcaaagcaaggaggaaacggctcagagagaacttaggtcctttgaccgaggtcctgcaggtggacaagatgaagctcatcatcctggagcactattctcaggcgagcgagtgggcggctaaatacatcaggaaccgcatcatccagtttaaccca

SEQ ID NO: 12188 - DNA, 2980 bp, Homo sapiens
  source 1..2980: mol_type = unassigned DNA
ctctttccttcacactcccactaaccgcagtgctgggggaacaaaatgtcctccttctggagcgattaccttttcccttttgtgctttgggggaaactgaagacccagaggggttcgcaaagcaaggtgggccagtaggaagacccctccgctagtccagagagagcacacagctccccaggcagagctcattgccccacctgctctagtggcccagcatgatcccatgacctctctacttctggaggaagagtcttggggtagacggcggggagggggtagggtatcccgttccggtaggggcagggatgagggaggcggggctgagccgagcatctatctggatggtaacagccaacgtagaaaatactaagttgtttacatgcattctctcatttcatattacccgtcgtgaagtctgtgaagtaggtactattgtcccaatttttacataggaggaaacggctcagagagaacttaggtcctttgaccgaggtcctgcaggtggtaagtgaaggagctgagattagaacccagatctgcccccagtggcgcctcctcgtggtctgtgggtggtggagacgactggcctagcctcttagctcctctgtgaatagaaaggcctttttcctggctcagacagcttgggaaggggattgttgctgggtaagagaagcttctcccaccacctccatctctttctctgccccttaccattgattcctttctgtcatcccctctcccccactgcaggacaagatgaagctcatcatcctggagcactattctcaggcgagcgagtgggcggctaaatacatcaggaaccgcatcatccagtttaacccagggccagagaagtacttcaccctggggctccccactgggagtaccccacttggctgctacaagaagctgattgaatactataagaatggggacctgtcctttaaatatgtgaagaccttcaacatggatgagtacgtgggccttcctcgagaccacccggagagttaccactccttcatgtggaacaacttcttcaagcacattgacatccacccagaaaacacccacattctggatgggaatgcagtcgacctacaggcagaatgtgatgcctttgaagagaagatcaaggctgcaggtgggatcgagctatttgttggaggcatcggccctgatggacacattgccttcaacgagccaggctccagtctggtgtccaggacccgtgtgaagacgctggccatggataccatcctggccaatgctaggttcttcgatggagaactcaccaaggtgcccaccatggccttgacggtgggggtgggcactgtcatggatgctagagaggtgatgatccttatcacaggtgctcacaaggcatttgctctgtacaaggccatcgaggagggagtgaaccacatgtggaccgtgtctgccttccagcagcatccccgcaccgtgtttgtgtgtgacgaggatgccaccttggagctgaaagtgaagactgtcaagtatttcaaaggtttaatgcttgttcataacaagttggtggaccccttgtacagtatcaaagagaaagaaactgagaaaagccaatcttcgaagaaaccatacagcgattagcctgtgctgggacctagtgtcaagtacccatagggaaaggcaggtctttctggaaattgtctttagaagaaagaattgtatttctttaatctagtatggttactccagataagtgggtgaacttattgttcttggccatgaggctgggagcctagtcacggagtttagctatagggagaatgtttgtaacttaatcagaaaaaaaatatctgcaaaatgtactccatcattttgatgtctgccaaacccaggttgggagttttaaactttttgttctgcttcagccatggttcacacatatgacacactcccgtcaggaatttctctccttacacgcactgattttcaagtgggagggaattaggggcttatgtatattggataccacctctttgaagagtcttgagagtccttcttgcacaggcctgccccttggttgagaaccattgttccaagtgaaggcacaaactctcaatatctaaaataagtgcaaggaagcagtctctttggtcagtaacaagtgcaatggaaagaaaacgatcccttccttcttccactttcacagcttttctctgaactaggagaacctgggggtggatttgggtgggtggggccaaagaggaggcttctattgataaatccagagcctcaaggggcccagccacgtcaaacttctctccctcagggactctccagcaccaaaaggcagaaggtggaagccgtttttcccccagagccctgtgtttttgtgaaagcctcactgtggctcctctgttttacatactcattagtaagtgggaggtccactggggcaacagacactgccacaatttcagtgttgtgttcagccaaggggacggtctgggcaggcagcttaagtgtgagtttagtcacaactcctgagtgtcccgctctcctgcttacctaggaggtgagtgccaggaaaatacaccaaatgcttctagtattgtttccccacttaaaatagtcctgcttaaattcacatggtgtggtctgatgttctgagagcatcaggaaatacaacccttttgcccatttacccttctccccggatcccaaggtggtctgttgctctggcttcctttcattgtcttaggccttcatggagtggatgctgcctcctcctggctgtttttgtgcctgtttgaagctactgctgcctccatttctgggaaagacctttgagagcctagcccaggcctaagggctatgtttggtaccagtgttttgtctttagcttttctatgtgattgtgccgtcattctgttttaagctcatggatcaatggatttgtttacaatgtgatattttctattaaatccagtatttt

SEQ ID NO: 12189 - DNA, 570 bp, Homo sapiens
  source 1..570: mol_type = unassigned DNA
gtgtaagtgggtagcagggctggcggggaccttcctcgcgggccggagcgcggagcgctgccccagccctacggcactcggggacaagatgaagctcatcatcctggagcactattctcaggcgagcgagtgggcggctaaatacatcaggaaccgcatcatccagtttaacccagggccagagaagtacttcaccctggggctccccactgggagtaccccacttggctgctacaagaagctgattgaatactataagaatggggacctgtcctttaaatatgtgaagaccttcaacatggatgagtacgtgggccttcctcgagaccacccggagagttaccactccttcatgtggaacaacttcttcaagcacattgacatccacccagaaaacacccacattctggatgggaatgcagtcgacctacaggcagaatgtgatgcctttgaagagaagatcaaggctgcaggtgggatcgagctatttgttggaggcatcggccctgatggacacattgccttcaacgagccaggctccagtctggtgtccaggacccgtgtgaagac

SEQ ID NO: 12190 - DNA, 1063 bp, Homo sapiens
  source 1..1063: mol_type = unassigned DNA
gcagtcgctgcagccgccgcgggaggcgtccgtgacaagatgaagctcatcatcctggagcactattctcaggcgagcgagtgggcggctaaatacatcaggaaccgcatcatccagtttaacccagggccagagaagtacttcaccctggggctccccactgggagtaccccacttggctgctacaagaagctgattgaatactataagaatggggacctgtcctttaaatatgtgaagaccttcaacgagccaggctccagtctggtgtccaggacccgtgtgaagacgctggccatggataccatcctggccaatgctaggttcttcgatggagaactcaccaaggtgcccaccatggccttgacggtgggggtgggcactgtcatggatgctagagaggtgatgatccttatcacaggtgctcacaaggcatttgctctgtacaaggccatcgaggagggagtgaaccacatgtggaccgtgtctgccttccagcagcatccccgcaccgtgtttgtgtgtgacgaggatgccaccttggagctgaaagtgaagactgtcaagtatttcaaaggtttaatgcttgttcataacaagttggtggaccccttgtacagtatcaaagagaaagaaactgagaaaagccaatcttcgaagaaaccatacagcgattagcctgtgctgggacctagtgtcaagtacccatagggaaaggcaggtctttctggaaattgtctttagaagaaagaattgtatttctttaatctagtatggttactccagataagtgggtgaacttattgttcttggccatgaggctgggagcctagtcacggagtttagctatagggagaatgtttgtaacttaatcagaaaaaaaatatctgcaaaatgtactccatcattttgatgtctgccaaacccaggttgggagttttaaactttttgttctgcttcagccatggttcacacatatgacacactcccgtcaggaatttctctccttacacgcactgattttcaagtgggagggaattaggggcttatgtatattggatac

SEQ ID NO: 12191 - DNA, 1930 bp, Homo sapiens
  source 1..1930: mol_type = unassigned DNA
cgcctttatctgcatccgggtccgtgggattcgcgctccactggtcagctggggtcgctctcgggtggttgggtgttgcttgttcccgctgttccagcatcgaagaaccattgggtctgccggtttgaacttgttctggaagctgtgcgtcaccgtaatgaggcttgtaattcttgataactatgacttggctagtgaatgggcagccaaatacatctgtaatcgcatcattcagttcaaacctggacaggacagatattttacactgggtttaccaacagggagtacacctttaggatgctataaaaaactaatagaatatcataagaatggacacctttcttttaaatatgtgaagacctttaatatggatgaatatgtaggacttccaagaaatcatcctgaaagctaccattcttatatgtggaataatttttttaagcatatcgatatagatcctaataatgcacatatccttgacgggaatgctgcagatttacaagcagaatgtgatgcttttgaaaacaaaataaaagaagctggaggaatagatctttttgttggaggaattggtccagatggtcatatcgctttcaatgagcctggatccagtttagtgtcaaggacaagattaaagactctagcaatggataccatcttggcaaatgccaaatattttgatggagatttatcaaaagtgccaactatggctctaactgttggtgtggggacagtgatggatgctagagaagtaatgatccttataacaggggcacacaaggcatttgccctgtacaaagcaatagaagaaggagtcaatcacatgtggactgtttccgctttccagcagcatccccggactatttttgtatgcgatgaagatgctactttagaattaagagttaaaactgtgaaatactttaaaggtctaatgcatgtgcacaataaacttgtggatccactattcagtatgaaagatggaaactgaaggagactggagcaaaattcagcttgaatgaacagagcactttttactaagtagtagatgaattttcagctatgcaatatgacaaaacatggggaattttgaagattgtcattttttcattcgagtctctatgttaaacattccatattttgaatatttatatcttgtacttgggtttaagagaagtagctggctctcaagattgactggctatttattataaagtactgaagtcacatagccacctataaaacagcatagaaatgtctgcctgtttaaaaagtcattttaaaggtagagtgtccacatcaggcaccatttgtgatatgactccagtggcgtatatttcattttttaatgacaagacactccaaacctttcagataacaaactatcattgcagaccttcacttttggaatgcaatctttatattttctgtgcatcacacacatgcttttctgcacgtggttgccttagtcatcttcctacagcaccatctagacatcaaaaattgtgctatatatcattggtaaaggaaatttgaagagatgacagtgcctaaaagtacagtttacatccttttggaaagtatgtgtaagtgcatgttttttgtgcaccttcttctatagcacttttttacaaatatcttatttttatttaacgacttgggttcatgtccctaatataagtatcttgacaattatgagctttatacctagcaagccacttcaggaaattcttttggagaatattttctgattattgttaaacttaatatacaattagctttattccttataaaatgtctaaaagaataatacgaagtatatataaaaggaattactgtaaactacattgccatagcaatttacataaaagtatattgttttttatctttaactcaaataaagcgtgtaataaataagttatctaaatttcca

SEQ ID NO: 12192 - DNA, 5382 bp, Homo sapiens
  source 1..5382: mol_type = unassigned DNA
ggggtcgctctcgggtggttgggtgttgcttgttcccgctgttccagcatcgaagaaccattgggtctgccggtttgaacttgttctggaagctgtgcgtcaccgtaatgaggcttgtaattcttgataactatgacttggctagtgaatgggcagccaaatacatctgtaatcgcatcattcagttcaaacctggacaggacagatattttacactgggtttaccaacagggagtacacctttaggatgctataaaaaactaatagaatatcataagaatggacacctttcttttaaatatgtgaagacctttaatatggatgaatatgtaggacttccaagaaatcatcctgaaagctaccattcttatatgtggaataatttttttaagcatatcgatatagatcctaataatgcacatatccttgacgggaatgctgcagatttacaagcagaatgtgatgcttttgaaaacaaaataaaagaagctggaggaatagatctttttgttggaggaattggtccagatggtcatatcgctttcaatgagcctggatccagtttagtgtcaaggacaagattaaagactctagcaatggataccatcttggcaaatgccaaatattttgatggagatttatcaaaagtgccaactatggctctaactgttggtgtggggacagtgatggatgctagagaagtaatgatccttataacaggggcacacaaggcatttgccctgtacaaagcaatagaagaaggagtcaatcacatgtggactgtttccgctttccagcagcatccccggactatttttgtatgcgatgaagatgctactttagaattaagagttaaaactgtgaaatactttaaaggtgagcactgaatttcaaaagccgactgagataatctgttgtgagtgacaattaaaacttactgtgactgtggggttaaatctcacactgtgacctattgaaaagtggcaacacatagctagttctttcaagtaatggaaagttctcacctcagataatagtatcttcaaagtagtacctttttttttttttcatgaagagaatctcttcagtctctattttcagtaaacaatttttcttgaaatccaaggtttaataatttactttcatattgaatatacaagaccaaataacccaaaagaaaatgtatctttgtccattctggatttcttttcatgtttactagtcccacctcaatccctcttcctcactcccctctaaccttaatttagaacctaatcagtggataagagatctcccactatctaatttaatctttacaattttaagccaatttattcccatatattaaagttataatgtctaaatgttaaaatagtatggaataaactctgcaagtaagcaggagtttgattgcccagacttcatgttgattttcctttttcctgtagtctagttcagtaattcagaaaccttactctaccaggctgtgtattacaaaacacatatgcttgatataatggttttaagagattttcaagggacattttgcctatacccaatgtagaacctattctctgatttaagagtcagctccacatattacacatatgtaagcaaactgtacaaacaggtaattttcataaagcacctgtatttacatagctgatattaaaagttacatagttgatcatatagataggtcagtgattcactatgtagtatgtatgctacttttgctacatgattataccttttaatcttttttactctagtaactaggtatttattttaatgcctattggaaaatacactgaataaatcaaagctatattttttggatattattgcttaagacaaggtccaaaaaagctaccatatttgattggctctaatacacgttgatcttgctgatgttggactgtgtcttaaaactggtgtcagatcatagcttactgggtagcatttttttctcagtggtacataaaatggtgtgtcttacaatttatagcatctcatactcagaaataaagtatataatcttaaatttttaattcaatgcaaagaaaaccaactcatatttcatgtatatgtgtgaatatggcaaatatcttgaaggtgttatacaaataactgacatttggcaagcactgaaaatagtctatttttaaacaaaatgctgatcatgctttgtatatagttttgtatttgtacttatgtttcatgagcattttcctgttttactaaatatttggaagcattttaatggatagttaagtacataaatcataatttatttaaacatttccttattaacacttagattatttctagtcatttatatttttaccatttaaattactaatttaccaagccacaaatatatcaaactgaaaaactgaaaaactgaaaaatttctgatttgtgaataaaagagcatttgatggagttttaactctattttcccatgtaacccttcagatttcatcccaaataatagattccttgactacaaggaatcctcactatccacaaattttaattccagttttaaggagattcatttaacatggccattttctagtcctcattaagtcccagataaatccctgtactaatctaattttgtcacaattaggtttttatcagatttttatatcttggtgaatatttaataagatatttaataacagccagtatctctatgaccaggcactattctaaatgcattttacttattgatttacttatcacaaaaatgttatgaaatgggtattcatagtcccatttttaaattaataggcttaacagacagagacgttaagctacttacccaaagtcatacagcacatatttgggcagagctgggtaatagaaatcaaaatcaggctgatctctggagtatgcaggcttttgtctattctattatactgcctcccagaataaactctaggtatgataccatctacatcaaaaccatatttccatctgcttttttcccatatgataatcactgcttccaaaaaaggtatatcgacatatgttagataatttaaaatagaagggtggtagatgtttatatgtatttagttcttttagttcatctaattgtaagctcttctgaaaaattttgaaacagaccattcgtgagaggatagctgcactgcatcaagaggacacagtattttccactttggagctgtctgtatttctgaagaggtttcagggtatcagcctgttaggatacctccttcaatatgaagacagaatttagacattctgggctacatatgggcctcattttacagcattttagtaaagggtagagaaattgaatattcttaaataaacacatttcaaatgtagtttgtatacttttcatacctccattgagttactagtatatcaaaatactggaggatgtaaattcctataattgtcatccataactcttcaaattccattcacatcactaccctttcttctgtcatcactaaaaagtgctgaccagaatcttaaagggttttatttagtgcctagataagatctaggttaactagatccaaaacaataaaaattgtcagtaaatgcaagtttatttcaatatatacctatataacggtatataccttttgaaagatacaagttaatcacaagacaacaagtttagtacgtggggatttgttttattcattctcgcttttcatttttgctttttaaatagaacagctttgatttttagtatatgacatcatcatcatgaatttttttctcttactttgtatttaggctccacctcagtagtttgacaaaggtagaatgagttcattttgagtcaaaaccataaaagttactttgtatagacattggttagaatctgtgacatttaacctttcttctggtaacgtttcaggaagtctggtgcatttttatcagaagaattatttctgtttgacttaagtagcaattatttatttatataaaattcgtatgtagaaagttgtcagtttttacctaaagtcacagtaaatatttgacttaatatctaaaaagcaattaatagaattttcaaaataattatttctagtttggaagcagtcctatttgatgtataaaagatatatccaatgtaaagaaaaaaattttataaaggagttgaatttttaatatttactgatattttaatttgcatgtattttaaagctctgtgtattctttccgtaatcaaagttgttagcaaatgacagatgaatactatttaagtagaaaaacgatcctctacaaagtgatactctggaaaatgttgcatcttctaaatcatacagctgatattacccttatctttgttgtcccctctcctactggacatgaagtttcaggtgaccttcaagtaggctgttgagcagttgcaggactagtgaatggaatgcttcccccttccctcctttagagtcccattcttatggttagaatttctcctactacacaaacacttcccagtactctttgcttgtcccttaaaagtgggtctttctcaaagctgggattttagagtcctttttgcagcctttctgacaaggaacatctgtttactaacaagcaacctatctctccaatccagtaatcccatttcctgcaaaaccgcattaagtgcctttccccaccctcccatgttcttaatacctggaaaacttaactcatttctttaccctccaaaatataaaatctctggttcattaactgggtcagtctttttagaacttttttctccccaaagaaatatagtactgaggcattaaaacaggagtaactggaagatcagctatttcccaagcagcttccatagctaagagcagtctgcaagtatatgtaccaattacaaaatgaaagttataatctaccggatttaaaatcgtaatttctattctgaattaaatgatttaatacaggttgttttctgtcttgttttagtaaccctccctcagtgtagaatttgtaatcaacctttgtcataaatacacatgccaaactattggaaagtaatttaccagacgaatggatagggtaatgtattaagagtgagacagcagttctgagcccctggctggagtctagtagaggaactgccagaggatcaatatcaacatagacttttagatataattaaaacctattatctaagtcagtattcaaatttgtcatgcttaatctctttgaagacaagaaatgctcttctggttactcccaaagtacctgtacacattctagatctgcactgttacataattataaattggtatttgctaggtagataaaacttaagacattctgaaacatttctatttgtactttttcaataaacttgactatatcaagatgggaact

SEQ ID NO: 12193 - DNA, 2074 bp, Homo sapiens
  source 1..2074: mol_type = unassigned DNA
gggattcgcgctccactggtcagctggggtcgctctcgggtggttgggtgttgcttgttcccgctgttccagcatcgaagaaccattgggtctgccggtttgaacttgttctggaagctgtgcgtcaccgtaatgaggcttgtaattcttgataactatgacttggctagtgaatgggcagccaaatacatctgtaatcgcatcattcagttcaaacctggacaggacagatattttacactgggtttaccaacaggacttccaagaaatcatcctgaaagctaccattcttatatgtggaataatttttttaagcatatcgatatagatcctaataatgcacatatccttgacgggaatgctgcagatttacaagcagaatgtgatgcttttgaaaacaaaataaaagaagctggaggaatagatctttttgttggaggaattggtccagatggtcatatcgctttcaatgagcctggatccagtttagtgtcaaggacaagattaaagactctagcaatggataccatcttggcaaatgccaaatattttgatggagatttatcaaaagtgccaactatggctctaactgttggtgtggggacagtgatggatgctagagaagtaatgatccttataacaggggcacacaaggcatttgccctgtacaaagcaatagaagaaggagtcaatcacatgtggactgtttccgctttccagcagcatccccggactatttttgtatgcgatgaagatgctactttagaattaagagttaaaactgtgaaatactttaaaggtctaatgcatgtgcacaataaacttgtggatccactattcagtatgaaagatggaaactgaaggagactggagcaaaattcagcttgaatgaacagagcactttttactaagtagtagatgaattttcagctatgcaatatgacaaaacatggggaattttgaagattgtcattttttcattcgagtctctatgttaaacattccatattttgaatatttatatcttgtacttgggtttaagagaagtagctggctctcaagattgactggctatttattataaagtactgaagtcacatagccacctataaaacagcatagaaatgtctgcctgtttaaaaagtcattttaaaggtagagtgtccacatcaggcaccatttgtgatatgactccagtggcgtatatttcattttttaatgacaagacactccaaacctttcagataacaaactatcattgcagaccttcacttttggaatgcaatctttatattttctgtgcatcacacacatgcttttctgcacgtggttgccttagtcatcttcctacagcaccatctagacatcaaaaattgtgctatatatcattggtaaaggaaatttgaagagatgacagtgcctaaaagtacagtttacatccttttggaaagtatgtgtaagtgcatgttttttgtgcaccttcttctatagcacttttttacaaatatcttatttttatttaacgacttgggttcatgtccctaatataagtatcttgacaattatgagctttatacctagcaagccacttcaggaaattcttttggagaatattttctgattattgttaaacttaatatacaattagctttattccttataaaatgtctaaaagaataatacgaagtatatataaaaggaattactgtaaactacattgccatagcaatttacataaaagtatattgttttttatctttaactcaaataaagcgtgtaataaataagttatctaaatttccagaagtgaacctgaagaatacatgcattcgactcccaacaattatagtacatgtgaacctgcattcattttgggtttgttaccatcatgcattaggagagttaggttaaaagatgtctttgcctctgtggggagcaaaaaaatgctccttttgcttattttgcatttcataagcccacctggtagaagaagccttacttatctgcttgtctatgtgattaaaatgtagtttcttaaaatattaaaatagcaaataaattaatgaaataaaat

SEQ ID NO: 12194 - DNA, 5518 bp, Homo sapiens
  source 1..5518: mol_type = unassigned DNA
gcgcggggcgggagcttggtggagcaggagcggctgggcatcctcctgagactccggggtcagacgcccactccagcgctttctgcgcagcacaggcaccctcgcctgtcacgcctccctctcctcttcccgtctcccagcgtggatgagggcgcctgcagatcccggctagggcacggaccgcctaggccgagatttctttaaagactcgtgcagcacatcattatcgctggatgcccggacatgtaatacacctgacagcatgtgaagtgctcagaatggggcaggatgtcacctggaatcagcactaagtgattcagactttccttacttttaaatgtgctgctcttcatttcaagatgccgttgcagctctgataaatgcaaactgacaaccttcaaggccacgacggagggaaaatcattggtgcttggagcatagaagactgcccttcacaaaggaaatccctgattattgtttgaaatgctgaggacgttgctgcgaaggagacttttttcttatcccaccaaatactactttatggttcttgttttatccctaatcaccttctccgttttaaggattcatcaaaagcctgaatttgtaagtgtcagacacttggagcttgctggggagaatcctagtagtgatattaattgcaccaaagttttacagggtgatgtaaatgaaatccaaaaggtaaagcttgagatcctaacagtgaaatttaaaaagcgccctcggtggacacctgacgactatataaacatgaccagtgactgttcttctttcatcaagagacgcaaatatattgtagaaccccttagtaaagaagaggcggagtttccaatagcatattctatagtggttcatcacaagattgaaatgcttgacaggctgctgagggccatctatatgcctcagaatttctattgcattcatgtggacacaaaatccgaggattcctatttagctgcagtgatgggcatcgcttcctgttttagtaatgtctttgtggccagccgattggagagtgtggtttatgcatcgtggagccgggttcaggctgacctcaactgcatgaaggatctctatgcaatgagtgcaaactggaagtacttgataaatctttgtggtatggattttcccattaaaaccaacctagaaattgtcaggaagctcaagttgttaatgggagaaaacaacctggaaacggagaggatgccatcccataaagaagaaaggtggaagaagcggtatgaggtcgttaatggaaagctgacaaacacagggactgtcaaaatgcttcctccactcgaaacacctctcttttctggcagtgcctacttcgtggtcagtagggagtatgtggggtatgtactacagaatgaaaaaatccaaaagttgatggagtgggcacaagacacatacagccctgatgagtatctctgggccaccatccaaaggattcctgaagtcccgggctcactccctgccagccataagtatgatctgtctgacatgcaagcagttgccaggtttgtcaagtggcagtactttgagggtgatgtttccaagggtgctccctacccgccctgcgatggagtccatgtgcgctcagtgtgcattttcggagctggtgacttgaactggatgctgcgcaaacaccacttgtttgccaataagtttgacgtggatgttgacctctttgccatccagtgtttggatgagcatttgagacacaaagctttggagacattaaaacactgaccattacgggcaattttatgaacaagaagaaggatacacaaaacgtacccttatctgtttccccttccttgtcagcatcgggaagatggtatgaagtcctctttggggcagggactctagtagatcttcttgtcagagaagctgcatggtttctgcagagcacagttagctagaaaggtgatagcattaaatgttcatctagagttaatagtgggaggagtaaaggtagccttgaggccagagcaggtagcaaggcattgtggaaagaggggaccagggtggctggggaagaggccgatgcataaagtcagcctgttcaaagtgctcagggacttagcaaaatgagaagatgtgacctgtgccaaaactattttgagaattttaaatgtgaccatttttctggtatgaataaacttacagcaacaaataatcaaagatacaattaatctgatattatatttgttgaaatagaaatttgattgtactataaatgatttttgtaaataatttatattctgctctaatactgtactgtgtagtgtgtctccgtatgtcatctcagggagcttaaaatgggcttgatttaacattgtttttgtgttatttttgcttgaaacaacgcacacattttcaacaaccaaaaaatgacaatttctagtttagttaatttctacaaatcatcttatgttattagcaaggttaagacatcttttttaaaaaaattatagcttctaccaagagaaacactcaatttttctagagatttgcctctatcttcctttcctcagtcttcccagactgctatcaagctgtgtaaaaatttactttcactggaccctaaattattgtctctgctatctgactgccagtaattagtgcagaaaactaagacaggatgatacaggtttgaggggctggggagtgggaggggggagaaaaggaatgtatttaaacaatttccgatgcccatgatgagtttaaaaaccagcattgacaccatccccaaaattaaggctgtcgcttattgaatccacttgtgtccaacctcccaggattgttttatcctaatgtcacctgtatattcatttgaaaggacttggccctgttcttgggtcttcccgttacctgccccctgggtggtaagtttcctcctttctcaaccttccacgaggaggaaagaagtgtgcagtcattccacatggcctgttggaaggcctggggagggaactttgggtttgggacagatttttttttttgtttttggtatcattcacagcatacgatttttactctctccatcttcaccataagacagataatttggggttgctataatgctgtcacacatctcaaagtacattcaaatcttaaaaagaaattctcgtacttttgccatgttgatactgttcagcaaacaagctaccaggaactgtgaggctttgtcatttagcattagactttaaacaagaattaaaatcatgtgctgtatttttaaaatctagccaaattaaatagtacatgagaaattcagagtattagacagttttaaggcattcaactgagaaaactttatttgtcaaagtcagaaaacattttcatcttattgagagatatgtttttaaacttttatcatcatttgtaaatgtggaagttggtggattgctgtgtttttgcatgattagcatgggagtctgttggagcaagaggaacatgcttgttttgaaaactcgagatgatgagggtggtacatgcagtgtgttctctctttattggcttctaaaccagttttgtcctttaatgcatgtcaaatatttctcccatgcttctcttagcagaaaagtttttacctataagacagggcaccttttaactctaaaactagtgatactcagtgacatagactttgtcttataaacattttttcattttttattttgaaaaattgcaaatctacagcaaaagtaaaacagtagagtgaacaccatgtaaccctcacctggtgttaacattgtaccctatttgctttaagttgtatgtatttctgaacttggcaaaattggaaattaaaatttttaaaaattacaaatatacaaagttatttatcttagcacatttattatgtgtgactgcatctgatttatatttaaattggcaggttttgagggatttttttcttcatcataaatgtaaacataggattttagagtctatttccccaagcgccacattataactgtaaacttaccatcttctatgtagctgtgatatctcatctttctaaaatggaacttgttaaaaagtgttcaaacactatccctaatgcctgcggcagaatttatatacgatccattcattggggctcaaagtatcttttagacttttaaggacaatttacagcaaatgaaatttatgatgctgtgacaagaaatttaaagaatcaaaacgatggtttgaaaaggaaacctatgatacatgcaggagaagcaaaacccaagtgattggtgagaaatatagaaattatttaaattactttatagtaattattaaacactaatttttgtactgtcattgaaggtgttttatagagaaatctgagaaatcacattcacaaattagaagtcaaacatggccaggcacagtggctcacacctgtaatcttcaggatttcaagaccagcctagccaacatgacgaaaccccatctctactgaaaatagaaaaaaaaaattagccaggcttgcacctgtaatcccagttacctgggaggctgaggcaggagaatctcttgagcccaggaggcggaggttgcagtgagctgagatgccaccaccacaccagcctgggtgacagagtgaaactcgtatctccaaacaaacaaacaaaaagtccttaaacatatgtgaacaaaaattttgtgatggaaggattctagttaatgagtattgcatcaagatttacatctttcttactaaggaaaagagttaataaaaattgttctttattttacaggcagttactgaggctcttcccagatctcagtaaacagccactcagccttgaaaatggagtgttgttgtttctaaacatatatttatgtcatttattaagtacagttcacttaaataacataagtagattttctcttgtagtgatttgggtaggaagaggccatgtttcagttcgttttctctgtagggtcgattgaattggaccttttcagttgttcagaaaaataaaaataatttctcatattaaatacagacgctcctcaacttatgatgtgggtaggtcccagtaaacccattataatttgaaaatatcacattgaaaatgcatttaatatctcttacctgaaatcataacttagccaagcctaccttaaatgttctcagaacatttagcctgcagttgggcaaaaccatttaacacaaagcctattttataatgaagtgttgaatagctcatgttatttactgaatactgttgtgaaagtgaaaaacaatgattgtatgggtactcaaagtataatttctactgaatgcatatcacttgtgcactgttgtaaagctgaaaaaccgttaagcctctacgatttttaagtaagttggggaccatcagtttaaaataaatgcaatactatttcatgataaacatggtcactgtaagttttactcttttgaatgagggtgcgacagaatgcagttagaatcagttcatatcaccattaaaatcatccattcagaaaccaa

SEQ ID NO: 12195 - DNA, 5972 bp, Homo sapiens
  source 1..5972: mol_type = unassigned DNA
acagaccataggtgaactgttaaggagggagaagccgcagtgtcaccttccacagtcctgctcccattaagacctatgaagtggaaaatgcagattattctttgaggtttcctgggaccagaaaaggtcagagactcttaatgggtaatgcagacaactggaatgcaatcatcaggtattcatttctgttttaaggttttatgtctgagaaacctgaaacctgaagaagtaaagcaatcatgattttttaaaaacttaataatatggttttggatttaaaaagaaagactgactcagagctggggaaaacactcacttgtgatacggatcaatgtgaaaacagcttaactctgttccatggcaattcgcacagtgtgactcagagacacctctcttcaccagctctggctcaggggatgtgaagccagaagcagaggtcacagtgacttcatctgagaaggacttaactgaccattgctggttttgaagccggaggaaggcccacagtcaatgaatgagagaggcttcgagaagctagaaatggcaaggaaatagattttcctctaaagctcccagaaagaaacacggttctgctgacacctcgattttaggccagtgagacctgcttcagacttctgacctacagaacgatttctttaaagactcgtgcagcacatcattatcgctggatgcccggacatgtaatacacctgacagcatgtgaagtgctcagaatggggcaggatgtcacctggaatcagcactaagtgattcagactttccttacttttaaatgtgctgctcttcatttcaagatgccgttgcagctctgataaatgcaaactgacaaccttcaaggccacgacggagggaaaatcattggtgcttggagcatagaagactgcccttcacaaaggaaatccctgattattgtttgaaatgctgaggacgttgctgcgaaggagacttttttcttatcccaccaaatactactttatggttcttgttttatccctaatcaccttctccgttttaaggattcatcaaaagcctgaatttgtaagtgtcagacacttggagcttgctggggagaatcctagtagtgatattaattgcaccaaagttttacagggtgatgtaaatgaaatccaaaaggtaaagcttgagatcctaacagtgaaatttaaaaagcgccctcggtggacacctgacgactatataaacatgaccagtgactgttcttctttcatcaagagacgcaaatatattgtagaaccccttagtaaagaagaggcggagtttccaatagcatattctatagtggttcatcacaagattgaaatgcttgacaggctgctgagggccatctatatgcctcagaatttctattgcattcatgtggacacaaaatccgaggattcctatttagctgcagtgatgggcatcgcttcctgttttagtaatgtctttgtggccagccgattggagagtgtggtttatgcatcgtggagccgggttcaggctgacctcaactgcatgaaggatctctatgcaatgagtgcaaactggaagtacttgataaatctttgtggtatggattttcccattaaaaccaacctagaaattgtcaggaagctcaagttgttaatgggagaaaacaacctggaaacggagaggatgccatcccataaagaagaaaggtggaagaagcggtatgaggtcgttaatggaaagctgacaaacacagggactgtcaaaatgcttcctccactcgaaacacctctcttttctggcagtgcctacttcgtggtcagtagggagtatgtggggtatgtactacagaatgaaaaaatccaaaagttgatggagtgggcacaagacacatacagccctgatgagtatctctgggccaccatccaaaggattcctgaagtcccgggctcactccctgccagccataagtatgatctgtctgacatgcaagcagttgccaggtttgtcaagtggcagtactttgagggtgatgtttccaagggtgctccctacccgccctgcgatggagtccatgtgcgctcagtgtgcattttcggagctggtgacttgaactggatgctgcgcaaacaccacttgtttgccaataagtttgacgtggatgttgacctctttgccatccagtgtttggatgagcatttgagacacaaagctttggagacattaaaacactgaccattacgggcaattttatgaacaagaagaaggatacacaaaacgtacccttatctgtttccccttccttgtcagcatcgggaagatggtatgaagtcctctttggggcagggactctagtagatcttcttgtcagagaagctgcatggtttctgcagagcacagttagctagaaaggtgatagcattaaatgttcatctagagttaatagtgggaggagtaaaggtagccttgaggccagagcaggtagcaaggcattgtggaaagaggggaccagggtggctggggaagaggccgatgcataaagtcagcctgttcaaagtgctcagggacttagcaaaatgagaagatgtgacctgtgccaaaactattttgagaattttaaatgtgaccatttttctggtatgaataaacttacagcaacaaataatcaaagatacaattaatctgatattatatttgttgaaatagaaatttgattgtactataaatgatttttgtaaataatttatattctgctctaatactgtactgtgtagtgtgtctccgtatgtcatctcagggagcttaaaatgggcttgatttaacattgtttttgtgttatttttgcttgaaacaacgcacacattttcaacaaccaaaaaatgacaatttctagtttagttaatttctacaaatcatcttatgttattagcaaggttaagacatcttttttaaaaaaattatagcttctaccaagagaaacactcaatttttctagagatttgcctctatcttcctttcctcagtcttcccagactgctatcaagctgtgtaaaaatttactttcactggaccctaaattattgtctctgctatctgactgccagtaattagtgcagaaaactaagacaggatgatacaggtttgaggggctggggagtgggaggggggagaaaaggaatgtatttaaacaatttccgatgcccatgatgagtttaaaaaccagcattgacaccatccccaaaattaaggctgtcgcttattgaatccacttgtgtccaacctcccaggattgttttatcctaatgtcacctgtatattcatttgaaaggacttggccctgttcttgggtcttcccgttacctgccccctgggtggtaagtttcctcctttctcaaccttccacgaggaggaaagaagtgtgcagtcattccacatggcctgttggaaggcctggggagggaactttgggtttgggacagatttttttttttgtttttggtatcattcacagcatacgatttttactctctccatcttcaccataagacagataatttggggttgctataatgctgtcacacatctcaaagtacattcaaatcttaaaaagaaattctcgtacttttgccatgttgatactgttcagcaaacaagctaccaggaactgtgaggctttgtcatttagcattagactttaaacaagaattaaaatcatgtgctgtatttttaaaatctagccaaattaaatagtacatgagaaattcagagtattagacagttttaaggcattcaactgagaaaactttatttgtcaaagtcagaaaacattttcatcttattgagagatatgtttttaaacttttatcatcatttgtaaatgtggaagttggtggattgctgtgtttttgcatgattagcatgggagtctgttggagcaagaggaacatgcttgttttgaaaactcgagatgatgagggtggtacatgcagtgtgttctctctttattggcttctaaaccagttttgtcctttaatgcatgtcaaatatttctcccatgcttctcttagcagaaaagtttttacctataagacagggcaccttttaactctaaaactagtgatactcagtgacatagactttgtcttataaacattttttcattttttattttgaaaaattgcaaatctacagcaaaagtaaaacagtagagtgaacaccatgtaaccctcacctggtgttaacattgtaccctatttgctttaagttgtatgtatttctgaacttggcaaaattggaaattaaaatttttaaaaattacaaatatacaaagttatttatcttagcacatttattatgtgtgactgcatctgatttatatttaaattggcaggttttgagggatttttttcttcatcataaatgtaaacataggattttagagtctatttccccaagcgccacattataactgtaaacttaccatcttctatgtagctgtgatatctcatctttctaaaatggaacttgttaaaaagtgttcaaacactatccctaatgcctgcggcagaatttatatacgatccattcattggggctcaaagtatcttttagacttttaaggacaatttacagcaaatgaaatttatgatgctgtgacaagaaatttaaagaatcaaaacgatggtttgaaaaggaaacctatgatacatgcaggagaagcaaaacccaagtgattggtgagaaatatagaaattatttaaattactttatagtaattattaaacactaatttttgtactgtcattgaaggtgttttatagagaaatctgagaaatcacattcacaaattagaagtcaaacatggccaggcacagtggctcacacctgtaatcttcaggatttcaagaccagcctagccaacatgacgaaaccccatctctactgaaaatagaaaaaaaaaattagccaggcttgcacctgtaatcccagttacctgggaggctgaggcaggagaatctcttgagcccaggaggcggaggttgcagtgagctgagatgccaccaccacaccagcctgggtgacagagtgaaactcgtatctccaaacaaacaaacaaaaagtccttaaacatatgtgaacaaaaattttgtgatggaaggattctagttaatgagtattgcatcaagatttacatctttcttactaaggaaaagagttaataaaaattgttctttattttacaggcagttactgaggctcttcccagatctcagtaaacagccactcagccttgaaaatggagtgttgttgtttctaaacatatatttatgtcatttattaagtacagttcacttaaataacataagtagattttctcttgtagtgatttgggtaggaagaggccatgtttcagttcgttttctctgtagggtcgattgaattggaccttttcagttgttcagaaaaataaaaataatttctcatattaaatacagacgctcctcaacttatgatgtgggtaggtcccagtaaacccattataatttgaaaatatcacattgaaaatgcatttaatatctcttacctgaaatcataacttagccaagcctaccttaaatgttctcagaacatttagcctgcagttgggcaaaaccatttaacacaaagcctattttataatgaagtgttgaatagctcatgttatttactgaatactgttgtgaaagtgaaaaacaatgattgtatgggtactcaaagtataatttctactgaatgcatatcacttgtgcactgttgtaaagctgaaaaaccgttaagcctctacgatttttaagtaagttggggaccatcagtttaaaataaatgcaatactatttcatgataaacatggtcactgtaagttttactcttttgaatgagggtgcgacagaatgcagttagaatcagttcatatcaccattaaaatcatccattcagaaacc

SEQ ID NO: 12196 - DNA, 5476 bp, Homo sapiens
  source 1..5476: mol_type = unassigned DNA
gggcctctgggggcggccccggggcgggccacgctggtgtgagggctgcaggcgcagctccggagcgcctagagcgcggcgcggggcgggagcttggtggagcaggagcggctgggcatcctcctgagactccggggtcagacgcccactccagatttctttaaagactcgtgcagcacatcattatcgctggatgcccggacatgtaatacacctgacagcatgtgaagtgctcagaatggggcaggatgtcacctggaatcagcactaagtgattcagactttccttacttttaaatgtgctgctcttcatttcaagatgccgttgcagctctgataaatgcaaactgacaaccttcaaggccacgacggagggaaaatcattggtgcttggagcatagaagactgcccttcacaaaggaaatccctgattattgtttgaaatgctgaggacgttgctgcgaaggagacttttttcttatcccaccaaatactactttatggttcttgttttatccctaatcaccttctccgttttaaggattcatcaaaagcctgaatttgtaagtgtcagacacttggagcttgctggggagaatcctagtagtgatattaattgcaccaaagttttacagggtgatgtaaatgaaatccaaaaggtaaagcttgagatcctaacagtgaaatttaaaaagcgccctcggtggacacctgacgactatataaacatgaccagtgactgttcttctttcatcaagagacgcaaatatattgtagaaccccttagtaaagaagaggcggagtttccaatagcatattctatagtggttcatcacaagattgaaatgcttgacaggctgctgagggccatctatatgcctcagaatttctattgcattcatgtggacacaaaatccgaggattcctatttagctgcagtgatgggcatcgcttcctgttttagtaatgtctttgtggccagccgattggagagtgtggtttatgcatcgtggagccgggttcaggctgacctcaactgcatgaaggatctctatgcaatgagtgcaaactggaagtacttgataaatctttgtggtatggattttcccattaaaaccaacctagaaattgtcaggaagctcaagttgttaatgggagaaaacaacctggaaacggagaggatgccatcccataaagaagaaaggtggaagaagcggtatgaggtcgttaatggaaagctgacaaacacagggactgtcaaaatgcttcctccactcgaaacacctctcttttctggcagtgcctacttcgtggtcagtagggagtatgtggggtatgtactacagaatgaaaaaatccaaaagttgatggagtgggcacaagacacatacagccctgatgagtatctctgggccaccatccaaaggattcctgaagtcccgggctcactccctgccagccataagtatgatctgtctgacatgcaagcagttgccaggtttgtcaagtggcagtactttgagggtgatgtttccaagggtgctccctacccgccctgcgatggagtccatgtgcgctcagtgtgcattttcggagctggtgacttgaactggatgctgcgcaaacaccacttgtttgccaataagtttgacgtggatgttgacctctttgccatccagtgtttggatgagcatttgagacacaaagctttggagacattaaaacactgaccattacgggcaattttatgaacaagaagaaggatacacaaaacgtacccttatctgtttccccttccttgtcagcatcgggaagatggtatgaagtcctctttggggcagggactctagtagatcttcttgtcagagaagctgcatggtttctgcagagcacagttagctagaaaggtgatagcattaaatgttcatctagagttaatagtgggaggagtaaaggtagccttgaggccagagcaggtagcaaggcattgtggaaagaggggaccagggtggctggggaagaggccgatgcataaagtcagcctgttcaaagtgctcagggacttagcaaaatgagaagatgtgacctgtgccaaaactattttgagaattttaaatgtgaccatttttctggtatgaataaacttacagcaacaaataatcaaagatacaattaatctgatattatatttgttgaaatagaaatttgattgtactataaatgatttttgtaaataatttatattctgctctaatactgtactgtgtagtgtgtctccgtatgtcatctcagggagcttaaaatgggcttgatttaacattgtttttgtgttatttttgcttgaaacaacgcacacattttcaacaaccaaaaaatgacaatttctagtttagttaatttctacaaatcatcttatgttattagcaaggttaagacatcttttttaaaaaaattatagcttctaccaagagaaacactcaatttttctagagatttgcctctatcttcctttcctcagtcttcccagactgctatcaagctgtgtaaaaatttactttcactggaccctaaattattgtctctgctatctgactgccagtaattagtgcagaaaactaagacaggatgatacaggtttgaggggctggggagtgggaggggggagaaaaggaatgtatttaaacaatttccgatgcccatgatgagtttaaaaaccagcattgacaccatccccaaaattaaggctgtcgcttattgaatccacttgtgtccaacctcccaggattgttttatcctaatgtcacctgtatattcatttgaaaggacttggccctgttcttgggtcttcccgttacctgccccctgggtggtaagtttcctcctttctcaaccttccacgaggaggaaagaagtgtgcagtcattccacatggcctgttggaaggcctggggagggaactttgggtttgggacagatttttttttttgtttttggtatcattcacagcatacgatttttactctctccatcttcaccataagacagataatttggggttgctataatgctgtcacacatctcaaagtacattcaaatcttaaaaagaaattctcgtacttttgccatgttgatactgttcagcaaacaagctaccaggaactgtgaggctttgtcatttagcattagactttaaacaagaattaaaatcatgtgctgtatttttaaaatctagccaaattaaatagtacatgagaaattcagagtattagacagttttaaggcattcaactgagaaaactttatttgtcaaagtcagaaaacattttcatcttattgagagatatgtttttaaacttttatcatcatttgtaaatgtggaagttggtggattgctgtgtttttgcatgattagcatgggagtctgttggagcaagaggaacatgcttgttttgaaaactcgagatgatgagggtggtacatgcagtgtgttctctctttattggcttctaaaccagttttgtcctttaatgcatgtcaaatatttctcccatgcttctcttagcagaaaagtttttacctataagacagggcaccttttaactctaaaactagtgatactcagtgacatagactttgtcttataaacattttttcattttttattttgaaaaattgcaaatctacagcaaaagtaaaacagtagagtgaacaccatgtaaccctcacctggtgttaacattgtaccctatttgctttaagttgtatgtatttctgaacttggcaaaattggaaattaaaatttttaaaaattacaaatatacaaagttatttatcttagcacatttattatgtgtgactgcatctgatttatatttaaattggcaggttttgagggatttttttcttcatcataaatgtaaacataggattttagagtctatttccccaagcgccacattataactgtaaacttaccatcttctatgtagctgtgatatctcatctttctaaaatggaacttgttaaaaagtgttcaaacactatccctaatgcctgcggcagaatttatatacgatccattcattggggctcaaagtatcttttagacttttaaggacaatttacagcaaatgaaatttatgatgctgtgacaagaaatttaaagaatcaaaacgatggtttgaaaaggaaacctatgatacatgcaggagaagcaaaacccaagtgattggtgagaaatatagaaattatttaaattactttatagtaattattaaacactaatttttgtactgtcattgaaggtgttttatagagaaatctgagaaatcacattcacaaattagaagtcaaacatggccaggcacagtggctcacacctgtaatcttcaggatttcaagaccagcctagccaacatgacgaaaccccatctctactgaaaatagaaaaaaaaaattagccaggcttgcacctgtaatcccagttacctgggaggctgaggcaggagaatctcttgagcccaggaggcggaggttgcagtgagctgagatgccaccaccacaccagcctgggtgacagagtgaaactcgtatctccaaacaaacaaacaaaaagtccttaaacatatgtgaacaaaaattttgtgatggaaggattctagttaatgagtattgcatcaagatttacatctttcttactaaggaaaagagttaataaaaattgttctttattttacaggcagttactgaggctcttcccagatctcagtaaacagccactcagccttgaaaatggagtgttgttgtttctaaacatatatttatgtcatttattaagtacagttcacttaaataacataagtagattttctcttgtagtgatttgggtaggaagaggccatgtttcagttcgttttctctgtagggtcgattgaattggaccttttcagttgttcagaaaaataaaaataatttctcatattaaatacagacgctcctcaacttatgatgtgggtaggtcccagtaaacccattataatttgaaaatatcacattgaaaatgcatttaatatctcttacctgaaatcataacttagccaagcctaccttaaatgttctcagaacatttagcctgcagttgggcaaaaccatttaacacaaagcctattttataatgaagtgttgaatagctcatgttatttactgaatactgttgtgaaagtgaaaaacaatgattgtatgggtactcaaagtataatttctactgaatgcatatcacttgtgcactgttgtaaagctgaaaaaccgttaagcctctacgatttttaagtaagttggggaccatcagtttaaaataaatgcaatactatttcatgataaacatggtcactgtaagttttactcttttgaatgagggtgcgacagaatgcagttagaatcagttcatatcaccattaaaatcatccattcagaaacc

SEQ ID NO: 12197 - DNA, 1628 bp, Homo sapiens
  source 1..1628: mol_type = unassigned DNA
actctctaacaccagcacctctatcttgctgagctccagccaaagaaggaagatttctttaaagactcgtgcagcacatcattatcgctggatgcccggacatgtaatacacctgacagcatgtgaagtgctcagaatggggcaggatgtcacctggaatcagcactaagtgattcagactttccttacttttaaatgtgctgctcttcatttcaagatgccgttgcagctctgataaatgcaaactgacaaccttcaaggccacgacggagggaaaatcattggtgcttggagcatagaagactgcccttcacaaaggaaatccctgattattgtttgaaatgctgaggacgttgctgcgaaggagacttttttcttatcccaccaaatactactttatggttcttgttttatccctaatcaccttctccgttttaaggattcatcaaaagcctgaatttgtaagtgtcagacacttggagcttgctggggagaatcctagtagtgatattaattgcaccaaagttttacagggtgatgtaaatgaaatccaaaaggtaaagcttgagatcctaacagtgaaatttaaaaagcgccctcggtggacacctgacgactatataaacatgaccagtgactgttcttctttcatcaagagacgcaaatatattgtagaaccccttagtaaagaagaggcggagtttccaatagcatattctatagtggttcatcacaagattgaaatgcttgacaggctgctgagggccatctatatgcctcagaatttctattgcattcatgtggacacaaaatccgaggattcctatttagctgcagtgatgggcatcgcttcctgttttagtaatgtctttgtggccagccgattggagagtgtggtttatgcatcgtggagccgggttcaggctgacctcaactgcatgaaggatctctatgcaatgagtgcaaactggaagtacttgataaatctttgtggtatggattttcccattaaaaccaacctagaaattgtcaggaagctcaagttgttaatgggagaaaacaacctggaaacggagaggatgccatcccataaagaagaaaggtggaagaagcggtatgaggtcgttaatggaaagctgacaaacacagggactgtcaaaatgcttcctccactcgaaacacctctcttttctggcagtgcctacttcgtggtcagtagggagtatgtggggtatgtactacagaatgaaaaaatccaaaagttgatggagtgggcacaagacacatacagccctgatgagtatctctgggccaccatccaaaggattcctgaagtcccgggctcactccctgccagccataagtatgatctgtctgacatgcaagcagttgccaggtttgtcaagtggcagtactttgagggtgatgtttccaagggtgctccctacccgccctgcgatggagtccatgtgcgctcagtgtgcattttcggagctggtgacttgaactggatgctgcgcaaacaccacttgtttgccaataagtttgacgtggatgttgacctctttgccatccagtgtttggatgagcatttgagacacaaagctttggagacattaaaacactga

SEQ ID NO: 12198 - DNA, 4214 bp, Homo sapiens
  source 1..4214: mol_type = unassigned DNA
aaccctggggaactgcagaccaaagtgagagagggacgcaccgcatctccaggcacatccaaaaaggatggacgagacaccgaagcagaggatacaggaggattaaaggattcaggaaagcaagcagccctccggagaagctgtcgaaattcaagactggcaagagaagcaaattcaacctctcacaccgatcatttctcattccctgaaaagaagagattgtttccccagggaagtgaaaataatgaacttttggaggtactgcttttttgctttcactctgctcagcgtggtcatttttgtgagattttacagtagccaattgagcccgccaaaaagttatgagaagctgaacagttccagtgaaaggtattttaggaaaactgcctgtaatcacgccttagagaaaatgccagtctttttgtgggaaaatatattaccatcacctttgcgaagtgtcccttgcaaggattacctgacccagaatcactacatcacaagtcccctgtcggaagaagaggctgcattccctttggcctatgtcatggtcatccataaggactttgacacctttgaaaggctctttagggctatctatatgccccaaaatgtctactgtgttcacgtggatgagaaagccccagctgagtataaggaatctgtgaggcagttactgagttgcttccaaaatgctttcattgcttcaaagacagagtctgtggtttatgcaggcatttccagactccaggctgacctgaactgtctgaaagaccttgtcgcctctgaggttccctggaagtacgtcatcaacacctgtggacaagacttccccctgaaaaccaaccgggagatagttcagcatctgaaaggatttaaagggaaaaatatcaccccaggggtgctgcctcctgaccatgcaattaagcgaactaaatatgtccaccaagagcatacagataaaggtggcttttttgtgaaaaatactaatattttgaaaacttcacctccacatcagctgaccatctactttggcactgcctatgtggcgcttaccagagactttgtcgactttgttctacgtgaccaaagggccattgatctactacaatggtcaaaagatacctatagtcctgatgagcatttctgggtgacacttaatagggtttcaggtgttcctggctctatgccaaatgcatcctggactggaaacctcagagctataaagtggagtgacatggaagacagacacggaggctgccacggccactatgtacatggtatttgtatctatggaaacggagacttaaagtggctggttaattcaccaagcctgtttgctaacaagtttgagcttaatacctacccccttactgtggaatgcctagaactgaggcatcgcgaaagaaccctcaatcagagtgaaactgcgatacaacccagctggtatttttgagctattcatgagctactcatgactgaagggaaactgcagctgggaagaggagcctgtttttgtgagagacttttgccttcgtaatgttaaccgtttcaggaccacgtttatagcttcaggacctggctacgtaattatacttaaaatatccactggacactgtgaaatacactaacaggatggctgggtagagcaatctgggcactttggccaattttagtcttgctgtttcttgatgctcacctctatattagtttattgttaggatcaatgataaatttaaatgacctcagatctttgcaccagatactcatcatatacaaatgttttagtaaaaaagagaattgtagataatactgtctaggaaaataagaattaggtttctttgaagaaggaatcttttataacaccttaacagtcaccactgtgctcaaccagacagatagtgaaacagctttctgggtaattcaccaatttcctttaaaacataagctacctgaatggagaatacatcttgtttctgagtttcaacactagcatttttggcttactcatggacaaagttctgtatatagtataaagtcattaacaagaaacaggatatgctttaagacagaattcactgtctgttgcttcagtaaaaggacctcggggaataaaacatttctctcttatatgccagaatgtaggctggtccctatgtcatgtcttccattaagaacactaaaaagtccttgcaagaatggagatatgcattcaagagaggtgctatcacatagatctagtctgaagtctggaacactttcctcttctatgacccctctctccccagtattatcttacttgcaaaatggagaccaaattctatcctgtgaggcttttaattgcaccatagtatgctctgagtagctttacactgcctggtactgatagtagtggctcgatttttaagagccttcaattgtagatgaacatctctgttatttatccctcattcatccatccgttcattcattcagccttcaatcaacatctcttgagtgtctattatgtacaggacatgtactgagacaaaaaggaaacataagagctttttcactctaaaaatcttggcaataatgtcaacaccagaaagcctcctctggagaatcttacagagtgattgtagtttaatacaggaacacacagggctgtgtagcatgataccaggcccaggagatcagtaattacaaattaagggttaaatcagagattattcaacagagagggagaaaggaggagacagagggaggacctgttgtgttccagccattctggtattcctttatgtatctaatttcattcaaacctcacaacagtcttgtgaggcccttatataattactcccattttgcagatgaagtaactgaggcttagaaaggttaatagcaccggggaacaatttctctgggtgagaattgggactctgttgctggtcttctcagttcatttcctgaggtggatttactgagagaaggtgaaataaagccatatttagtataccagagaaggtagattttaagaatggtctcagtgttaatactgagaaaaagtcctgtcagttcagaaaaaatgtgaagtctactttagtattcctgtaatactaaaccgttgagtttctaaatatttatttattctaacaaaaagcaattactacaaatggatgacacatttaatgaacacaattttattttttttctgtaactgtgcttgttgaatgtcaatcatatttaaagggaatgactttgaagtaaaaccttttttcttgctactgaaaaaaatggagttgttttgggtggtaaagtgttaaggaatagggacagctggtcacacaaggaactcttgaaggccacatgtgaaaacctgtcacttgcacagaggccagtcccactaaggtgaccagagtgggctccaagcacaaactgccattggctatagatgggactgtgtccccccaaaattcatgtgttggagccttaaccctcaatgtgatggtatttgagatggggcctttggtaagggaagtttagatgaggtcacgagggtaggaccctcatgatgggatgagtccccttacaagacctctggcttgggccgggcgtggtggctcacacctgtaatcccaacactttgggaggccaaggcaggtagatcacttgatgccaggagttccagaccaggctggccgacatggtgaaaccccatctctactaaaaaatataaaaattagccgggctttgtggcatgtgcctgtaatcccagctatttggcaggctgaggcatgagaatcgcttgaacccaggaggtggaggttacagtgagctgagagtgccccactgcactccagcctgggtgacagagcgagactttgtcccaaaacaaaataggtgaggggatagcgaatgcactcagggtcagcagtggagtttaaaaattgtctcttttcaacttatttaaatgacagcacctgagaagaggaaccgttttacactggatgtttctcatgtagaacaagaaatctttctggaattgatgtttacatgtctgttgttggtcatctctcctgtgtcttaaatactttaatgttggaagagcatagtgtttgggctagtgggtttctgacagcccatgggaatgccctgaaactactgtatctgatgtttgttttcgatgaggttccatgttttgttttcttgggaataaattaatatattgttttcca

SEQ ID NO: 12199 - DNA, 4381 bp, Homo sapiens
  source 1..4381: mol_type = unassigned DNA
actgcgctcattccctgaatggcagtaaccagggggcgggggtggcatgggaaatgaaagaaagagatatgggaaactaaatctgccgggggaaagagagttaccggagttttagcaaaacagctagcagatgcaaacggggaggcagagggaggagggaaggctgggcttcagcaacctgccacggggatttaaacaaaggaggtttgagagaggcgggatctggctgtaatatcggcacagggacagagacagcagctggactctcgggatgaaacggaatcgattcccagcgtctccaacagggcaggagtgagtggagtatgttgcaaaataagaactcagagaaacgagtgagtttggaaaaaagacttacagattttgacggtctcttgacatttcacccttctttgaggcatgcctttatcaatgcgttacctcttcataatttctgtctctagtgtaattatttttatcgtcttctctgtgttcaattttgggggagatccaagcttccaaaggctaaatatctcagaccctttgaggctgactcaagtttgcacatcttttatcaatggaaaaacacgtttcctgtggaaaaacaaactaatgatccatgagaagtcttcttgcaaggaatacttgacccagagccactacatcacagcccctttatctaaggaagaagctgactttcccttggcatatataatggtcatccatcatcactttgacacctttgcaaggctcttcagggctatttacatgccccaaaatatctactgtgttcatgtggatgaaaaagcaacaactgaatttaaagatgcggtagagcaactattaagctgcttcccaaacgcttttctggcttccaagatggaacccgttgtctatggagggatctccaggctccaggctgacctgaactgcatcagagatctttctgccttcgaggtctcatggaagtacgttatcaacacctgtgggcaagacttccccctgaaaaccaacaaggaaatagttcagtatctgaaaggatttaaaggtaaaaatatcaccccaggggtgctgcccccagctcatgcaattggacggactaaatatgtccaccaagagcacctgggcaaagagctttcctatgtgataagaacaacagcgttgaaaccgcctcccccccataatctcacaatttactttggctctgcctatgtggctctatcaagagagtttgccaactttgttctgcatgacccacgggctgttgatttgctccagtggtccaaggacactttcagtcctgatgagcatttctgggtgacactcaataggattccaggtgttcctggctctatgccaaatgcatcctggactggaaacctcagagctataaagtggagtgacatggaagacagacacggaggctgccacggccactatgtacatggtatttgtatctatggaaacggagacttaaagtggctggttaattcaccaagcctgtttgctaacaagtttgagcttaatacctacccccttactgtggaatgcctagaactgaggcatcgcgaaagaaccctcaatcagagtgaaactgcgatacaacccagctggtatttttgagctattcatgagctactcatgactgaagggaaactgcagctgggaagaggagcctgtttttgtgagagacttttgccttcgtaatgttaaccgtttcaggaccacgtttatagcttcaggacctggctacgtaattatacttaaaatatccactggacactgtgaaatacactaacaggatggctgggtagagcaatctgggcactttggccaattttagtcttgctgtttcttgatgctcacctctatattagtttattgttaggatcaatgataaatttaaatgacctcagatctttgcaccagatactcatcatatacaaatgttttagtaaaaaagagaattgtagataatactgtctaggaaaataagaattaggtttctttgaagaaggaatcttttataacaccttaacagtcaccactgtgctcaaccagacagatagtgaaacagctttctgggtaattcaccaatttcctttaaaacataagctacctgaatggagaatacatcttgtttctgagtttcaacactagcatttttggcttactcatggacaaagttctgtatatagtataaagtcattaacaagaaacaggatatgctttaagacagaattcactgtctgttgcttcagtaaaaggacctcggggaataaaacatttctctcttatatgccagaatgtaggctggtccctatgtcatgtcttccattaagaacactaaaaagtccttgcaagaatggagatatgcattcaagagaggtgctatcacatagatctagtctgaagtctggaacactttcctcttctatgacccctctctccccagtattatcttacttgcaaaatggagaccaaattctatcctgtgaggcttttaattgcaccatagtatgctctgagtagctttacactgcctggtactgatagtagtggctcgatttttaagagccttcaattgtagatgaacatctctgttatttatccctcattcatccatccgttcattcattcagccttcaatcaacatctcttgagtgtctattatgtacaggacatgtactgagacaaaaaggaaacataagagctttttcactctaaaaatcttggcaataatgtcaacaccagaaagcctcctctggagaatcttacagagtgattgtagtttaatacaggaacacacagggctgtgtagcatgataccaggcccaggagatcagtaattacaaattaagggttaaatcagagattattcaacagagagggagaaaggaggagacagagggaggacctgttgtgttccagccattctggtattcctttatgtatctaatttcattcaaacctcacaacagtcttgtgaggcccttatataattactcccattttgcagatgaagtaactgaggcttagaaaggttaatagcaccggggaacaatttctctgggtgagaattgggactctgttgctggtcttctcagttcatttcctgaggtggatttactgagagaaggtgaaataaagccatatttagtataccagagaaggtagattttaagaatggtctcagtgttaatactgagaaaaagtcctgtcagttcagaaaaaatgtgaagtctactttagtattcctgtaatactaaaccgttgagtttctaaatatttatttattctaacaaaaagcaattactacaaatggatgacacatttaatgaacacaattttattttttttctgtaactgtgcttgttgaatgtcaatcatatttaaagggaatgactttgaagtaaaaccttttttcttgctactgaaaaaaatggagttgttttgggtggtaaagtgttaaggaatagggacagctggtcacacaaggaactcttgaaggccacatgtgaaaacctgtcacttgcacagaggccagtcccactaaggtgaccagagtgggctccaagcacaaactgccattggctatagatgggactgtgtccccccaaaattcatgtgttggagccttaaccctcaatgtgatggtatttgagatggggcctttggtaagggaagtttagatgaggtcacgagggtaggaccctcatgatgggatgagtccccttacaagacctctggcttgggccgggcgtggtggctcacacctgtaatcccaacactttgggaggccaaggcaggtagatcacttgatgccaggagttccagaccaggctggccgacatggtgaaaccccatctctactaaaaaatataaaaattagccgggctttgtggcatgtgcctgtaatcccagctatttggcaggctgaggcatgagaatcgcttgaacccaggaggtggaggttacagtgagctgagagtgccccactgcactccagcctgggtgacagagcgagactttgtcccaaaacaaaataggtgaggggatagcgaatgcactcagggtcagcagtggagtttaaaaattgtctcttttcaacttatttaaatgacagcacctgagaagaggaaccgttttacactggatgtttctcatgtagaacaagaaatctttctggaattgatgtttacatgtctgttgttggtcatctctcctgtgtcttaaatactttaatgttggaagagcatagtgtttgggctagtgggtttctgacagcccatgggaatgccctgaaactactgtatctgatgtttgttttcgatgaggttccatgttttgttttcttgggaataaattaatatattgttttcca

SEQ ID NO: 12200 - DNA, 4525 bp, Homo sapiens
  source 1..4525: mol_type = unassigned DNA
atatctctccaggcagtattcacatgctttaaactgaagctcgtagcttggcagtgcagtttaagcaaataaactcaggctgttgaacacaatgattaacaggaagcaggggaggggacatagttactagactctggccgggacaagaggctgaggttaaggtcttagagccgatgacttgcagaatggtcacctcacccacttgtaatttcatggtgggaacaggtggaccccctggaatcagaacctctctgaggacatctgtttttgtgtagacacaggttgcaggttagcaggagaacaggcaagccaaatgcaaaggagccacttcagaaatgtgtcacagaaaagtgaaaatgcaacctagtggtaagtgaagaggggaagaagaaagaaaaaggaccagaaccgtgaactgaagggacagggaacagccagacgagagcttcagccatcacgaggatgatttcggaacctggagaaaatgtaagttaaatatatctacactctgatcctatctcaagagagagatattttactcatttcctggttgtgaatgatgggctcttggaagcactgtctttttagcgcgtctcttatctctgccctgatttttgtatttgtttacaatactgagttatgggagaataaacgttttctgagggcagctctgtccaatgcttcactgttagcagaagcctgtcatcagatttttgaggggaaagttttttacccaacagaaaatgcattgaaaactacccttgatgaagctacctgctatgagtacatggttcgaagccactatgtaacagaaacactctctgaagaagaggctgggttccctttagcttacacagtgaccatccacaaagacttcggcacttttgagaggctcttcagggcgatttatatgccccaaaatgtctactgtgtgcacctggatcagaaggcgacggatgcctttaaaggtgcagtgaaacagttactcagctgcttcccaaatgcttttctggcttccaagaaggagtcggttgtctatggggggatctccaggctccaggctgacctgaactgcctggaagaccttgtggcctctgaagttccctggaagtatgtcatcaacacctgcgggcaagactttcccctgaaaaccaacagggaaatagttcagtatctgaagggatttaaagggaaaaatatcacccccggagtgctgcctcctgaccacgctgttggacggactaaatacgtccaccaagaactgttaaaccacaaaaattcctacgtgattaaaacaacaaaattaaaaactcctcctcctcatgacatggtgatttactttggcacggcctacgtggctctcacaagggactttgctaacttcgtcctccaagaccagctcgcacttgacttactctcctggtccaaggacacctacagccccgacgaacatttctgggtgacactcaacaggattcccggtgttcctggctctatgccaaatgcatcctggactggaaacctcagagctataaagtggagtgacatggaagacagacacggaggctgccacggccactatgtacatggtatttgtatctatggaaacggagacttaaagtggctggttaattcaccaagcctgtttgctaacaagtttgagcttaatacctacccccttactgtggaatgcctagaactgaggcatcgcgaaagaaccctcaatcagagtgaaactgcgatacaacccagctggtatttttgagctattcatgagctactcatgactgaagggaaactgcagctgggaagaggagcctgtttttgtgagagacttttgccttcgtaatgttaaccgtttcaggaccacgtttatagcttcaggacctggctacgtaattatacttaaaatatccactggacactgtgaaatacactaacaggatggctgggtagagcaatctgggcactttggccaattttagtcttgctgtttcttgatgctcacctctatattagtttattgttaggatcaatgataaatttaaatgacctcagatctttgcaccagatactcatcatatacaaatgttttagtaaaaaagagaattgtagataatactgtctaggaaaataagaattaggtttctttgaagaaggaatcttttataacaccttaacagtcaccactgtgctcaaccagacagatagtgaaacagctttctgggtaattcaccaatttcctttaaaacataagctacctgaatggagaatacatcttgtttctgagtttcaacactagcatttttggcttactcatggacaaagttctgtatatagtataaagtcattaacaagaaacaggatatgctttaagacagaattcactgtctgttgcttcagtaaaaggacctcggggaataaaacatttctctcttatatgccagaatgtaggctggtccctatgtcatgtcttccattaagaacactaaaaagtccttgcaagaatggagatatgcattcaagagaggtgctatcacatagatctagtctgaagtctggaacactttcctcttctatgacccctctctccccagtattatcttacttgcaaaatggagaccaaattctatcctgtgaggcttttaattgcaccatagtatgctctgagtagctttacactgcctggtactgatagtagtggctcgatttttaagagccttcaattgtagatgaacatctctgttatttatccctcattcatccatccgttcattcattcagccttcaatcaacatctcttgagtgtctattatgtacaggacatgtactgagacaaaaaggaaacataagagctttttcactctaaaaatcttggcaataatgtcaacaccagaaagcctcctctggagaatcttacagagtgattgtagtttaatacaggaacacacagggctgtgtagcatgataccaggcccaggagatcagtaattacaaattaagggttaaatcagagattattcaacagagagggagaaaggaggagacagagggaggacctgttgtgttccagccattctggtattcctttatgtatctaatttcattcaaacctcacaacagtcttgtgaggcccttatataattactcccattttgcagatgaagtaactgaggcttagaaaggttaatagcaccggggaacaatttctctgggtgagaattgggactctgttgctggtcttctcagttcatttcctgaggtggatttactgagagaaggtgaaataaagccatatttagtataccagagaaggtagattttaagaatggtctcagtgttaatactgagaaaaagtcctgtcagttcagaaaaaatgtgaagtctactttagtattcctgtaatactaaaccgttgagtttctaaatatttatttattctaacaaaaagcaattactacaaatggatgacacatttaatgaacacaattttattttttttctgtaactgtgcttgttgaatgtcaatcatatttaaagggaatgactttgaagtaaaaccttttttcttgctactgaaaaaaatggagttgttttgggtggtaaagtgttaaggaatagggacagctggtcacacaaggaactcttgaaggccacatgtgaaaacctgtcacttgcacagaggccagtcccactaaggtgaccagagtgggctccaagcacaaactgccattggctatagatgggactgtgtccccccaaaattcatgtgttggagccttaaccctcaatgtgatggtatttgagatggggcctttggtaagggaagtttagatgaggtcacgagggtaggaccctcatgatgggatgagtccccttacaagacctctggcttgggccgggcgtggtggctcacacctgtaatcccaacactttgggaggccaaggcaggtagatcacttgatgccaggagttccagaccaggctggccgacatggtgaaaccccatctctactaaaaaatataaaaattagccgggctttgtggcatgtgcctgtaatcccagctatttggcaggctgaggcatgagaatcgcttgaacccaggaggtggaggttacagtgagctgagagtgccccactgcactccagcctgggtgacagagcgagactttgtcccaaaacaaaataggtgaggggatagcgaatgcactcagggtcagcagtggagtttaaaaattgtctcttttcaacttatttaaatgacagcacctgagaagaggaaccgttttacactggatgtttctcatgtagaacaagaaatctttctggaattgatgtttacatgtctgttgttggtcatctctcctgtgtcttaaatactttaatgttggaagagcatagtgtttgggctagtgggtttctgacagcccatgggaatgccctgaaactactgtatctgatgtttgttttcgatgaggttccatgttttgttttcttgggaataaattaatatattgttttcc

SEQ ID NO: 12201 - DNA, 2214 bp, Homo sapiens
  source 1..2214: mol_type = unassigned DNA
aaacaggcttactgtgttcactgctggacgcctctgggcaatcttaccctcctgggaactgagagagacaatgctaggagccagaaacatgaggaatacatgagctcggcgccaatggaacatgctttcacaccgggtgcagctaaccaccacatcatacaaaactcgtcgctgacgttttagatgtataatctgattggcatggactcacagaggagggagtaagggaagagtaagaagatttcaaaggagagacacaggttgcaggttagcaggagaacaggcaagccaaatgcaaaggagccacttcagaaatgtgtcacagaaaagtgaaaatgcaacctagtggtaagtgaagaggggaagaagaaagaaaaaggaccagaaccgtgaactgaagggacagggaacagccagacgagagcttcagccatcacgaggatgatttcggaacctggagaaaatgtaagttaaatatatctacactctgatcctatctcaagagagagatattttactcatttcctggttgtgaatgatgggctcttggaagcactgtctttttagcgcgtctcttatctctgccctgatttttgtatttgtttacaatactgagttatgggagaataaacgttttctgagggcagctctgtccaatgcttcactgttagcagaagcctgtcatcagatttttgaggggaaagttttttacccaacagaaaatgcattgaaaactacccttgatgaagctacctgctatgagtacatggttcgaagccactatgtaacagaaacactctctgaagaagaggctgggttccctttagcttacacagtgaccatccacaaagacttcggcacttttgagaggctcttcagggcgatttatatgccccaaaatgtctactgtgtgcacctggatcagaaggcgacggatgcctttaaaggtgcagtgaaacagttactcagctgcttcccaaatgcttttctggcttccaagaaggagtcggttgtctatggggggatctccaggctccaggctgacctgaactgcctggaagaccttgtggcctctgaagttccctggaagtatgtcatcaacacctgcgggcaagactttcccctgaaaaccaacagggaaatagttcagtatctgaagggatttaaagggaaaaatatcacccccggagtgctgcctcctgaccacgctgttggacggactaaatacgtccaccaagaactgttaaaccacaaaaattcctacgtgattaaaacaacaaaattaaaaactcctcctcctcatgacatggtgatttactttggcacggcctacgtggctctcacaagggactttgctaacttcgtcctccaagaccagctcgcacttgacttactctcctggtccaaggacacctacagccccgacgaacatttctgggtgacactcaacaggattcccggtgttcctggctctatgccaaatgcatcctggactggaaacctcagagctataaagtggagtgacatggaagacagacacggaggctgccacggccactatgtacatggtatttgtatctatggaaacggagacttaaagtggctggttaattcaccaagcctgtttgctaacaagtttgagcttaatacctacccccttactgtggaatgcctagaactgaggcatcgcgaaagaaccctcaatcagagtgaaactgcgatacaacccagctggtatttttgagctattcatgagctactcatgactgaagggaaactgcagctgggaagaggagcctgtttttgtgagagacttttgccttcgtaatgttaaccgtttcaggaccacgtttatagcttcaggacctggctacgtaattatacttaaaatatccactggacactgtgaaatacactaacaggatggctgggtagagcaatctgggcactttggccaattttagtcttgctgtttcttgatgctcacctctatattagtttattgttaggatcaatgataaatttaaatgacctcagatctttgcaccagatactcatcatatacaaatgttttagtaaaaaagagaattgtagataatactgtctaggaaaataagaattaggtttctttgaagaaggaatcttttataacaccttaacagtcaccactgtgctcaaccagacagatagtgaaacagctttctgggtaattca

SEQ ID NO: 12202 - DNA, 3034 bp, Homo sapiens
  source 1..3034: mol_type = unassigned DNA
agtcagagcctcttctctctaagtcacgggaactgcccttgctacttgtgacctgccctttactcagcagtttttgttctgggaagccctgggattctgctaatacctatcactgtaggtgctgaagggaaacagatgaagaacatgacctcaaggagcttcctgtcaatgagaagaccaagctgacgcctggcaaagatattaaagaggagcctgaaactgttccttggacatcttatgaatgtcagaaaataccttttggagggttagaagatcaggggacatggttgttcacatttgctgccacggaacaccgccagtcttcacttggaaacagaatcacgccttgtgaagagatcatccctaagcaggagagaagctactaaaggattgtgtcctcctccaccttccctgtgctcggtctccacctgtctcccattctgtgacgatggttcaatggaagagactctgccagctgcattacttgtgggctctgggctgctatatgctgctggccactgtggctctgaaactttctttcaggttgaagtgtgactctgaccacttgggtctggagtccagggaatctcaaagccagtactgtaggaatatcttgtataatttcctgaaacttccagcaaagaggtctatcaactgttcaggggtcacccgaggggaccaagaggcagtgcttcaggctattctgaataacctggaggtcaagaagaagcgagagcctttcacagacacccactacctctccctcaccagagactgtgagcacttcaaggctgaaaggaagttcatacagttcccactgagcaaagaagaggtggagttccctattgcatactctatggtgattcatgagaagattgaaaactttgaaaggctactgcgagctgtgtatgcccctcagaacatatactgtgtccatgtggatgagaagtccccagaaactttcaaagaggcggtcaaagcaattatttcttgcttcccaaatgtcttcatagccagtaagctggttcgggtggtttatgcctcctggtccagggtgcaagctgacctcaactgcatggaagacttgctccagagctcagtgccgtggaaatacttcctgaatacatgtgggacggactttcctataaagagcaatgcagagatggtccaggctctcaagatgttgaatgggaggaatagcatggagtcagaggtacctcctaagcacaaagaaacccgctggaaatatcactttgaggtagtgagagacacattacacctaaccaacaagaagaaggatcctcccccttataatttaactatgtttacagggaatgcgtacattgtggcttcccgagatttcgtccaacatgttttgaagaaccctaaatcccaacaactgattgaatgggtaaaagacacttatagcccagatgaacacctctgggccacccttcagcgtgcacggtggatgcctggctctgttcccaaccaccccaagtacgacatctcagacatgacttctattgccaggctggtcaagtggcagggtcatgagggagacatcgataagggtgctccttatgctccctgctctggaatccaccagcgggctatctgcgtttatggggctggggacttgaattggatgcttcaaaaccatcacctgttggccaacaagtttgacccaaaggtagatgataatgctcttcagtgcttagaagaatacctacgttataaggccatctatgggactgaactttgagacacactatgagagcgttgctacctgtggggcaagagcatgtacaaacatgctcagaacttgctgggacagtgtgggtgggagaccagggctttgcaattcgtggcatcctttaggataagagggctgctattagagtgtgggtaagtagatcttttgccttgcaaattgctgcctgggtgaatgctgcttgttctctcacccctaaccctagtagttcctccactaactttctcactaagtgagaatgagaactgctgtgatagggagagtgaaggagggatatgtggtagagcacttgatttcagttgaatgcctgctggtagcttttccattctgtggagctgccgttcctaataattccaggtttggtagcgtggaggagaactttgatggaaagagaaccttcccttctgtactgttaacttaaaaataaatagctcctgattcaaagtattacctctactttttgcctagtatgccagaaataatataaatataaacagataaagtgtgtgagactttttctcataactattcatgacatttaaaatccctaggggctggcaagagagttctcattattctgaaatggtcctgacaagctgcatgaatagcaattttttttttgagacagagtcttgctctgtcacccaggctggactgcagtagtgcaatctcagttcactgcaacctccgcctcccaggttcaagcgatactcccacctcagcctcctgagtagctgggactacaggcatgcagcaccatgtctggctaatttttgtatttttagtagaggccgggtttcaccatattcgccaggctggtcttgaactcctgaccttgtgatctgcccgcctcggccttccgaaatgctgggattacaggtgggaactactgcgcctggcctacaaatagcaaattctaacgaagacaggggaacagggatggttcttccattgttaaaagccatcctcattttgtttatattgccaggtttgtgatttttctgtaaaggaaaaggcagggtgatttaaccagtttgaccacctttcctgtactcttacaggaaaatcgcagcactaattctaattttgtccactttacagccaaagcttagctaatgttccataaaggagataatagccaatcaggtaaggtaatgtgtaattcattattcaaagtggaacatgtttttgtagggggagagtctgcactattaataattgtattgagaaataaaaataaactaggactattcagttaaa

SEQ ID NO: 12203 - DNA, 761 bp, Homo sapiens
  source 1..761: mol_type = unassigned DNA
tgcctctcaagggctggggctgcaaaacatctcagagtttgactctttgcttcgacactaccgtctgcaagttcttgtgctagccgctgtgggaaagacacagctgagtcagacatgatccctgccctcaaggagcttgtgacaccacagtgaagacaagtctattttggtgctgaagggaaacagatgaagaacatgacctcaaggagcttcctgtcaatgagaagaccaagctgacgcctggcaaagatattaaagaggagcctgaaactgttccttggacatcttatgaatgtcagaaaataccttttggagggttagaagatcaggggacatggttgttcacatttgctgccacggaacaccgccagtcttcacttggaaacagaatcacgccttgtgaagagatcatccctaagcaggagagaagctactaaaggattgtgtcctcctccaccttccctgtgctcggtctccacctgtctcccattctgtgacgatggttcaatggaagagactctgccagctgcattacttgtgggctctgggctgctatatgctgctggccactgtggctctgaaactttctttcaggttgaagtgtgactctgaccacttgggtctggagtccagggaatctcaaagccagtactgtaggaatatcttgtataatttcctgaaacttccagcaaagaggtctatcaactgttcaggggtcacccgaggggaccaagaggcagtgcttcaggctattctgaata

SEQ ID NO: 12204 - DNA, 667 bp, Homo sapiens
  source 1..667: mol_type = unassigned DNA
agttgttccttttctcctggggtggaggtggatccagatccagacttgagtgtggtcggctagtttgtagggtcagattacagatctccatcaacaaaccagatgtaaggggcttctaggcaggtctttactaaggatttttgtccaggattgtgtcctcctccaccttccctgtgctcggtctccacctgtctcccattctgtgacgatggttcaatggaagagactctgccagctgcattacttgtgggctctgggctgctatatgctgctggccactgtggctctgaaactttctttcaggttgaagtgtgactctgaccacttgggtctggagtccagggaatctcaaagccagtactgtaggaatatcttgtataatttcctgaaacttccagcaaagaggtctatcaactgttcaggggtcacccgaggggaccaagaggcagtgcttcaggctattctgaataacctggaggtcaagaagaagcgagagcctttcacagacacccactacctctccctcaccagagactgtgagcacttcaaggctgaaaggaagttcatacagttcccactgagcaaagaagaggtggagttccctattgcatactctatggtgattcatgagaagattgaaaactttgaaaggctactgcgagctgtg

SEQ ID NO: 12205 - DNA, 668 bp, Homo sapiens
  source 1..668: mol_type = unassigned DNA
aaaggctttcaagttcttgcgtgagcactgacaggcttttatgaatagttggtgacacaggtacaaactgggctgttctggctgaaatatctgtttgccttgtcggatattgccagcattcttcctgcctcactgacctccctgaatgacttgggcttgagaatgtttctgcatgatttctctgagcttgctgtcttacctgagagcaggaagtcaaaaggagagtgatggagccacctgctgccctctactttgcagatattaaagaggagcctgaaactgttccttggacatcttatgaatgtcagaaaataccttttggagggttagaagatcaggggacatggttgttcacatttgctgccacggaacaccgccagtcttcacttggaaacagaatcacgccttgtgaagagatcatccctaagcaggagagaagctactaaaggattgtgtcctcctccaccttccctgtgctcggtctccacctgtctcccattctgtgacgatggttcaatggaagagactctgccagctgcattacttgtgggctctgggctgctatatgctgctggccactgtggctctgaaactttctttcaggttgaagtgtgactctgaccacttgggtctggagtccagggaatctcaaagccagtactgtagga

SEQ ID NO: 12206 - DNA, 2360 bp, Homo sapiens
  source 1..2360: mol_type = unassigned DNA
agtcagagcctcttctctctaagtcacgggaactgcccttgctacttgtgacctgccctttactcagcagtttttgttctgggaagccctgggattctgctaatacctatcactgtaggtgctgaagggaaacagatgaagaacatgacctcaaggagcttcctgtcaatgagaagaccaagctgacgcctggcaaagcattcttcctgcctcactgacctccctgaatgacttgggcttgagaatgtttctgcatgatttctctgagcttgctgtcttacctgagagcaggaagtcaaaaggagagtgatggagccacctgctgccctctactttgcagatattaaagaggagcctgaaactgttccttggacatcttatgaatgtcagaaaataccttttggagggttagaagatcaggggacatggttgttcacatttgctgccacggaacaccgccagtcttcacttggaaacagaatcacgccttgtgaagagatcatccctaagcaggagagaagctactaaaggattgtgtcctcctccaccttccctgtgctcggtctccacctgtctcccattctgtgacgatggttcaatggaagagactctgccagctgcattacttgtgggctctgggctgctatatgctgctggccactgtggctctgaaactttctttcaggttgaagtgtgactctgaccacttgggtctggagtccagggaatctcaaagccagtactgtaggaatatcttgtataatttcctgaaacttccagcaaagaggtctatcaactgttcaggggtcacccgaggggaccaagaggcagtgcttcaggctattctgaataacctggaggtcaagaagaagcgagagcctttcacagacacccactacctctccctcaccagagactgtgagcacttcaaggctgaaaggaagttcatacagttcccactgagcaaagaagaggtggagttccctattgcatactctatggtgattcatgagaagattgaaaactttgaaaggctactgcgagctgtgtatgcccctcagaacatatactgtgtccatgtggatgagaagtccccagaaactttcaaagaggcggtcaaagcaattatttcttgcttcccaaatgtcttcatagccagtaagctggttcgggtggtttatgcctcctggtccagggtgcaagctgacctcaactgcatggaagacttgctccagagctcagtgccgtggaaatacttcctgaatacatgtgggacggactttcctataaagagcaatgcagagatggtccaggctctcaagatgttgaatgggaggaatagcatggagtcagaggtacctcctaagcacaaagaaacccgctggaaatatcactttgaggtagtgagagacacattacacctaaccaacaagaagaaggatcctcccccttataatttaactatgtttacagggaatgcgtacattgtggcttcccgagatttcgtccaacatgttttgaagaaccctaaatcccaacaactgattgaatgggtaaaagacacttatagcccagatgaacacctctgggccacccttcagcgtgcacggtggatgcctggctctgttcccaaccaccccaagtacgacatctcagacatgacttctattgccaggctggtcaagtggcagggtcatgagggagacatcgataagggtgctccttatgctccctgctctggaatccaccagcgggctatctgcgtttatggggctggggacttgaattggatgcttcaaaaccatcacctgttggccaacaagtttgacccaaaggtagatgataatgctcttcagtgcttagaagaatacctacgttataaggccatctatgggactgaactttgagacacactatgagagcgttgctacctgtggggcaagagcatgtacaaacatgctcagaacttgctgggacagtgtgggtgggagaccagggctttgcaattcgtggcatcctttaggataagagggctgctattagagtgtgggtaagtagatcttttgccttgcaaattgctgcctgggtgaatgctgcttgttctctcacccctaaccctagtagttcctccactaactttctcactaagtgagaatgagaactgctgtgatagggagagtgaaggagggatatgtggtagagcacttgatttcagttgaatgcctgctggtagcttttccattctgtggagctgccgttcctaataattccaggtttggtagcgtggaggagaactttgatggaaagagaaccttcccttctgtactgttaacttaaaaataaatagctcctgattcaaa

SEQ ID NO: 12207 - DNA, 1577 bp, Homo sapiens
  source 1..1577: mol_type = unassigned DNA
tgcccagtagggaggaaaaccggaggagagcgcaggaggaaacagtaccggctggaggccggtcttgcaggagcgggggactgctgggggcggggcttggtggtgaccgctggcggggcggggcctggggctcagaggggtgggctttggagatcagagggtcgacgctgcttcgttgcctggactctggtttccgccctggagcaagccggggcctggtcggcagctgggccgccatggagtccacgctgggcgcgggcatcgtgatagccgaggcgctacagaaccagctagcctggctggagaacgtgtggctctggatcacctttctgggcgatcccaagatcctctttctgttctacttccccgcggcctactacgcctcccgccgtgtgggcatcgcggtgctctggatcagcctcatcaccgagtggctcaacctcatcttcaagtggtttctttttggagacaggcccttttggtgggtccatgagtctggttactacagccaggctccagcccaggttcaccagttcccctcttcttgtgagactggtccaggcagcccttctggacactgcatgatcacaggagcagccctctggcccataatgacggccctgtcttcgcaggtggccactcgggcccgcagccgctgggtaagggtgatgcctagcctggcttattgcaccttccttttggcggttggcttgtcgcgaatcttcatcttagcacatttccctcaccaggtgctggctggcctaataactggcgctgtcctgggctggctgatgactccccgagtgcctatggagcgggagctaagcttctatgggttgactgcactggccctcatgctaggcaccagcctcatctattggaccctctttacactgggcctggatctttcttggtccatcagcctagccttcaagtggtgtgagcggcctgagtggatacacgtggatagccggccctttgcctccctgagccgtgactcaggggctgccctgggcctgggcattgccttgcactctccctgctatgcccaggtgcgtcgggcacagctgggaaatggccagaagatagcctgccttgtgctggccatggggctgctgggccccctggactggctgggccacccccctcagatcagcctcttctacattttcaatttcctcaagtacaccctctggccatgcctagtcctggccctcgtgccctgggcagtgcacatgttcagtgcccaggaagcaccgcccatccactcttcctgacttcttgtgtgcctccctttcctttccctcccacaaagccaacactctgtgaccaccacactccaggaggcagccccatccccttccagcccctaagtaggccctcccctccctaaatctgcttccgcaccacctggtcttagccccaaagatgggccttctctctcccagataagttggtcctccctctgcctttcctctcaagcccccaaagagcaaaggcaacagcaagaccagcgggttcttgcaacactgtgaggggcagccagggcggccccaataaagcccttgaatactttg

SEQ ID NO: 12208 - DNA, 645 bp, Homo sapiens
  source 1..645: mol_type = unassigned DNA
agctccaattgctctatgtttagaattgcctctttttcaagatggatttccttcacaggaatggagtgctcataattcagcatttgcagaaggactaccgagcttactacacttttctaaattttatgtccaatgttggagaccccaggaatatctttttcatttattttccactttgttttcaatttaatcagacagttggaaccaagatgatatgggtagcagtcattggggattggttaaatcttatatttaaatggatattatttggtcatcgaccttactggtgggtccaagaaactcagatttacccaaatcactcaagtccatgccttgaacagttccctactacatgtgaaacaggtccaggaagtccatctggccatgcaatgggcgcatcctgtgtctggtatgtcatggtaaccgctgccctgagccacactgtctgtgggatggataagttctctatcactctgcacaggcatgctggtggcagaggcctttgaacacactccaggcatccaaacggccagtctgggcacatacctgaagaccaacctctttctcttcctgtttgcagttggcttttacctgcttcttagggtgctcaacattgacctgctgtggtccgtgcccatagccaaa

SEQ ID NO: 12209 - DNA, 1214 bp, Homo sapiens
  source 1..1214: mol_type = unassigned DNA
tcgacatgccacaaaggcacagtataaaaacggtgggaatcagagcacttcagctccaattgctctatgtttagaattgcctctttttcaagatggatttccttcacaggaatggagtgctcataattcagcatttgcagaaggactaccgagcttactacacttttctaaattttatgtccaatgttggagaccccaggaatatctttttcatttattttccactttgttttcaatttaatcagacagttggaaccaagatgatatgggtagcagtcattggggattggttaaatcttatatttaaatggatattatttggtcatcgaccttactggtgggtccaagaaactcagatttacccaaatcactcaagtccatgccttgaacagttccctactacatgtgaaacaggtccaggaagtccatctggccatgcaatgggcgcatcctgtgtctggtatgtcatggtaaccgctgccctgagccacactgtctgtgggatggataagttctctatcactctgcacagactgacctggtcatttctttggagtgttttttggttgattcaaatcagtgtctgcatctccagagtattcatagcaacacattttcctcatcaagttattcttggagtaattggtggcatgctggtggcagaggcctttgaacacactccaggcatccaaacggccagtctgggcacatacctgaagaccaacctctttctcttcctgtttgcagttggcttttacctgcttcttagggtgctcaacattgacctgctgtggtccgtgcccatagccaaaaagtggtgtgctaaccccgactggatccacattgacaccacgccttttgctggactcgtgagaaaccttggggtcctctttggcttgggctttgcaatcaactcagagatgttcctcctgagctgccgagggggaaataactacacactgagcttccggttgctctgtgccttgacctcattgacaatactgcagctctaccatttcctccagatcccgactcacgaagagcatttattttatgtgctgtctttttgtaaaagtgcatccattcccctaactgtggttgctttcattccctactctgttcatatgttaatgaaacaaagcggaaagaagagtcagtagagtggtgcctagagttagtgctctgtgtcacagatcacccttctccatccacca

SEQ ID NO: 12210 - DNA, 4194 bp, Homo sapiens
  source 1..4194: mol_type = unassigned DNA
aggggtggggccgggccgggccgggccgggcgcctgcgccataaaggccgccgcgcgcccacgcgcctcgcttgctgcgcgctgccggcgctccttcctcctcggctcgcgtctcactcagtgtaccttctagtcccgccatggccgctctcacccgggacccccagttccagaagctgcagcaatggtaccgcgagcaccgctccgagctgaacctgcgccgcctcttcgatgccaacaaggaccgcttcaaccacttcagcttgaccctcaacaccaaccatgggcatatcctggtggattactccaagaacctggtgacggaggacgtgatgcggatgctggtggacttggccaagtccaggggcgtggaggccgcccgggagcggatgttcaatggtgagaagatcaactacaccgagggtcgagccgtgctgcacgtggctctgcggaaccggtcaaacacacccatcctggtagacggcaaggatgtgatgccagaggtcaacaaggttctggacaagatgaagtctttctgccagcgtgtccggagcggtgactggaaggggtacacaggcaagaccatcacggacgtcatcaacattggcattggcggctccgacctgggacccctcatggtgactgaagcccttaagccatactcttcaggaggtccccgcgtctggtatgtctccaacattgatggaactcacattgccaaaaccctggcccagctgaaccccgagtcctccctgttcatcattgcctccaagacctttactacccaggagaccatcacgaatgcagagacggcgaaggagtggtttctccaggcggccaaggatccttctgcagtggcgaagcactttgttgccctgtctactaacacaaccaaagtgaaggagtttggaattgaccctcaaaacatgttcgagttctgggattgggtgggaggacgctactcgctgtggtcggccatcggactctccattgccctgcacgtgggttttgacaacttcgagcagctgctctcgggggctcactggatggaccagcacttccgcacgacgcccctggagaagaacgcccccgtcttgctggccctgctgggtatctggtacatcaactgctttgggtgtgagacacacgccatgctgccctatgaccagtacctgcaccgctttgctgcgtacttccagcagggcgacatggagtccaatgggaaatacatcaccaaatctggaacccgtgtggaccaccagacaggccccattgtgtggggggagccagggaccaatggccagcatgctttttaccagctcatccaccaaggcaccaagatgataccctgtgacttcctcatcccggtccagacccagcaccccatacggaagggtctgcatcacaagatcctcctggccaacttcttggcccagacagaggccctgatgaggggaaaatcgacggaggaggcccgaaaggagctccaggctgcgggcaagagtccagaggaccttgagaggctgctgccacataaggtctttgaaggaaatcgcccaaccaactctattgtgttcaccaagctcacaccattcatgcttggagccttggtcgccatgtatgagcacaagatcttcgttcagggcatcatctgggacatcaacagctttgaccagtggggagtggagctgggaaagcagctggctaagaaaatagagcctgagcttgatggcagtgctcaagtgacctctcacgacgcttctaccaatgggctcatcaacttcatcaagcagcagcgcgaggccagagtccaataaactcgtgctcatctgcagcctcctctgtgactcccctttctcttctcgtccctcctccccggagccggcactgcatgttcctggacaccacccagagcaccctctggttgtgggcttggaccacgagcccttagcagggaaggctggtctcccccagcctaacccccagcccctccatgtctatgctccctctgtgttagaattggctgaagtgtttttgtgcagctgacttttctgacccatgttcacgttgttcacatcccatgtagaaaaataaagatgccacggaggaggttgtaggctcagcctctgattttttttttcctgtgatggtgctttatgtagcagagggcaggagcgctcagcaggacgcaggctgtgcctctgcggacacttaacactaagtggtgagcgggtctagagtggagcaaggtgccctgagaagacaatagtggggtgggggcacaatcagtcaggacggcaacttggcctgtgtcaccaaatcccaagactgttttccactcctcacctctgtgactgcagaaattggatactctgttcactcgatggttctaaaaactgcattgagattatgtttgtttcgggtgaattcctggacaagaccgaggatgactgccatctcctggcaagacgctcaggtagttcttttgctttaaaaggcagatattgaaaactggaattttttttttttgagtctcgctctgtcacccagactggagtgcagtggtgcaatctcggctcactgcaacctccgcctcccgggttcaagctattctcctgcctcagcctcccgagtagctgggattacacggcgcacaccaccatacccagctaatttttgtatttttagtagtgaaggggttttaccatgttgggcaggctggtcttgaactcctgacctcaggtgatctgcccgcctcagcctcccacagtgctgggattacaggtatgagccaccacgcccggcccattttttttttttttttgacaacttttttttttttttgagacagggtcttgttccattgcccagactggagtgcagtggcatgatcacagctcactgcagccagtaatcctcttgcctcagcctcccaagtagttgagactacaggttgtaccactatgccctgctagttttttcattttttgtagagagacgggtcttttttttttttgagacggagtctcgctctgtcgcccaagctggagtgcagtagcacggtctcagctcattgcaagctccgcctcccaggttcacgccattctcctgcctcagactcctgtgtagctgggagtacaggcacctgccaccatgcccggctaattttttatatatttttttagcagagacagtgtctcactgtgttagtcaggatggtctcgatctcctgacctcgtgatccgcccgcctcagcctcccaaagtgctgggattacaggcgtgagccaccgcgcccagcaaggcgggtcttgctgtgtttcccagactagactggtcttgaattccagggctcaagagatctcccacctcagcctcccacagtgctgggattacaggcgtgagccgccacacccagcctattcaaaatttttttttcttagagacagggtctttgttgcccaggctggactgcagtgatacaatcatagctgactgaagcctcaaattcccaggctaaggtgatcttctcacctcagccttccaagtagctgggtccgcagatgcatgccagtacacccagctcatttaaaaaaaaatttttttcttttttgagagtcttgctttgttgcccaggctggagtgcagtggtgtgatctcggctcactgcaagctccacctcccggcttcacgccattctcctgcctcagcctcccgagtagctgggactacaggtgcccgccaccacacccggctaattttttgtatttttagtagagacggggtttcaccgtgttagccaggatggtcttgatctcctgacctcatgatccgcctgctttggcctcccaaagtgctgggattacaggcgtgagtcaccgcgcccggctcattttaaaatttttgtagatcagtgtactgttgtaaaaaaaaaaaaataagaaaaataaaaaataaatttttgtagtgataggatcccactgaggccagagaatagggtctggagacaaaggagcattcacttcagcctctgactggtggcaggccaagtctttatttacatagggtgtaaccaaataggaaacctctaaagggtacttaaaccccagattttctacacagggcacttgcttgagcctcatcccgctttctggaatgtacttttgcttcaataaatctgtgcttttgttccttc

SEQ ID NO: 12211 - DNA, 4631 bp, Homo sapiens
  source 1..4631: mol_type = unassigned DNA
cgcgtctcactcagtgtaccttctagtcccgccatggccgctctcacccgggacccccagttccagaagctgcagcaatggtaccgcgagcaccgctccgagctgaacctgcgccgcctcttcgatgccaacaaggaccgcttcaaccacttcaggtgcgggcgggccggaggcgggggctgccacgcgcggcgcccggaaccgggcacgcgggcctggggtctggaggcgggggcagcggtgcccggggaccccagtccccgacctccaggccacggactggggcccaggccgagtccgcacttcgtccttggagtctccttggagtgcgttcctgggggcttgcagcctcgccgggagtctcggccccgggtctgcttcgttacgaggaaaaacgggcccctccgtggggacatttcccctcctcctccccgtgcagctctggccatttgagcaggggctcctttcgcagttgtgaagagaggccttggctgacgcagcaagcgggaaagggctgtccctttccatccgctcctggccacatgagcttgggagcgtctgcagggcgggcagcccgggcgggggtgtttgagggagctgggtggaaggatggagacgtcgggcgtgattcctgcagaagacacctgtgcacgaccgggaagtgggaaggagtgtttgagcaaatcatgggcgggagtgcggccaagggagctctgatcactgatactggtggaggcgggggaggggagcgactgtggctccgggctagacgtcccgatggccatccctgtcatctggatgggtgcctgagtaacttacggcagaaagtggaagccctgggaaggggtggtcccccacttcagtccgggctcctcatccagggtctgcctgcatctacggtctgtgaggatggcttctttctctgggctgctgttgcagatcatcctggtgggccagcaggtgacagacaccaccactgtgctgggtggccgcggcccttgtggggcgtgggtcagggaggatgtttcttctgggaacagctcctgcttagggcatggctccccgctagggagaccagggtgtggtcagcagcatctccatctttctgcagcttgaccctcaacaccaaccatgggcatatcctggtggattactccaagaacctggtgacggaggacgtgatgcggatgctggtggacttggccaagtccaggggcgtggaggccgcccgggagcggatgttcaatggtgagaagatcaactacaccgaggtgagcaggccccacataccctctggggcctccttccttccctttggggtttatctgactgttagccgcatcaccctgtgtcttcaccccttctcttgggcaatgcttttgcttaatgaggggcctgaaggcctttttcctcctgcttgtagcagggctttggggtgtgccttccacaagattggtttggtgagctccttggaatggttcccagtgtctgcctgggaggagcatatctcatacccacagggagagtttctcaaggctgacattttcttggagaagttaactctaatatatcctcaatgcaagttttagtagcgacaagaagaatcttagatcaccaaagacttcagcctactcaagcagtaggagtcaataggaagcagtggtgaggccaggcctgggggcccctgttcctgactcagtatgggagcccagcctggaggtataatggacactgagcacccagactctgtcctcatgatgtcattatcctcctcttacatgtgaggagtctgaggttcagaggtcacatcacttatctaagatgtcatagctgtaagaggcagaatggagattcacactcaacctgtcttgcattgtgggtctaagctgagagaggatgcaatcaaggaaggctttctggaggagtgcatttgccaataaaatgtggcgcaggagtggggtctggcagggtgagggtggggtggcatgaagccctccaccttagcaagcctctcactgggtcggaatcccaagatgatccttttcctgcccacctggggtcgttagaccttccctcaaggactcctctgctgacttcaggccatttcactcacgtggctgggccagccgcctggcacccgtcacagacttcaagtctggtttggttcctggcagttggtagttatcgggctgcttggtgagggaagcttgagttgcatgccttgctgcaaatccaaggagctgaggacactgcctaaaacgtgccagcaaacaccatggacacacattgggaggatgaggttacttcaggcttcatgagcactcatcttcggaaagcgtttatttatttatttattttgagatggagtcttgctctgtcgcccaggctggagtgcagtggtgcgatcttggctcactgcaacctctgtctaatgggttcaggcgattctctgcctcagattcctgagtagctggaactacaggtgtgtgccacccccacctggctgatttttgtatttttagtagagacaggatgtcaccatgttggccaggctggtctcgaattcatgacctcaagttatccacctgccatggcctcccagagttccgggattacaggcgtgagccatggcgcccggcctctgaaagcatttattgcttgtttctgacatgtattgttgccattctctgcctttgctcactgttcctcttttctctcactgttcatgccctgagcatctctggcaggccttcggggcctgtcctaggcatatatgggtcccctcctctcctcctgactgtctgcagcacataagtccttggggagctcctactcctctaagcatacagtgggttcttggaacaaggttatggtgctaacagagacctcagggcctgcctgtctagtggatagagggccgagctatggcaccatgcccagctgggagcatggctgcctggggttggggggggcagtctttatatcctgaccgtaatccccagggtcgagccgtgctgcacgtggctctgcggaaccggtcaaacacacccatcctggtagacggcaaggatgtgatgccagaggtcaacaaggttctggacaagatgaagtctttctgccaggtaagtggctactgggccggactcacccttggccgtgtgtgtgagttatttgggaatctgggagccctaaggggcagctcttccctcttcttgtaggcaggactcaggttctcactgcagcttaagggaggggttgcctgtgtgatcgctgaccctggagtctctgctgaggcctgaatttctcctggctctgctctgaaggaatctgctgctggcagaagtggggccagtttctttcctgaattgtagacacctatggactcatggtgacaaaccacagaggcttcaaatgaaaagtggggcccctgagagacaggacagtcaggaaaggaaggagctttttcttttttctttttttttttttgagatggagtctcactctctcgcccagagtggactgcagtcgtgctatctcagctcactgcaacttccgcctcctggattcaagctattctcctacctcagcctggccatcatggtgaaaccccatctccactaaaaatacaaaaattagccagttttggtgacatacgcctgcaatcccagctacttgggagactgaggcaggagaatcgcttgaacccgtgcggcagaggttgcagtgagctgcgattgcgccactgcactccagcctgggcgacagagggagactctgtcaaaaaaaaaaaaaaatttcctcatccccattcccagctaaccctccagaagcagcctttgtaaagtttcctgtagccaggcgcagcagctcatacctctattcccaactattcaggaggctgaggtgggaggatggcttgagcctgggaagttgaggctgcagtgagccatggtgacaccactgcactgcagcctgggcgacagcaagatcgtgtctctaaataaatttaaaaaatagaaaagttttcctgtgaagtcttccagaaagttcctgtgcacatacacatctgtcatctcctctttgaaacacgtacacatgtgcacatgcacacaggttggttttctccctgctcctctgaagcttatttccacctggaagtatgtaagcagtgtccgtgtgtcagtgacagtgcatgtaacatgccttcttttccttgtgtgtagggtggtaggggttgcctcagagaccagctaagtttccccacatcaagcacttgcctcagtgtctaccctagcggtgattctgcaggggtgggttggcagacatcctcacgtctggagaacgagggtgatgccggtgtgcctgtgtgggctgtgcatgctacgagggtgatcgtccaaactcttgtcagctgtgatcatttgctgcttgtcctaggagcagtggcctccatgtgtggctggtcagagtccagttactttggccaagagccactttcagacctgaaaatgggctgggtgcagtggctcacgcctgtaatcccagcactctgggaggctgaggcaggtggatcatgtgaggtcgggagtttgagatcagcctgatcaacatggtgaaacgccgtctgtact

SEQ ID NO: 12212 - DNA, 4257 bp, Homo sapiens
  source 1..4257: mol_type = unassigned DNA
aatagcccttaccaccagcagacacacatcatctgttgtacttgcttatttggcacatatgtatccacagcgcctagaacactgcctgtaacgtggaaggtgttcgatctatagagttttgtcgaatgaatgaatgaagccgactagtgcacagggagtgcagcggcgcgatggtagctctctgcagcctccaacacctgggctccagtgatccccgggctctgcccaccctccccactgccacttccgggcagaggccagcaaagcggcggcgcaagagtcccgccatggccgctctcacccgggacccccagttccagaagctgcagcaatggtaccgcgagcaccgctccgagctgaacctgcgccgcctcttcgatgccaacaaggaccgcttcaaccacttcagcttgaccctcaacaccaaccatgggcatatcctggtggattactccaagaacctggtgacggaggacgtgatgcggatgctggtggacttggccaagtccaggggcgtggaggccgcccgggagcggatgttcaatggtgagaagatcaactacaccgagggtcgagccgtgctgcacgtggctctgcggaaccggtcaaacacacccatcctggtagacggcaaggatgtgatgccagaggtcaacaaggttctggacaagatgaagtctttctgccagggacccctcatggtgactgaagcccttaagccatactcttcaggaggtccccgcgtctggtatgtctccaacattgatggaactcacattgccaaaaccctggcccagctgaaccccgagtcctccctgttcatcattgcctccaagacctttactacccaggagaccatcacgaatgcagagacggcgaaggagtggtttctccaggcggccaaggatccttctgcagtggcgaagcactttgttgccctgtctactaacacaaccaaagtgaaggagtttggaattgaccctcaaaacatgttcgagttctgggattgggtgggaggacgctactcgctgtggtcggccatcggactctccattgccctgcacgtgggttttgacaacttcgagcagctgctctcgggggctcactggatggaccagcacttccgcacgacgcccctggagaagaacgcccccgtcttgctggccctgctgggtatctggtacatcaactgctttgggtgtgagacacacgccatgctgccctatgaccagtacctgcaccgctttgctgcgtacttccagcagggcgacatggagtccaatgggaaatacatcaccaaatctggaacccgtgtggaccaccagacaggccccattgtgtggggggagccagggaccaatggccagcatgctttttaccagctcatccaccaaggcaccaagatgataccctgtgacttcctcatcccggtccagacccagcaccccatacggaagggtctgcatcacaagatcctcctggccaacttcttggcccagacagaggccctgatgaggggaaaatcgacggaggaggcccgaaaggagctccaggctgcgggcaagagtccagaggaccttgagaggctgctgccacataaggtctttgaaggaaatcgcccaaccaactctattgtgttcaccaagctcacaccattcatgcttggagccttggtcgccatgtatgagcacaagatcttcgttcagggcatcatctgggacatcaacagctttgaccagtggggagtggagctgggaaagcagctggctaagaaaatagagcctgagcttgatggcagtgctcaagtgacctctcacgacgcttctaccaatgggctcatcaacttcatcaagcagcagcgcgaggccagagtccaataaactcgtgctcatctgcagcctcctctgtgactcccctttctcttctcgtccctcctccccggagccggcactgcatgttcctggacaccacccagagcaccctctggttgtgggcttggaccacgagcccttagcagggaaggctggtctcccccagcctaacccccagcccctccatgtctatgctccctctgtgttagaattggctgaagtgtttttgtgcagctgacttttctgacccatgttcacgttgttcacatcccatgtagaaaaataaagatgccacggaggaggttgtaggctcagcctctgattttttttttcctgtgatggtgctttatgtagcagagggcaggagcgctcagcaggacgcaggctgtgcctctgcggacacttaacactaagtggtgagcgggtctagagtggagcaaggtgccctgagaagacaatagtggggtgggggcacaatcagtcaggacggcaacttggcctgtgtcaccaaatcccaagactgttttccactcctcacctctgtgactgcagaaattggatactctgttcactcgatggttctaaaaactgcattgagattatgtttgtttcgggtgaattcctggacaagaccgaggatgactgccatctcctggcaagacgctcaggtagttcttttgctttaaaaggcagatattgaaaactggaattttttttttttgagtctcgctctgtcacccagactggagtgcagtggtgcaatctcggctcactgcaacctccgcctcccgggttcaagctattctcctgcctcagcctcccgagtagctgggattacacggcgcacaccaccatacccagctaatttttgtatttttagtagtgaaggggttttaccatgttgggcaggctggtcttgaactcctgacctcaggtgatctgcccgcctcagcctcccacagtgctgggattacaggtatgagccaccacgcccggcccattttttttttttttttgacaacttttttttttttttgagacagggtcttgttccattgcccagactggagtgcagtggcatgatcacagctcactgcagccagtaatcctcttgcctcagcctcccaagtagttgagactacaggttgtaccactatgccctgctagttttttcattttttgtagagagacgggtcttttttttttttgagacggagtctcgctctgtcgcccaagctggagtgcagtagcacggtctcagctcattgcaagctccgcctcccaggttcacgccattctcctgcctcagactcctgtgtagctgggagtacaggcacctgccaccatgcccggctaattttttatatatttttttagcagagacagtgtctcactgtgttagtcaggatggtctcgatctcctgacctcgtgatccgcccgcctcagcctcccaaagtgctgggattacaggcgtgagccaccgcgcccagcaaggcgggtcttgctgtgtttcccagactagactggtcttgaattccagggctcaagagatctcccacctcagcctcccacagtgctgggattacaggcgtgagccgccacacccagcctattcaaaatttttttttcttagagacagggtctttgttgcccaggctggactgcagtgatacaatcatagctgactgaagcctcaaattcccaggctaaggtgatcttctcacctcagccttccaagtagctgggtccgcagatgcatgccagtacacccagctcatttaaaaaaaaatttttttcttttttgagagtcttgctttgttgcccaggctggagtgcagtggtgtgatctcggctcactgcaagctccacctcccggcttcacgccattctcctgcctcagcctcccgagtagctgggactacaggtgcccgccaccacacccggctaattttttgtatttttagtagagacggggtttcaccgtgttagccaggatggtcttgatctcctgacctcatgatccgcctgctttggcctcccaaagtgctgggattacaggcgtgagtcaccgcgcccggctcattttaaaatttttgtagatcagtgtactgttgtaaaaaaaaaaaaataagaaaaataaaaaataaatttttgtagtgataggatcccactgaggccagagaatagggtctggagacaaaggagcattcacttcagcctctgactggtggcaggccaagtctttatttacatagggtgtaaccaaataggaaacctctaaagggtacttaaaccccagattttctacacagggcacttgcttgagcctcatcccgctttctggaatgtacttttgcttcaataaatctgtgcttttgttccttc

SEQ ID NO: 12213 - DNA, 3906 bp, Homo sapiens
  source 1..3906: mol_type = unassigned DNA
gcaaactctgcacaagatggcggcggtagcggcagtggcggcgcgtaggaggcggtcttgggcgtctttggtactggcttttttaggggtctgcctggggattacccttgctgtggatagaagcaactttaagacctgtgaagagagttctttctgcaagcgacagagaagcatacggccaggcctctctccataccgagccttgctggactctctacagcttggtcctgattccctcacggtccatctgatccatgaggtcaccaaggtgttgctggtgctagagcttcaggggcttcaaaagaacatgactcggttcaggattgatgagctggagcctcggcgaccccgataccgtgtaccagatgttttggtggctgatccaccaatagcccggctttctgtctctggtcgtgatgagaacagtgtggagttaaccatggctgagggaccctacaagatcatcttgacagcacggccattccgccttgacctactagaggaccgaagtcttttgcttagtgtcaatgcccgaggactcttggagtttgagcatcagagggcccctagggtctctttctcggataaggttaatctcacgcttggtagcatatgggataagatcaagaaccttttctctaggcaaggatcaaaagacccagctgagggcgatggggcccagcctgaggaaacacccagggatggcgacaagccagaggagactcaggggaaggcagagaaagatgagccaggagcctgggaggagacattcaaaactcactctgacagcaagccgtatggccccatgtctgtgggtttggacttctctctgccaggcatggagcatgtctatgggatccctgagcatgcagacaacctgaggctgaaggtcactgagggtggggagccatatcgcctctacaatttggatgtgttccagtatgagctgtacaacccaatggccttgtatgggtctgtgcctgtgctcctggcacacaaccctcatcgcgacttgggcatcttctggctcaatgctgcagagacctgggttgatatatcttccaacactgccgggaagaccctgtttgggaagatgatggactacctgcagggctctggggagaccccacagacagatgttcgctggatgtcagagactggcatcattgacgtcttcctgctgctggggccctccatctctgatgttttccggcaatatgctagtctcacaggaacccaggcgttgcccccactcttctccctcggctaccaccagagccgttggaactaccgggacgaggctgatgtgctggaagtggatcagggctttgatgatcacaacctgccctgtgatgtcatctggctagacattgaacatgctgatggcaagcggtatttcacctgggaccccagtcgcttccctcagccccgcaccatgcttgagcgcttggcttctaagaggcggaagctggtggccatcgtagacccccacatcaaggtggactccggctaccgagttcacgaggagctgcggaacctggggctgtatgttaaaacccgggatggctctgactatgagggctggtgctggccaggctcagctggttaccctgacttcactaatcccacgatgagggcctggtgggctaacatgttcagctatgacaattatgagggctcagctcccaacctctttgtctggaatgacatgaacgaaccatctgtgttcaatggtcctgaggtcaccatgctcaaggatgcccagcattatgggggctgggagcaccgggatgtgcataacatctatggcctttatgtgcacatggcgactgctgatgggctgagacagcgctctgggggcatggaacgcccctttgtcctggccagggccttcttcgctggctcccagcgctttggagccgtgtggacaggggacaacactgccgagtgggaccatttgaagatctctattcctatgtgtctcagcttggggctggtgggactttccttctgtggggcggatgtgggtggcttcttcaaaaacccagagccagagctgcttgtgcgctggtaccagatgggtgcttaccagccattcttccgggcacatgcccacttggacactgggcgacgagagccatggctgttaccatctcagcacaatgatataatccgagatgccttgggccagcgatattctttgctgcccttctggtacaccctcttatatcaggcccatcgggaaggcattcctgtcatgaggcccctgtgggtgcagtaccctcaggatgtgactaccttcaatatagatgatcagtacttgcttggggatgcgttgctggttcaccctgtatcagactctggagcccatggtgtccaggtctatctgcctggccaaggggaggtgtggtatgacattcaaagctaccagaagcatcatggtccccagaccctgtacctgcctgtaactctaagcagtatccctgtgttccagcgtggagggacaatcgtgcctcgatggatgcgagtgcggcggtcttcagaatgtatgaaggatgaccccatcactctctttgttgcacttagccctcagggtacagctcaaggagagctctttctggatgatgggcacacgttcaactatcagactcgccaagagttcctgctgcgtcgattctcattctctggcaacacccttgtctccagctcagcagaccctgaaggacactttgagacaccaatctggattgagcgggtggtgataataggggctggaaagccagcagctgtggtactccagacaaaaggatctccagaaagccgcctgtccttccagcatgaccctgagacctctgtgttggtcctgcgcaagcctggcatcaatgtggcatctgattggagtattcacctgcgataacccaagggatgttctgggttagggggagggaaggggagcattagtgctgagagatattctttcttctgccttggagttcggccctccccagacttcacttatgctagtctaagacccagattctgccaacatttgggcaggatgagagggctgaccctgggctccaaattcctcttgtgatctcctcacctctcccactccattgataccaactctttcccttcattcccccaacatcctgttgctctaactggagcacattcacttacgaacaccaggaaaccacagggcccttgtcgccccttctctttcccttatttaggagccctgaactcccccagagtctatccattcatgcctcttgtatgttgatgccacttcttggaagaagatgagggcaatgagttagggctccttttccccttccctcccaccagattgctctcccacctttcatttcttcctccaggctttactcccctttttatgccccaccgatacactgggaccaccccttaccccggacaggatgaatggatcaaaggagtgaggttgctaaagaacatccttttccctctcattctacccttttcctctccccgattccttgtagagctgctgcaattcttagaggggcagttctacctcctctgtccctcggcagaaagacgtttccacacctcttaggggatgcgcattaaacttcttttgcccccttcttgtcccctttgaggggcacttaagatggagaaatcagttgtggtttcagtgaatcatggtcacctgtatttattgctaggagaagcctgagggtggggggagatgatcatgtgtgctcggggttggctggaagccctgggtggggggttgggggaggactaatggggagtcggggaatatttgtgggtattttttttacttcctcttggttcccagctgtgacacgttttgatcaaaggagaaacaataaagggataaaccataaataa

SEQ ID NO: 12214 - DNA, 3608 bp, Homo sapiens
  source 1..3608: mol_type = unassigned DNA
agcaaactctgcacaagatggcggcggtagcggcagtggcggcgcgtaggaggcggtcttgggcgtctttggtactggcttttttaggggtctgcctggggattacccttgctgtggatagaagcaactttaagacctgtgaagagagttctttctgcaagcgacagagaagcatacggccaggcctctctccataccgagccttgctggactctctacagcttggtcctgattccctcacggtccatctgatccatgaggtcaccaaggtgttgctggtgctagagcttcaggggcttcaaaagaacatgactcggttcaggattgatgagctggagcctcggcgaccccgataccgtgtaccagatgttttggtggctgatccaccaatagcccggctttctgtctctggtcgtgatgagaacagtgtggagttaaccatggctgagggaccctacaagatcatcttgacagcacggccattccgccttgacctactagaggaccgaagtcttttgcttagtgtcaatgcccgaggactcttggagtttgagcatcagagggcccctagggtctcgcaaggatcaaaagacccagctgagggcgatggggcccagcctgaggaaacacccagggatggcgacaagccagaggagactcaggggaaggcagagaaagatgagccaggagcctgggaggagacattcaaaactcactctgacagcaagccgtatggccccatgtctgtgggtttggacttctctctgccaggcatggagcatgtctatgggatccctgagcatgcagacaacctgaggctgaaggtcactgagggtggggagccatatcgcctctacaatttggatgtgttccagtatgagctgtacaacccaatggccttgtatgggtctgtgcctgtgctcctggcacacaaccctcatcgcgacttgggcatcttctggctcaatgctgcagagacctgggttgatatatcttccaacactgccgggaagaccctgtttgggaagatgatggactacctgcagggctctggggagaccccacagacagatgttcgctggatgtcagagactggcatcattgacgtcttcctgctgctggggccctccatctctgatgttttccggcaatatgctagtctcacaggaacccaggcgttgcccccactcttctccctcggctaccaccagagccgttggaactaccgggacgaggctgatgtgctggaagtggatcagggctttgatgatcacaacctgccctgtgatgtcatctggctagacattgaacatgctgatggcaagcggtatttcacctgggaccccagtcgcttccctcagccccgcaccatgcttgagcgcttggcttctaagaggcggaagctggtggccatcgtagacccccacatcaaggtggactccggctaccgagttcacgaggagctgcggaacctggggctgtatgttaaaacccgggatggctctgactatgagggctggtgctggccaggctcagctggttaccctgacttcactaatcccacgatgagggcctggtgggctaacatgttcagctatgacaattatgagggctcagctcccaacctctttgtctggaatgacatgaacgaaccatctgtgttcaatggtcctgaggtcaccatgctcaaggatgcccagcattatgggggctgggagcaccgggatgtgcataacatctatggcctttatgtgcacatggcgactgctgatgggctgagacagcgctctgggggcatggaacgcccctttgtcctggccagggccttcttcgctggctcccagcgctttggagccgtgtggacaggggacaacactgccgagtgggaccatttgaagatctctattcctatgtgtctcagcttggggctggtgggactttccttctgtggggcggatgtgggtggcttcttcaaaaacccagagccagagctgcttgtgcgctggtaccagatgggtgcttaccagccattcttccgggcacatgcccacttggacactgggcgacgagagccatggctgttaccatctcagcacaatgatataatccgagatgccttgggccagcgatattctttgctgcccttctggtacaccctcttatatcaggcccatcgggaaggcattcctgtcatgaggcccctgtgggtgcagtaccctcaggatgtgactaccttcaatatagatgatcagtacttgcttggggatgcgttgctggttcaccctgtatcagactctggagcccatggtgtccaggtctatctgcctggccaaggggaggtgtggtatgacattcaaagctaccagaagcatcatggtccccagaccctgtacctgcctgtaactctaagcagtatccctgtgttccagcgtggagggacaatcgtgcctcgatggatgcgagtgcggcggtcttcagaatgtatgaaggatgaccccatcactctctttgttgcacttagccctcagggtacagctcaaggagagctctttctggatgatgggcacacgttcaactatcagactcgccaagagttcctgctgcgtcgattctcattctctggcaacacccttgtctccagctcagcagaccctgaaggacactttgagacaccaatctggattgagcgggtggtgataataggggctggaaagccagcagctgtggtactccagacaaaaggatctccagaaagccgcctgtccttccagcatgaccctgagacctctgtgttggtcctgcgcaagcctggcatcaatgtggcatctgattggagtattcacctgcgataacccaagggatgttctgggttagggggagggaaggggagcattagtgctgagagatattctttcttctgccttggagttcggccctccccagacttcacttatgctagtctaagacccagattctgccaacatttgggcaggatgagagggctgaccctgggctccaaattcctcttgtgatctcctcacctctcccactccattgataccaactctttcccttcattcccccaacatcctgttgctctaactggagcacattcacttacgaacaccaggaaaccacagggcccttgtcgccccttctctttcccttatttaggagccctgaactcccccagagtctatccattcatgcctcttgtatgttgatgccacttcttggaagaagatgagggcaatgagttagggctccttttccccttccctcccaccagattgctctcccacctttcatttcttcctccaggctttactcccctttttatgccccaccgatacactgggaccaccccttaccccggacaggatgaatggatcaaaggagtgaggttgctaaagaacatccttttccctctcattctacccttttcctctccccgattccttgtagagctgctgcaattcttagaggggcagttctacctcctctgtccctcggcagaaagacgtttccacacctcttaggggatgcgcattaaacttcttttgcccccttcttgtcccctttgaggggcacttaagatggagaaatca

SEQ ID NO: 12215 - DNA, 2749 bp, Homo sapiens
  source 1..2749: mol_type = unassigned DNA
tctgcacaagatggcggcggtagcggcagtggcggcgcgtaggaggcggtcttgggcgtctttggtactggcttttttaggggtctgcctggggattacccttgctgtggatagaagcaactttaagacctgtgaagagagttctttctgcaagtgttgctggtgctagagcttcaggggcttcaaaagaacatgactcggttcaggattgatgagctggagcctcggcgaccccgataccgtgtaccagatgttttggtggctgatccaccaatagcccggctttctgtctctggtcgtgatgagaacagtgtggagttaaccatggctgagggaccctacaagatcatcttgacagcacggccattccgccttgacctactagaggaccgaagtcttttgcttagtgtcaatgcccgaggactcttggagtttgagcatcagagggcccctagggtctcgcaaggatcaaaagacccagctgagggcgatggggcccagcctgaggaaacacccagggatggcgacaagccagaggagactcaggggaaggcagagaaagatgagccaggagcctgggaggagacattcaaaactcactctgacagcaagccgtatggccccatgtctgtgggtttggacttctctctgccaggcatggagcatgtctatgggatccctgagcatgcagacaacctgaggctgaaggtcactgagggtggggagccatatcgcctctacaatttggatgtgttccagtatgagctgtacaacccaatggccttgtatgggtctgtgcctgtgctcctggcacacaaccctcatcgcgacttgggcatcttctggctcaatgctgcagagacctgggttgatatatcttccaacactgccgggaagaccctgtttgggaagatgatggactacctgcagggctctggggagaccccacagacagatgttcgctggatgtcagagactggcatcattgacgtcttcctgctgctggggccctccatctctgatgttttccggcaatatgctagtctcacaggaacccaggcgttgcccccactcttctccctcggctaccaccagagccgttggaactaccgggacgaggctgatgtgctggaagtggatcagggctttgatgatcacaacctgccctgtgatgtcatctggctagacattgaacatgctgatggcaagcggtatttcacctgggaccccagtcgcttccctcagccccgcaccatgcttgagcgcttggcttctaagaggcggaagctggtggccatcgtagacccccacatcaaggtggactccggctaccgagttcacgaggagctgcggaacctggggctgtatgttaaaacccgggatggctctgactatgagggctggtgctggccaggctcagctggttaccctgacttcactaatcccacgatgagggcctggtgggctaacatgttcagctatgacaattatgagggctcagctcccaacctctttgtctggaatgacatgaacgaaccatctgtgttcaatggtcctgaggtcaccatgctcaaggatgcccagcattatgggggctgggagcaccgggatgtgcataacatctatggcctttatgtgcacatggcgactgctgatgggctgagacagcgctctgggggcatggaacgcccctttgtcctggccagggccttcttcgctggctcccagcgctttggagccgtgtggacaggggacaacactgccgagtgggaccatttgaagatctctattcctatgtgtctcagcttggggctggtgggactttccttctgtggggcggatgtgggtggcttcttcaaaaacccagagccagagctgcttgtgcgctggtaccagatgggtgcttaccagccattcttccgggcacatgcccacttggacactgggcgacgagagccatggctgttaccatctcagcacaatgatataatccgagatgccttgggccagcgatattctttgctgcccttctggtacaccctcttatatcaggcccatcgggaaggcattcctgtcatgaggcccctgtgggtgcagtaccctcaggatgtgactaccttcaatatagatgatcagtacttgcttggggatgcgttgctggttcaccctgtatcagactctggagcccatggtgtccaggtctatctgcctggccaaggggaggtgtggtatgacattcaaagctaccagaagcatcatggtccccagaccctgtacctgcctgtaactctaagcagtatccctgtgttccagcgtggagggacaatcgtgcctcgatggatgcgagtgcggcggtcttcagaatgtatgaaggatgaccccatcactctctttgttgcacttagccctcagggtacagctcaaggagagctctttctggatgatgggcacacgttcaactatcagactcgccaagagttcctgctgcgtcgattctcattctctggcaacacccttgtctccagctcagcagaccctgaaggacactttgagacaccaatctggattgagcgggtggtgataataggggctggaaagccagcagctgtggtactccagacaaaaggatctccagaaagccgcctgtccttccagcatgaccctgagacctctgtgttggtcctgcgcaagcctggcatcaatgtggcatctgattggagtattcacctgcgataacccaagggatgtt

SEQ ID NO: 12216 - DNA, 4512 bp, Homo sapiens
  source 1..4512: mol_type = unassigned DNA
ataatcaagacaaatttgccaaataaatcattgtagaaacgctagtttgggcctgaaaaattccaggagcaagagtcaagatttgtcactccatgagaatctggaggggactcccttcccagaaacttgacgatgaagtactggttgtaattttagaaagacacccaatcggcttttttaaaagatcgcccagggcccttgtcctgagagctgggagctggtcggagtgacagagaagccatggaagcagcagtgaaagaggaaataagtcttgaagatgaagctgtagataaaaacattttcagagactgtaacaagatcgcattttacaggcgtcagaaacagtggctttccaagaagtccacctatcaggcattattggattcagtcacaacagatgaagacagcaccaggttccaaatcatcaatgaagcaagtaaggttcctctcctggctgaaatttatggtatagaaggaaacattttcaggcttaaaattaatgaagagactcctctaaaacccagatttgaagttccggatgtcctcacaagcaagccaagcactgtaaggctgatttcatgctctggggacacaggcagtctgatattggcagatggaaaaggagacctgaagtgccatatcacagcaaacccattcaaggtagacttggtgtctgaagaagaggttgtgattagcataaattccctgggccaattatactttgagcatctacagattcttcacaaacaaagagctgctaaagaaaatgaggaggagacatcagtggacacctctcaggaaaatcaagaagatctgggcctgtgggaagagaaatttggaaaatttgtggatatcaaagctaatggcccttcttctattggtttggatttctccttgcatggatttgagcatctttatgggatcccacaacatgcagaatcacaccaacttaaaaatactggtgatggagatgcttaccgtctttataacctggatgtctatggataccaaatatatgataaaatgggcatttatggttcagtaccttatctcctggcccacaaactgggcagaactataggtattttctggctgaatgcctcggaaacactggtggagatcaatacagagcctgcagtagagtacacactgacccagatgggcccagttgctgctaaacaaaaggtcagatctcgcactcatgtgcactggatgtcagagagtggcatcattgatgtttttctgctgacaggacctacaccttctgatgtcttcaaacagtactcacaccttacaggcacacaagccatgccccctcttttctctttgggataccaccagtgccgctggaactatgaagatgagcaggatgtaaaagcagtggatgcagggtttgatgagcatgacattccttatgatgccatgtggctggacatagagcacactgagggcaagaggtacttcacctgggacaaaaacagattcccaaaccccaagaggatgcaagagctgctcaggagcaaaaagcgtaagcttgtggtcatcagtgatccccacatcaagattgatcctgactactcagtatatgtgaaggccaaagatcagggcttctttgtgaagaatcaggaaggggaagactttgaaggggtgtgttggccaggtctctcctcttacctggatttcaccaatcccaaggtcagagagtggtattcaagtctttttgctttccctgtttatcagggatctacggacatcctcttcctttggaatgacatgaatgagccttctgtctttagagggccagagcaaaccatgcagaagaatgccattcatcatggcaattgggagcacagagagctccacaacatctacggtttttatcatcaaatggctactgcagaaggactgataaaacgatctaaagggaaggagagaccctttgttcttacacgttctttctttgctggatcacaaaagtatggtgccgtgtggacaggcgacaacacagcagaatggagcaacttgaaaatttctatcccaatgttactcactctcagcattactgggatctctttttgcggagctgacataggcgggttcattgggaatccagagacagagctgctagtgcgttggtaccaggctggagcctaccagcccttcttccgtggccatgccaccatgaacaccaagcgacgagagccctggctctttggggaggaacacacccgactcatccgagaagccatcagagagcgctatggcctcctgccatattggtattctctgttctaccatgcacacgtggcttcccaacctgtcatgaggcctctgtgggtagagttccctgatgaactaaagacttttgatatggaagatgaatacatgctggggagtgcattattggttcatccagtcacagaaccaaaagccaccacagttgatgtgtttcttccaggatcaaatgaggtctggtatgactataagacatttgctcattgggaaggagggtgtactgtaaagatcccagtagccttggacactattccagtgtttcagcgaggtggaagtgtgataccaataaagacaactgtaggaaaatccacaggctggatgactgaatcctcctatggactccgggttgctctaagcactaagggttcttcagtgggtgagttatatcttgatgatggccattcattccaatacctccaccagaagcaatttttgcacaggaagttttcattctgttccagtgttctgatcaatagttttgctgaccagaggggtcattatcccagcaagtgtgtggtggagaagatcttggtcttaggcttcaggaaggagccatcttctgtgactacccactcatctgatggtaaagatcagcctgtggcttttacgtattgtgccaaaacatccatcctgagcctggagaagctctcactcaacattgccactgactgggaggtccgcatcatatgacaaagaactgcccctggtgatgtgagcagggacctgcctgcccctttcaacctttcccctcaccttttttgagatttttgctgcaatctgtttgccttccctgaatcaaaataatctttcattcgtcaccattatactaatgaacaatagatttcatgtttcaaaatttcagattttacatgttaagatgtactaacaatattccttgtatcaaacatctccttttctccctgatacatagccctgagacatttatagcgttcaggagtcttctattgcttccattccttcagcagggctgcgtgggtctgttttaacgtgggccaagcctacctgggcagcccatttgccagggcttgcctcaggccatgcagcattggcgctctggctgcagcagctgagttgctcaaggccagtgtccaagtggacagcagcctctggtactccccccagttatcttccacccacatggactgggcagagcagccctcttctgtgtgcactgcatacgctgcagccgtgggagttattctcccctagagatcgacttggcagcacgaaggattcttttctctttcatgcttctcaggctcaatagtttctaattaatcttaaaatccatgtcttttacattgtttttttaattaagtgctgtttactaaccaaataatatttataacatgagtaagctataattaataacaatgaaataaatacccatgtacccaccactggacttcagaagtagaactcatgactgggactaggatgaggcaagggagaccctggccttgggcacaaaatgtaagggatgccaaaaaaatacagtaatcaaagtaagtaatatttcaatccaatatttttaaaaatcagaattaatgcaaaaaaaaccatgatgaacaaaatattaaaatttaaaataaagacaggattagtattactgagttttccttttgtcccaggctctaatatggcttggcatggggcagaacattacaacataccagtcgtgtcatggtgcccaaggctccacagacctcagtggctccctgctgcctgccacagcatctgttttagcagcctcgactcctcagcactcctcagcacacacctcttcttatcaggcttcctccacttagcaacttgctaacggccacctctgtgccttctgatccctgggcgccaatatcctcctgcccttaccatccttccaggcccaacttaaatcccactttcccatgaagcctaactgcgtgaacacccctacccccatacccattagcagtgattttgcccttccccgtaatgctgtcccacttataactgtgctctacttagcattctcagggatcataccttaatgttttcagtatgtctgcgttctcctactagattgtatgtccctcaagagcatgttctgtttctcttctgtctgacagagcactattatacctgactttcagtaactgttagctgtgattagttagctggtggatttaattgattaaaaaattacgattgaatgta

SEQ ID NO: 12217 - DNA, 1437 bp, Homo sapiens
  source 1..1437: mol_type = unassigned DNA
ataatcaagacaaatttgccaaataaatcattgtagaaacgctagtttgggcctgaaaaattccaggagcaagagtcaagatttgtcactccatgagaatctggaggggactcccttcccagaaacttgacgatgaagtactggttgtaattttagaaagacacccaatcggcttttttaaaagatcgcccagggcccttgtcctgagagctgggagctggtcggagtgacagagaagccatggaagcagcagtgaaagaggaaataagtcttgaagatgaagctgtagataaaaacattttcagagactgtaacaagatcgcattttacaggcgtcagaaacagtggctttccaagaagtccacctatcaggcattattggattcagtcacaacagatgaagacagcaccaggttccaaatcatcaatgaagcaagtaaggtcaggtgccaggaccagagcccaacaactctggatgccttcaaaggcaaagaaaccacagtccaggaggagacacaggatctcagcacaagacagcacctggctcaaaaggaagctgaggagcctgataaacaaggacaaattacctgggacatcagcaacgtagctcccaagactgagaactttgaggacctcttggaacaaactccatgctcagcctgtttgcaaggtttcaccagagacaacacttccagcagcttctccgaggatgcaggaatatctctgagcacctctgtgaagttaccccttgcctcttcatctaagcctaatgaaaatgaagctttgcccaaccagccaccttctcagcagataaggcacaactaccgcttattagccagtactgtgtctgcagaaatggccaggaacaggcagctaatttgggaactggccagacaatcagaagcacacctggacaggccagttgtccttggggaacaggccagtgcccagcgtgaggttgccagtattctttgtagaaaatcagtgcttgcaataaaccaactggctgcaactgtagaagggacaattagtgtcctacagcaatttaatgaactattagaccatcctctggatcccgggaggtcttgatcacagctggtagaggtggccactcactgttctatgtcttttaggttaacagttctttacataacagtgaagagtcctggtgcctcaggaaaagcaagatcaacctaccaaggaagagttgatggagtcataattttcctacttaacacccactgcaaatttaaatatgtgttctagggctgtttgttaattctattatggtctttactaattgtgattcccagttctgggtgaataaaaagtttttgttttaatgtaattgtgatcaacactatgcttgaagacatagacaaagctatttctaccaccatgatgtttacaaaatatctggtattttcgcctatatgg

SEQ ID NO: 12218 - DNA, 1937 bp, Homo sapiens
  source 1..1937: mol_type = unassigned DNA
tccctccgctccagttcgtcggggcgggcgcggcggcggcggcgaaggaggagcgcggccggggcgatgcggcgctacctgcgcgtcgtggtgctgtgtgtggcctgcggcttctgctcgctcctttacgctttcagccagctcgccgtgtccctggaagaaggaacgggcggcggtggcgggaagccgcaggccgcggtggcttcctggctcgcgggcggcggacgcggcgccgtgagaggcgccggcgtcgcgggccccgcagcgcatcccggcgtgtcggacaggtacagtctgaaaatacagcctgttgagaaaatgcatctagctgtagttgcctgtggtgaaagactggaagaaactatgaccatgttgaagtcagctatcattttcagcatcaaacctcttcaattccatatttttgctgaagatcagctacatcatagctttaaaggcagacttgacaactggtcatttctacaaacatttaattatacgttataccccataacctttccaagtgagaatgcagcagagtggaaaaaactctttaaaccatgtgcttcgcagagattgttcttgccgttaatcctgaaagaagttgactcactattgtatgtcgacactgatatcctttttttacgaccagttgatgatatttggtctttactaaagaaatttaattccacacaaattgctgcaatggcaccagaacatgaggaacctcgaataggatggtataatcgctttgctaggcatccatattatggaaaaactggagtaaactctggagttatgttgatgaacatgactcgaatgagaaggaagtatttcaagaatgatatgacaactgtacgactacaatggggagatatacttatgccattgcttaaaaaatacaaactaaacatcacatggggtgatcaagatctattgaatatcgtgttttttcataatccagaaagcctttttgtttttccgtgtcaatggaattatcgaccagatcattgtatatatggaagcaattgccaagaagcagaagaaggaggaatctttattcttcatgggaacagaggtgtttaccatgacgataagcaaccagcatttagagctgtttatgaagcactgagaaattgttcttttgaagatgacaacatccgttccttattaaaacctttagaactggaactacaaaaaacagtgcatacatactgtggaaaaatttacaaaatatttatcaaacaactagcaaaaagtgtaagagatcgttatgccagatcaccaaaggaaaagtgattcttggtgactgcttaatcaaatggatgaaaacaaagaatcagaagataagtgtgaaggaatcgtcttggatgaagtattcaggaaggaattactcatctccagaataattttttttttcctaaagaagttaagtaagcagtattttcaggtaatgaagaataagttaaaatcttgggcctcaacattgaacattttttatctctgatgttttgtaatgttacttgctatcattccagtattgatgaaaatactattgaatgggtttaacctgcagacttctgttgactcatactctcaagagtggtaggggtgtgtagatggagaaaatgtacctcaaacagtgccaacactcaagactgtgagtagagcaataattttatgtcagcactaacctcactttaaaagtgtgagaaaaaagtttgtttacaggagcagaaacaggtctgttgtttctgaagaaatgtgatgtaactgatgtaaccattgacaatctatgtgtgcctttatacatttcatctctgttttaaaatatttttatgacaatcatgtttaaaattatttttagattacaagtaagctgcatgttaaaaattgagctgtgtaaggtagaggaaaaatagtgaaaactttgggatttt

SEQ ID NO: 12219 - DNA, 7497 bp, Homo sapiens
  source 1..7497: mol_type = unassigned DNA
gcggcagaggcggtgtccaggcttccgggcgggtagtccttcggctccggagccgcgactgcgctcgcctaggtggtgggcggggagggaaggaagggagcgggcgcaaggcggcggcggcggctgcgggtgaggaacttgttgcgcccgcggctgcgcggtgcccctccctccgctccagttcgtcggggcgggcgcggcggcggcggcgaaggaggagcgcggccggggcgatgcggcgctacctgcgcgtcgtggtgctgtgtgtggcctgcggcttctgctcgctcctttacgctttcagccagctcgccgtgtccctggaagaaggaacgggcggcggtggcgggaagccgcaggccgcggtggcttcctggctcgcgggcggcggacgcggcgccgtgagaggcgccggcgtcgcgggccccgcagcgcatcccggcgtgtcggacaggtgtaaagatttctctctgtgttactggaatccctattggatgctgccctctgatgtttgtggaatgaactgcttttgggaagcggcttttaggtacagtctgaaaatacagcctgttgagaaaatgcatctagctgtagttgcctgtggtgaaagactggaagaaactatgaccatgttgaagtcagctatcattttcagcatcaaacctcttcaattccatatttttgctgaagatcagctacatcatagctttaaaggcagacttgacaactggtcatttctacaaacatttaattatacgttataccccataacctttccaagtgagaatgcagcagagtggaaaaaactctttaaaccatgtgcttcgcagagattgttcttgccgttaatcctgaaagaagttgactcactattgtatgtcgacactgatatcctttttttacgaccagttgatgatatttggtctttactaaagaaatttaattccacacaaattgctgcaatggcaccagaacatgaggaacctcgaataggatggtataatcgctttgctaggcatccatattatggaaaaactggagtaaactctggagttatgttgatgaacatgactcgaatgagaaggaagtatttcaagaatgatatgacaactgtacgactacaatggggagatatacttatgccattgcttaaaaaatacaaactaaacatcacatggggtgatcaagatctattgaatatcgtgttttttcataatccagaaagcctttttgtttttccgtgtcaatggaattatcgaccagatcattgtatatatggaagcaattgccaagaagcagaagaaggaggaatctttattcttcatgggaacagaggtgtttaccatgacgataagcaaccagcatttagagctgtttatgaagcactgagaaattgttcttttgaagatgacaacatccgttccttattaaaacctttagaactggaactacaaaaaacagtgcatacatactgtggaaaaatttacaaaatatttatcaaacaactagcaaaaagtgtaagagatcgttatgccagatcaccaaaggaaaagtgattcttggtgactgcttaatcaaatggatgaaaacaaagaatcagaagataagtgtgaaggaatcgtcttggatgaagtattcaggaaggaattactcatctccagaataattttttttttcctaaagaagttaagtaagcagtattttcaggtaatgaagaataagttaaaatcttgggcctcaacattgaacattttttatctctgatgttttgtaatgttacttgctatcattccagtattgatgaaaatactattgaatgggtttaacctgcagacttctgttgactcatactctcaagagtggtaggggtgtgtagatggagaaaatgtacctcaaacagtgccaacactcaagactgtgagtagagcaataattttatgtcagcactaacctcactttaaaagtgtgagaaaaaagtttgtttacaggagcagaaacaggtctgttgtttctgaagaaatgtgatgtaactgatgtaaccattgacaatctatgtgtgcctttatacatttcatctctgttttaaaatatttttatgacaatcatgtttaaaattatttttagattacaagtaagctgcatgttaaaaattgagctgtgtaaggtagaggaaaaatagtgaaaactttgggattttaatctgtgtgtgcgtgtttgtgtgtgagagagagtgagaaatgtagtgtttcattttgtatgcattaaactgtcttgccaaaactcagatctaagattgttaaatagatatttggggaatttttttttaatcactttaaatgaaaaacgtcagctttactgggcattctggaagcaaaatatattatgctgatggtaaagtgagaaccttaagagtatactcatgatggtggaaagtgtgatggaccaaaatgcataagctatatacttcctgtgagtagtaattttagttacaatggagtagaaaaatatggtccatttaaacttgtcttctacctcataacggccttgcaagatacttttgaagaagcaaatgtctagagccttactttaagtaagttaaacaacttaagtggatgatttggaataagattgttacatccagctgtagaaaatgtggttttaattgggttgatgtgcatttttgaatatcacctaagacagttaatttttttaaatcttgagaaattacttctttggcattcttgacctgttagctaatataactatagattctgaatacttagcatatactatgctggggcacatatcttattttaccaacaatatgattatctatatggttatcttctttttctccctgatattttaatgctcaagtagaaaatggaaaatcatgaaggaaaaatacaacctgtgaaaattgtggcagttagctttgtgaagacacagtgacctctgtggagacatggaatatgcagaaagagatggttagtacagttgttctgtcgtctgcagttcagtcagggacaaattgagagaggaaagtttaagcagggtgcattagaagttgataaccagtccagcattcttagaacagatgggtttagagaacacgagttgtagttccttggcagaatgccatggtgaatataagaaactgtgaaattgagcttactgagtagaaaatgagaatactaaaaatgtgaagtttggagggtatgtattagatcatttctaatggtcctcaaataatgatcattgcctgcctgactatgtaagattcttgttgggagcttaagaatagattcctgagctaggcctttggagactctggcatgctgtgtctaggagggagtctgtaaaacaatttttaatgaagaaatttaaaaattacacaaaactagaatagtgcattggtactcaacatccagatctgacacttatcactatcttaccatgtttgcttcatttgtcatttttttgtttgcttaagtatcttaaaatcccatacattgtgttatttcactgctgtgaacactttgggtagataccacgatatcacacctaacagaggcagcagcagtccttcggcttcatctcatagccagtccttaagcaaatttccctgattatctcaaaaatcatcttctagttggtttgttagaatcaacagaatataagtcacatgatgatttcgtttttaacaatcacctcagatgactttgatgttagctactttgagaaccactggaaattattttgccaacttgaaagttcaagttaggataccacaattcttggcacgtttggtggattataaatgtgattttgaaatattagaggaagcatttggggttaatgacaggatatgaatttatattagtaagtttgataagataaaatttcctcagtgaacggagaatctcagccccatgggctctaattgattgggacttgtgtagagcgtggtcacagtttaatccaactggactgtatgctgtggtctcactcatgttgtggcttatttacactgtcacacacactacattgtggatcagttggaaggttcttcatctggtttatttagacctgacctaattgatcattttaccataaattgaattatagtgaaaactgtcttttgggtactgtttctacctaaaattaaaggtatcacaaaatatgtataataatttttaaatgaattttctgaatttatctttagacaaggtaattcttttgaattctaaagaaatgcagttcttggagttgatgagaggttaaattatagatggacaacttagagaacgtattccatcttcatataaatggtctttcataaaacatagtgtatctatgcagtttatataaactacatgatttattatttgagtctatgtattctgacctcagaactatctctgggctacagtattaccaaagtgggatgcctttaaaatgcagtcaaacttcatttgtatgaagtagaaaagaacttgggaaacctttaaaaatatatattgtgatttatgctttaagaaaatgcatacttttttctaatgaagagtagttcataatatataagggttttaaggccctgaaataacattagtgcttactcattgctctctcatcttgcctccagtcagatgttattggtatagtgaaaagaagaccagattttgaactagatctggattctctttttagtaactcaggcatgttatttacccttctctgtgccttaggtttttaagtacaatcagtgtacccttcaaacctcacaagatgaaactcagaagagataatggatttggaagcattttgcgtggcttatattatgccacgccagtgttactgttgaagttctgttttgttcgttgttttctgtacagagcgttcagtttactcaggctgaatgttttctgacatatatctccagtatgaatttgtttatgtaaggaagagtttttcaggaagagaaagtagagaagaaaagaatgatgtaactaaatcaaaaaagaaggaaaagagaggaagtgagaaaaggggtgaggaaagagaaaggagtaagaatggggatggcaaagggcagagtaagagaaaagatggaatgagtgtatggaaaattgagaagtagagatggagagaaatggtgtggaaacatttactttttgagttgtagccctcacactacatcagtttgcttgcctgggctctctggggtcaggaaaggtgctgacttccatggaatggggcagcagggcctgctgtatttggtttgttagtactagagttgtttcccaatcaccctactcactgatcatttagtgccaattcaacattttatgtcttttttttttagtggatcccagtttgtgagctaggacctgtggaaatacaagtatcttcctttttaactttattgttttagccatcccaagtgttagactgcaagactaactacatattccccagtggaggttggaagtggaggggactgcttcattaggtctgaagggggccaaggaatgtgttgcagcagttttcgcagatgatactgacgagaggccaggtttgggaatcactgccctgccttggatggcaaattaagcaataaattacacctatttattcctcagttgggatactttcagttgaaccattctgagtagatttaagagaacaaaagacagcagaaataccttaaaagatattattggctgtcttatttttcagatatttgtatttaataaataccttagtagtagtcagaacctctttgagatgtttttagaaagaccactgatttgttttttaaaataatttttttggttccttagagtagagaagaaaagtaggggtgcaatatgtcaggtgtggggccagttatccatttattaaatgcaatttcaagtgtcttaaaaacaataattgccttattgcattttaatatttaataaagtagattaaataaagatttgtattataacagttattcttttatccattgccaaagcaacccttttttgcctattaaaatctggctaaactgttctgatgttgtttcttaattcattaaacatgaaactaggttttacaaactaaattatataaagacagaagtctaaaaatggtaccagaaaatttttttttaaaaaattaatgtgttattcaaatatccagcaattaaagactcatgagaaaaacagaatagcatattagatgtaacagtttaaaatggattgcaaatcaatgtcagacttaaatagaaaatatttattatcacctcatttctaccaataatttcagatgtttaatgggactttgaaaagataggaaaaaatagaaatgaaaatttatctcacctttaatactgtgaatactatttggagggtccctggtcagacatttaaatatcaaacttaagaactgacatggagcctttgattagtttatatacaggatctgaatatttacacacatagcacactatagcaacctcttgtaaaaaatcatgaagatagaattcaacagtgtatattctattaaaaagtaaattggctgggtgtggtggctcatgcatgtaatcccagcactttgggaggccgaggcaggaggatcgcttgagcccaagagtttgagaccagcctaggtgacaaagtgagaccccatctctacaaaaaaattaaaaaattatccagatgtggtggtgtttgcctgcggtcctagctacacaggaagttgaggcaggaggattgcttgagtgcaagagtttgaggctgcagagagccaagattgcaccattgcactccagcctgggtgacagagcgagaccctgtctcaaaaaataaaggaaattggctttgactatgaaaaacagccattttcaacctttttataaaacctcttcagggaatattggaatattatttttgtcaggcaaaaataatccagggcttgagcattgctgtagaatatgttatctgttcaaaacttagcagagcacgcatgcatcacatgcattgtcatcagtatttgagagctgaaccaatggtttttgatggttgccgtaacagaagatctgtgaagaggatggtggtttgcacctgttcctgaagtcaaactggaaaaggttgcaggtatttcaattttctcaatcattttgcataaatgtattaatattttgagtagtaatagttctaaacctgcaggaaggcatcattgtatactgtggtatgtagagaatactactcttacactgctctttatcttaaaatgttttggtatactgtgaatattttcctctaagtatttggtgtattttgacagttattaaaggagaatataaaattaaagattctggtctaaactaagaataatggaaagttgcttcgtcctgccttagaggagttttcagttcatcctcttcttgagaaactatgtgttgctgttactaaataaacatttactcaataaacgttttatttcctcaaa

SEQ ID NO: 12220 - DNA, 3260 bp, Homo sapiens
  source 1..3260: mol_type = unassigned DNA
gtcgccgccgccgccggccgcccgccggccgccacgaccccagtccccggcgggcgggcggaggaggcgaccgccgcgcgctgctgcactcatcctgccgccgccgcgatgcgcagaggggccgagccgcctgggggccgccgccgccgccgcgccgcaccatgaagctccgcagcaaggcggcggcgctgctcttgctcgcgctggccgcgctgctgctggcgctgctgtccctgcgcgctggccgcgctgagcccccagcgctgcccgcgcgccccgcgtccgccccgcagcgccaccccgcgcctgtccccgcgcgctggccggggccgggcgccctccccggggccagcccgggagttcggaggcgccggcccccgcgtccgcgcccccgagcgggccgccggggcgctgcgagactggagaagttggcgaggaggcctggagaacccaggagtttccaagctgtgctgccacccgagctctggatccacctggctgtggtggcctgtggcaatcggctggaggagacgctggtcatgctcaaatcagctgtgctttttagccacaggaagatccaattccacatcttcactgaagactctctgaagcccgagtttgataagcagttacgccagtggcctgactcatatacaaagaagtttgagcacagaatctaccccatcacattttctgttggaaaccctcaggagtggaagaaattgttcaaaccctgtgctgcccagagactctttcttccggtgattttaaaggatgtggactcacttctctacgtggacaccgatgtcctctttctgagacctgttgatgacatctggaagcttctgaggctgtttaattccacccagcttgcagccatggcccctgagcacgaaatccccaagattggctggtacagccgctttgctaggcatcctttctatggctctgcaggagttaattcaggagtcatgttaatgaatttaactcggataagaagtacccagttcaagaacagcatgattccaacaggcctggcttgggaggacatgttgtaccctctgtaccagaagtacaagaatgccatcacgtggggagaccaggatttattaaatattattttttatttcaacccagagtgtctctatgtattcccctgccagtggaactaccgtcccgatcactgcatgtacggaagcaactgcagagaggctgagcatgaaggtgtgtctgttctgcatggaaaccgaggcgtctaccatgacgataagcaaccaacgttcagagcactctatgaagcaatacgggattttccctttcaagacaatctctttcaatccatgtattacccccttcagctgaagtttttggagactgtgcacactttatgtggacgaatcccgcaagtttttctgaagcaaattgagaaaacaatgaaaagggcttatgagaaacacgtcatcatccatgttggccccaaccagatgcactgaatattttgtcttgttgcaagtcaattaggtgtcttgtgaccaaggaaatactaatctctaagctgcctgggtctttttgtgtgaatatttaatggtgctccatgactgttgagttttaaaaacctcgttaaattttgccaaatcagttgcccccaaaagggaatatgcttttccttatttttttttctaaaatgctatttatctctaaggaaaaaaaaaaaagactattactcatttaacattgtttaagcaggttgagctagctgtgaaaatagcttttgtgagccttctaattcctaaacgtctgagaccatttcagtggcacctgaggtgttatattgatctagcattcctgagactctttctatgcaactgactcccccacacccgtgttataaaagtaatacacacttttgaaacagagagacacacttgtagagcatatgggtcaagggctcaacatcaagattagattagccataatcctattgaccagtggaaaagattgtttccattttaaagcagttccttacaaccttttttctctacttttgcattttccactctaacacacatctaaaacaggtaatctcagtaaaagctggcctttttgctgagatttttatgtgggagactaaaatattagatgagatgattatgtgtacagaattttatttaaaatacatctgagagaatcattcagatacttgggtagtgttaaaggatgaagcatgtatctgggggtatttcttctttttctttctttctttttttttttttttttttttttgagacggaatctcactctgtagcccaggctagaatgcagtggcaggatctcggctcactgcagcttccacctcctgggttcaagtgattctcatgcctcagcctccccagtagctgggattacaagtgtgtgccaccacacccggctaatttttgtatttttagtagagacacggttttaccatgttggccaggctggtcttgatctccagacctcaagtgatctgcctgcctcagcctcccaaagtgctgggattacaagtgtgagccactgcactcagccaatctgggagtatttctaaagaaaaaaattactttgatttgtggaggactaaatcataatacatttctatgcaacaatagcttctgagaggaaattcaggaatgtttgtgtttaccacagacaaaaacatttgatctgttaatcatcagtagctgtggtcatctctctttcttaaactcttgggcaatgggtggaaatcagagaccaacttcaaatttaatgtgtaaaaaacaaatagttcagctgcttctattggtaagaaaattcaacttcctaccagccttagaaaggtctctttaaacaatttctttccccctagggttacctagctggtccatacaggttttatcacctcactgcaaggaggaagttgaatattctgttccccacggggatctggcttaatccctagttgctcatatagttggtatcagcatagcaatattttgcataatgctttatttttctcaaatgactattgcatagatgatcttgatatttgcaacagcctagtggatttggtagggtcctgaatcatctctataaggcaaacaaggaaattgtaacacaaagaaataaacatattgaatataattgctattctgtaagacatacagtctgtgtaagatgtatcttatttacagagacatttttgaaaattaaaatattaaatactttttgttatatagagacaa

SEQ ID NO: 12221 - DNA, 5037 bp, Homo sapiens
  source 1..5037: mol_type = unassigned DNA
cacacaagcgcttccttgccgagaggctggagctgcggcaccgcaggcctgagccaccccttctctgctgtctccttctcttcctcagggctcccgtgtctgctcgccctccgacgctgctcaggaatttgacaagaaactgaagttttgattcagatatattttgaattgaaaccagagatgttctagagtttagattctttcatttgattaaggtatggtctgaatatgcgttgcttggcagctcgggtcaactataagactttgattattatctgcgcactcttcactttggtcacagtacttttgtggaataagtgttccagtgacaaagcaatccagtttccacggcgttcgagtagtggcttcagagtggatgggtttgaaaaaagagcagcagcatctgagagtaacaactatatgaaccacgtggccaaacaacagtctgaggaagcattccctcaggaacagcagaaagcaccccctgttgttgggggcttcaatagcaatgtgggaagtaaggtgttagggctcaaatatgaagaaattgactgtctcataaatgatgaacacacaattaaagggagacgagaggggaacgaagtctttcttccattcacttgggttgagaaatattttgatgtttatggaaaggtggttcagtatgatggctatgatcggtttgaattctctcatagctattccaaagtctatgcacagagagccccctatcaccccgatggtgtgtttatgtcttttgaaggctacaatgtggaagtccgagacagagtcaagtgcataagtggggttgaaggtgtgccattatctacacaatggggacctcaaggctatttctatccaatccagattgcacagtatggattaagtcattacagcaagaatctaactgagaaacctcctcacatagaggtatatgaaacagcagaagacagagacaaaaacaagcctaatgactggactgtgccaaagggctgctttatggcgaatgtggctgataagtctagattcaccaatgtcaaacagtttattgcaccagaaaccagtgaaggtgtatccttgcaactgggaaacacaaaagattttattatttcatttgacctcaagttcttgacaaatggaagtgtgtccgtggttctagagaccacagaaaagaatcagctcttcactatacattatgtctcaaatgctcagctaattgcttttaaagaaagagatatatactatggcattgggcccagaacttcatggagcacagttaccagggacctggtcactgacctcaggaaaggagtgggtctttcaaacacaaaagctgtcaagccaaccaaaataatgcccaagaaggtggttaggttgattgcaaaaggtaagggattcctcgacaacattaccatctctaccacagcccacatggctgcattttttgctgctagtgattggctagtaaggaaccaggatgagaaaggtggctggccaattatggtgacccgtaagttaggggaagggttcaagtctttagagccaggatggtattctgccatggcccaagggcaagccatttctacattagtcagggcctatctgttaacaaaagaccatatattcctcaattcagctttaagggcaacagccccttataagtttctatctgagcagcatggagttaaagctgtgtttatgaataaacatgactggtatgaagaatatccaaccacacctagctcttttgttttaaatggctttatgtattctttaattgggctgtatgacttaaaagaaactgcaggggaaaaactcggaaaagaagcaaggtccttgtatgagcgtggcatggaatctcttaaagccatgctgcccttgtatgacactggctcaggaaccatctatgacctccgtcacttcatgcttggcatcgctcctaacctggctcgctgggactatcataccacccacatcaatcagttgcagctactcagtaccattgatgagtccccagtcttcaaagaatttgtcaagaggtggaaaagctaccttaaaggcagcagggcaaagcacaactagagctcacaaccaaaactgcacttcagcctctgctgtacacagaaactacaggctctgtctcaggagagcataggcacattttaaaaggttatgtactaggtttttgtggattctatcaaagtgataagtgatccttaaaaccagccttctaaaataattgcattccatgggttgggtatttagaaatgtaggtggcatttagaacacaatgtttaatcaatgggctgaacaaagatgcttcactttgccttgcccatcaccctatacagtttcgcagatagtctagtcactctatgtgagaaagataatggtaagtagttgctactggccaactgtctagcacttacctgaaaacttagtatggagctcttttaaaatgtgattatttatatttatgttgaaagcggactttaaaaaaaataatgtgctgtaacacagtaaatatgtacttgtagcctggatagcagactgtgttcaactttttaaaaagatgtttcctttctaaagattaatttcttgggagcaaatgagtatttgttgcatttgttcaatttgttgtatatggtgaatatttaattatggttttcttgaaacgtgtaaattaaaaacacaatcagtgttcaggcttcagttatataatgtaagcacaactaaaatgaaacttgttgactgcacaagaaattacaaaaatgtttctgttttgaaacttgatctacaatcagtaaaagtttgataatcagtatatcccttcccaacccccattgtgacagtttctttttgtcactgtctagaattttgtattttatttcagactataccttggagttttgtatattttgagagagatatttttgggacattattttggaaacttattacaaatctaaatttggaaaggagctagtagctttaaggccaccaccatattttacttttttaggatttttccccctttaaataaaaatattagatcaaatactatatgcaagaaatcatagcaaagtttttttttcctaccaagatcattcttgatcatcagcttcccaaactagtaagtctgtgcatcattgggtgtttttttttaatttaattttaaattatcccagctattagatagaagggatgttactgcacttatgtgtaatcagatctttatttaggtatacatatcctcctataccgcacataaatagatttcagagcccccatacaatgggcagtgtctgctatagggcttcaggcattaaataaaaccgagggttgttgattttgctgtgacagtacactaaatcaatactatatcttatacagtttgaaaatatgataccctacactttcaggggaccgagtctgacaaacacaatacatttatctgtgacctatatcaagtacacatttaggagccaggtaggttacctgcttacacactatattttaattgaattcaaactatcaagcactacttagaaactggaaaacatatatatgttagcatcaaagggggcagaagcaaagaagatacagatctgcactgaagacattagactggccatagaaaagtaagcttgaactcccaattgatgtgaccacactcttcttaattttgttcacagtaaaaacacttttttgagttattaggcttacccctagcttttgacctttgcatttcatatatgttagatgtctcagcaagaatatctggtctcccctaatttttattcccagtgccgatgttcaaaataaactttctccagtctgggaaccttttttacttccccatatttgttattatttagaatggttcatacgtctgctttgtttgcatactggtcttcagattatgagactcgatgataacagtatggtactgcttctgtgacaaatatcgtgccttaacaatgtggctgtccttttccactgaagaaggaaagacgttttgatctagaaatagcgttgtgatttccttgctgttggttttacactgccttccacattgcaacagcaagttgatttcttgtgatcccagaattttctaagaggatgagttgaatctatagcagcattgtcagtacagaccagtggttctcaaactttaaaatgcctcagcatcacttgggagcttattgaaatgcagatcccagagtcagtaaatctgcctgtgaagtatgatagtctgcatttgtaatgagcattcaagtgattctgatgcaggtgagctgggggcatacagggaggaacactgccctggactatccattgcatttttgcctctaaacaactacagaattttctagggttttaaattatgtaaaatgtttacttattctgagcttagagagaatggggagggtatttttaaattttattgttttatttctttaagtttttctttgctttaagattataggtattaggtttgtttttgtttttccacttatcttgagttcactttgatgttaaatctattgctacttcagttgtaaaaccagccaaaagtttctggatgaaggtcaagtttgaccttttaggagttattgtacataaaggcttcatccacgaaccatccagcgcacagaagcaagtgcaaaaatgacacaagcacaactctccagacgtggctccttctcctttctcagtgcagactctcactgaaagctgctattttcatcctccttgtggttgcttttcttgtttctcttccattgtacatgtgggttatataccatatgttaaatatgcaataaagtgtttacaggatgcccttctgaagggtagtcctttgtaaagctgtacagactttgcagtttaagcacaatgtgcacatgttagttttatatacagcaaaacttgattttttgcagatggaaaggtattttgtttctatacaaagtaaatggattgtttgtgcttaatgtaaagccgctttataaaactgtaaaataaagtttttttctt

SEQ ID NO: 12222 - DNA, 4828 bp, Homo sapiens
  source 1..4828: mol_type = unassigned DNA
gtatggtctgaatatgcgttgcttggcagctcgggtcaactataagactttgattattatctgcgcactcttcactttggtcacagtacttttgtggaataagtgttccagtgacaaagcaatccagtttccacggcgttcgagtagtggcttcagagtggatgggtttgaaaaaagagcagcagcatctgagagtaacaactatatgaaccacgtggccaaacaacagtctgaggaagcattccctcaggaacagcagaaagcaccccctgttgttgggggcttcaatagcaatgtgggaagtaaggtgttagggctcaaatatgaagaaattgactgtctcataaatgatgaacacacaattaaagggagacgagaggggaacgaagtctttcttccattcacttgggttgagaaatattttgatgtttatggaaaggtggttcagtatgatggctatgatcggtttgaattctctcatagctattccaaagtctatgcacagagagccccctatcaccccgatggtgtgtttatgtcttttgaaggctacaatgtggaagtccgagacagagtcaagtgcataagtggggttgaaggtgtgccattatctacacaatggggacctcaaggctatttctatccaatccagattgcacagtatggattaagtcattacagcaagaatctaactgagaaacctcctcacatagaggtatatgaaacagcagaagacagagacaaaaacaagcctaatgactggactgtgccaaagggctgctttatggcgaatgtggctgataagtctagattcaccaatgtcaaacagtttattgcaccagaaaccagtgaaggtgtatccttgcaactgggaaacacaaaagattttattatttcatttgacctcaagttcttgacaaatggaagtgtgtccgtggttctagagaccacagaaaagaatcagctcttcactatacattatgtctcaaatgctcagctaattgcttttaaagaaagagatatatactatggcattgggcccagaacttcatggagcacagttaccagggacctggtcactgacctcaggaaaggagtgggtctttcaaacacaaaagctgtcaagccaaccaaaataatgcccaagaaggtggttaggttgattgcaaaaggtaagggattcctcgacaacattaccatctctaccacagcccacatggctgcattttttgctgctagtgattggctagtaaggaaccaggatgagaaaggtggctggccaattatggtgacccgtaagttaggggaagggttcaagtctttagagccaggatggtattctgccatggcccaagggcaagccatttctacattagtcagggcctatctgttaacaaaagaccatatattcctcaattcagctttaagggcaacagccccttataagtttctatctgagcagcatggagttaaagctgtgtttatgaataaacatgactggtatgaagaatatccaaccacacctagctcttttgttttaaatggctttatgtattctttaattgggctgtatgacttaaaagaaactgcaggggaaaaactcggaaaagaagcaaggtccttgtatgagcgtggcatggaatctcttaaagccatgctgcccttgtatgacactggctcaggaaccatctatgacctccgtcacttcatgcttggcatcgctcctaacctggctcgctgggactatcataccacccacatcaatcagttgcagctactcagtaccattgatgagtccccagtcttcaaagaatttgtcaagaggtggaaaagctaccttaaaggcagcagggcaaagcacaactagagctcacaaccaaaactgcacttcagcctctgctgtacacagaaactacaggctctgtctcaggagagcataggcacattttaaaaggttatgtactaggtttttgtggattctatcaaagtgataagtgatccttaaaaccagccttctaaaataattgcattccatgggttgggtatttagaaatgtaggtggcatttagaacacaatgtttaatcaatgggctgaacaaagatgcttcactttgccttgcccatcaccctatacagtttcgcagatagtctagtcactctatgtgagaaagataatggtaagtagttgctactggccaactgtctagcacttacctgaaaacttagtatggagctcttttaaaatgtgattatttatatttatgttgaaagcggactttaaaaaaaataatgtgctgtaacacagtaaatatgtacttgtagcctggatagcagactgtgttcaactttttaaaaagatgtttcctttctaaagattaatttcttgggagcaaatgagtatttgttgcatttgttcaatttgttgtatatggtgaatatttaattatggttttcttgaaacgtgtaaattaaaaacacaatcagtgttcaggcttcagttatataatgtaagcacaactaaaatgaaacttgttgactgcacaagaaattacaaaaatgtttctgttttgaaacttgatctacaatcagtaaaagtttgataatcagtatatcccttcccaacccccattgtgacagtttctttttgtcactgtctagaattttgtattttatttcagactataccttggagttttgtatattttgagagagatatttttgggacattattttggaaacttattacaaatctaaatttggaaaggagctagtagctttaaggccaccaccatattttacttttttaggatttttccccctttaaataaaaatattagatcaaatactatatgcaagaaatcatagcaaagtttttttttcctaccaagatcattcttgatcatcagcttcccaaactagtaagtctgtgcatcattgggtgtttttttttaatttaattttaaattatcccagctattagatagaagggatgttactgcacttatgtgtaatcagatctttatttaggtatacatatcctcctataccgcacataaatagatttcagagcccccatacaatgggcagtgtctgctatagggcttcaggcattaaataaaaccgagggttgttgattttgctgtgacagtacactaaatcaatactatatcttatacagtttgaaaatatgataccctacactttcaggggaccgagtctgacaaacacaatacatttatctgtgacctatatcaagtacacatttaggagccaggtaggttacctgcttacacactatattttaattgaattcaaactatcaagcactacttagaaactggaaaacatatatatgttagcatcaaagggggcagaagcaaagaagatacagatctgcactgaagacattagactggccatagaaaagtaagcttgaactcccaattgatgtgaccacactcttcttaattttgttcacagtaaaaacacttttttgagttattaggcttacccctagcttttgacctttgcatttcatatatgttagatgtctcagcaagaatatctggtctcccctaatttttattcccagtgccgatgttcaaaataaactttctccagtctgggaaccttttttacttccccatatttgttattatttagaatggttcatacgtctgctttgtttgcatactggtcttcagattatgagactcgatgataacagtatggtactgcttctgtgacaaatatcgtgccttaacaatgtggctgtccttttccactgaagaaggaaagacgttttgatctagaaatagcgttgtgatttccttgctgttggttttacactgccttccacattgcaacagcaagttgatttcttgtgatcccagaattttctaagaggatgagttgaatctatagcagcattgtcagtacagaccagtggttctcaaactttaaaatgcctcagcatcacttgggagcttattgaaatgcagatcccagagtcagtaaatctgcctgtgaagtatgatagtctgcatttgtaatgagcattcaagtgattctgatgcaggtgagctgggggcatacagggaggaacactgccctggactatccattgcatttttgcctctaaacaactacagaattttctagggttttaaattatgtaaaatgtttacttattctgagcttagagagaatggggagggtatttttaaattttattgttttatttctttaagtttttctttgctttaagattataggtattaggtttgtttttgtttttccacttatcttgagttcactttgatgttaaatctattgctacttcagttgtaaaaccagccaaaagtttctggatgaaggtcaagtttgaccttttaggagttattgtacataaaggcttcatccacgaaccatccagcgcacagaagcaagtgcaaaaatgacacaagcacaactctccagacgtggctccttctcctttctcagtgcagactctcactgaaagctgctattttcatcctccttgtggttgcttttcttgtttctcttccattgtacatgtgggttatataccatatgttaaatatgcaataaagtgtttacaggatgcccttctgaagggtagtcctttgtaaagctgtacagactttgcagtttaagcacaatgtgcacatgttagttttatatacagcaaaacttgattttttgcagatggaaaggtattttgtttctatacaaagtaaatggattgtttgtgcttaatgtaaagccgctttataaaactgtaaaataaagtttttttcttaaaaag

SEQ ID NO: 12223 - DNA, 2300 bp, Homo sapiens
  source 1..2300: mol_type = unassigned DNA
gtcctcaaccaagatggcgcggatggcttcaggcgcatcacgacaccggcgcgtcacgcgacccgccctacgggcacctcccgcgcttttcttagcgccgcagacggtggccgagcgggggaccgggaagcatggcccgggggtcggcggttgcctgggcggcgctcgggccgttgttgtggggctgcgcgctggggctgcagggcgggatgctgtacccccaggagagcccgtcgcgggagtgcaaggagctggacggcctctggagcttccgcgccgacttctctgacaaccgacgccggggcttcgaggagcagtggtaccggcggccgctgtgggagtcaggccccaccgtggacatgccagttccctccagcttcaatgacatcagccaggactggcgtctgcggcattttgtcggctgggtgtggtacgaacgggaggtgatcctgccggagcgatggacccaggacctgcgcacaagagtggtgctgaggattggcagtgcccattcctatgccatcgtgtgggtgaatggggtcgacacgctagagcatgaggggggctacctccccttcgaggccgacatcagcaacctggtccaggtggggcccctgccctcccggctccgaatcactatcgccatcaacaacacactcacccccaccaccctgccaccagggaccatccaatacctgactgacacctccaagtatcccaagggttactttgtccagaacacatattttgactttttcaactacgctggactgcagcggtctgtacttctgtacacgacacccaccacctacatcgatgacatcaccgtcaccaccagcgtggagcaagacagtgggctggtgaattaccagatctctgtcaagggcagtaacctgttcaagttggaagtgcgtcttttggatgcagaaaacaaagtcgtggcgaatgggactgggacccagggccaacttaaggtgccaggtgtcagcctctggtggccgtacctgatgcacgaacgccctgcctatctgtattcattggaggtgcagctgactgcacagacgtcactggggcctgtgtctgacttctacacactccctgtggggatccgcactgtggctgtcaccaagagccagttcctcatcaatgggaaacctttctatttccacggtgtcaacaagcatgaggatgcggacatccgagggaagggcttcgactggccgctgctggtgaaggacttcaacctgcttcgctggcttggtgccaacgctttccgtaccagccactacccctatgcagaggaagtgatgcagatgtgtgaccgctatgggattgtggtcatcgatgagtgtcccggcgtgggcctggcgctgccgcagttcttcaacaacgtttctctgcatcaccacatgcaggtgatggaagaagtggtgcgtagggacaagaaccaccccgcggtcgtgatgtggtctgtggccaacgagcctgcgtcccacctagaatctgctggctactacttgaagatggtgatcgctcacaccaaatccttggacccctcccggcctgtgacctttgtgagcaactctaactatgcagcagacaagggggctccgtatgtggatgtgatctgtttgaacagctactactcttggtatcacgactacgggcacctggagttgattcagctgcagctggccacccagtttgagaactggtataagaagtatcagaagcccattattcagagcgagtatggagcagaaacgattgcagggtttcaccaggatccacctctgatgttcactgaagagtaccagaaaagtctgctagagcagtaccatctgggtctggatcaaaaacgcagaaaatacgtggttggagagctcatttggaattttgccgatttcatgactgaacagtcaccgacgagagtgctggggaataaaaaggggatcttcactcggcagagacaaccaaaaagtgcagcgttccttttgcgagagagatactggaagattgccaatgaaaccaggtatccccactcagtagccaagtcacaatgtttggaaaacagcctgtttacttgagcaagactgataccacctgcgtgtcccttcctccccgagtcagggcgacttccacagcagcagaacaagtgcctcctggactgttcacggcagaccagaacgtttctggcctgggttttgtggtcatctattctagcagggaacactaaaggtggaaataaaagattttctattatggaaataaagagttggcatgaaagtggctactgaaaa

SEQ ID NO: 12224 - DNA, 2027 bp, Homo sapiens
  source 1..2027: mol_type = unassigned DNA
acggtggccgagcgggggaccgggaagcatggcccgggggtcggcggttgcctgggcggcgctcgggccgttgttgtggggctgcgcgctggggctgcagggcgggatgctgtacccccaggagagcccgtcgcgggagtgcaaggagctggacggcctctggagcttccgcgccgacttctctgacaaccgacgccggggcttcgaggagcagtggtaccggcggccgctgtgggagtcaggccccaccgtggacatgccagttccctccagcttcaatgacatcagccaggactggcgtctgcggcattttgtcggctgggtgtggtacgaacgggaggtgatcctgccggagcgatggacccaggacctgcgcacaagagtggtgctgaggattggcagtgcccattcctatgccatcgtgtgggtgaatggggtcgacacgctagagcatgaggggggctacctccccttcgaggccgacatcagcaacctggtccaggtggggcccctgccctcccggctccgaatcactatcgccatcaacaacacactcacccccaccaccctgccaccagggaccatccaatacctgactgacacctccaagtatcccaagggttactttgtccagaacacatattttgactttttcaactacgctggactgcagcggtctgtacttctgtacacgacacccaccacctacatcgatgacatcaccgtcaccaccagcgtggagcaagacagtgggctggtgaattaccagatctctgtcaagggcagtaacctgttcaagttggaagtgcgtcttttggatgcagaaaacaaagtcgtggcgaatgggactgggacccagggccaacttaaggtgccaggtgtcagcctctggtggccgtacctgatgcacgaacgccctgcctatctgtattcattggagatccgagggaagggcttcgactggccgctgctggtgaaggacttcaacctgcttcgctggcttggtgccaacgctttccgtaccagccactacccctatgcagaggaagtgatgcagatgtgtgaccgctatgggattgtggtcatcgatgagtgtcccggcgtgggcctggcgctgccgcagttcttcaacaacgtttctctgcatcaccacatgcaggtgatggaagaagtggtgcgtagggacaagaaccaccccgcggtcgtgatgtggtctgtggccaacgagcctgcgtcccacctagaatctgctggctactacttgaagatggtgatcgctcacaccaaatccttggacccctcccggcctgtgacctttgtgagcaactctaactatgcagcagacaagggggctccgtatgtggatgtgatctgtttgaacagctactactcttggtatcacgactacgggcacctggagttgattcagctgcagctggccacccagtttgagaactggtataagaagtatcagaagcccattattcagagcgagtatggagcagaaacgattgcagggtttcaccaggatccacctctgatgttcactgaagagtaccagaaaagtctgctagagcagtaccatctgggtctggatcaaaaacgcagaaaatacgtggttggagagctcatttggaattttgccgatttcatgactgaacagtcaccgacgagagtgctggggaataaaaaggggatcttcactcggcagagacaaccaaaaagtgcagcgttccttttgcgagagagatactggaagattgccaatgaaaccaggtatccccactcagtagccaagtcacaatgtttggaaaacagcctgtttacttgagcaagactgataccacctgcgtgtcccttcctccccgagtcagggcgacttccacagcagcagaacaagtgcctcctggactgttcacggcagaccagaacgtttctggcctgggttttgtggtcatctattctagcagggaacactaaaggtggaaataaaagattttctattatggaaataaagagttggcatg

SEQ ID NO: 12225 - DNA, 1029 bp, Homo sapiens
  source 1..1029: mol_type = unassigned DNA
gagggaactagcgagaacgaggaagcagctggaggtgacgccgggcagattacgcctgtcagggccgagccgagcggatcgctgggcgctgtgcagaggaaaggcgggagtgcccggctcgctgtcgcagagccgagcctgtttctgcgccggaccagtcgaggactctggacagtagaggccccgggacgaccgagctgatggcgtcttcgaccccatcttcgtccgcaacctcctcgaacgcgggagcggaccccaataccactaacctgcgccccacaacgtacgatacctggtgcggcgtggcccatggatgcaccagaaaactggggctcaagatctgcggcttcttgcaaaggaccaacagcctggaagagaagagtcgccttgtgagtgccttcaaggagaggcaatcctccaagaacctgctttcctgtgaaaacagcgaccgggatgcccgcttccggcgcacagagactgacttctctaatctgtttgctagagatctgcttccggctaagaacggtgaggagcaaaccgtgcaattcctcctggaagtggtggacatactcctcaactatgtccgcaagacatttgatcgctccaccaaggtgctggactttcatcacccacaccagttgctggaaggcatggagggcttcaacttggagctctctgaccaccccgagtccctggagcagatcctggttgactgcagagacaccttgaagtatggggttcgcacaggtcatcctcgatttttcaaccagctctccactggattggatattattggcctagctggagaatggctgacatcaacggccaataccaacatgccatcagacatgagggagtgttggttgctacggtgatggggctcagagcagaaccaaagcatgattgtgacctccagaggtgatggtaactgcacacatggtttccaagggtcttcctcctaaatttccaggggcctcccaaggaaaatggacatattctttttggaaataaaatacttctaccaacata

SEQ ID NO: 12226 - DNA, 3604 bp, Homo sapiens
  source 1..3604: mol_type = unassigned DNA
gaattcttcgtaggaattatcttttccctcctctcacccgacagcctgcctatttccaaaggaaaaaaaaaaagcgtgttgagtacgttctggattactcataagaccttttttttttccttccgggcgcaaaaccgtgagctggatttataatcgccctataaagctccagaggcggtcaggcacctgcagaggagccccgccgctccgccgactagctgcccccgcgagcaacggcctcgtgatttccccgccgatccggtccccgcctccccactctgcccccgcctaccccggagccgtgcagccgcctctccgaatctctctcttctcctggcgctcgcgtgcgagagggaactagcgagaacgaggaagcagctggaggtgacgccgggcagattacgcctgtcagggccgagccgagcggatcgctgggcgctgtgcagaggaaaggcgggagtgcccggctcgctgtcgcagagccgagcctgtttctgcgccggaccagtcgaggactctggacagtagaggccccgggacgaccgagctgatggcgtcttcgaccccatcttcgtccgcaacctcctcgaacgcgggagcggaccccaataccactaacctgcgccccacaacgtacgatacctggtgcggcgtggcccatggatgcaccagaaaactggggctcaagatctgcggcttcttgcaaaggaccaacagcctggaagagaagagtcgccttgtgagtgccttcaaggagaggcaatcctccaagaacctgctttcctgtgaaaacagcgaccgggatgcccgcttccggcgcacagagactgacttctctaatctgtttgctagagatctgcttccggctaagaacggtgaggagcaaaccgtgcaattcctcctggaagtggtggacatactcctcaactatgtccgcaagacatttgatcgctccaccaaggtgctggactttcatcacccacaccagttgctggaaggcatggagggcttcaacttggagctctctgaccaccccgagtccctggagcagatcctggttgactgcagagacaccttgaagtatggggttcgcacaggtcatcctcgatttttcaaccagctctccactggattggatattattggcctagctggagaatggctgacatcaacggccaataccaacatgtttacatatgaaattgcaccagtgtttgtcctcatggaacaaataacacttaagaagatgagagagatagttggatggtcaagtaaagatggtgatgggatattttctcctgggggcgccatatccaacatgtacagcatcatggctgctcgctacaagtacttcccggaagttaagacaaagggcatggcggctgtgcctaaactggtcctcttcacctcagaacagagtcactattccataaagaaagctggggctgcacttggctttggaactgacaatgtgattttgataaagtgcaatgaaagggggaaaataattccagctgattttgaggcaaaaattcttgaagccaaacagaagggatatgttcccttttatgtcaatgcaactgctggcacgactgtttatggagcttttgatccgatacaagagattgcagatatatgtgagaaatataacctttggttgcatgtcgatgctgcctggggaggtgggctgctcatgtccaggaagcaccgccataaactcaacggcatagaaagggccaactcagtcacctggaaccctcacaagatgatgggcgtgctgttgcagtgctctgccattctcgtcaaggaaaagggtatactccaaggatgcaaccagatgtgtgcaggatacctcttccagccagacaagcagtatgatgtctcctacgacaccggggacaaggcaattcagtgtggccgccacgtggatatcttcaagttctggctgatgtggaaagcaaagggcacagtgggatttgaaaaccagatcaacaaatgcctggaactggctgaatacctctatgccaagattaaaaacagagaagaatttgagatggttttcaatggcgagcctgagcacacaaacgtctgtttttggtatattccacaaagcctcaggggtgtgccagacagccctcaacgacgggaaaagctacacaaggtggctccaaaaatcaaagccctgatgatggagtcaggtacgaccatggttggctaccagccccaaggggacaaggccaacttcttccggatggtcatctccaacccagccgctacccagtctgacattgacttcctcattgaggagatagaaagactgggccaggatctgtaatcatccttcgcagaacatgagtttatgggaatgccttttccctctggcactccagaacaaacctctatatgttgctgaaacacacaggccatttcattgagggaaaacataatatcttgaagaatattgttaaaaccttacttaaagcttgtttgttctagttagcaggaaatagtgttctttttaaaaagttgcacattaggaacagagtatatatgtacagttatacatacctctctctatatatacatgtatagtgagtgtggcttagtaatagatcacggcatgtttcccgctccaagagaattcactttaccttcagcagttaccgaggagctaaacatgctgccaaccagcttgtccaacaactccaggaaaactgtttttcaaaacgccatgtcctaggggccgagggaaatgctgttggtgagaatcgacctcactgtcagcgtttctccacctgaagtgatgatggatgagaaaaaacaccaccaaatgacaagtcacaccctccccattagtatcctgttaggggaaaatagtagcagagtcattgttacaggtgtactatggctgtatttttagagattaatttgtgtagattgtgtaaattcctgttgtctgaccttggtggtgggagggggagactatgtgtcatgatttcaatgattgtttaattgtaggtcaatgaaatatttgcttatttatattcagagatgtaccatgttaaagaggcgtcttgtattttcttcccatttgtaatgtatcttatttatatatgaagtaagttctgaaaactgtttatggtattttcgtgcatttgtgagccaaagagaaaagattaaaattagtgagatttgtatttatattagagtgcccttaaaataatgatttaagcattttactgtctgtaagagaattctaagattgtacataaagtcatatatatggaaatcctgttacttaaatagcatctgctcttctcttacgctctctgtctggctgtacgtctggtgttctcaatgcttttctagcaactgttggataataactagatctcctgtaattttgtagtagttgatgaccaatctctgtgactcgcttagctgaaacctaaggcaacatttccgaagaccttctgaagatctcagataaagtgaccaggctcacaactgtttttgaagaagggaaattcacactgtgcgttttagagtatgcaagaagaatataaataaataaaaatattctccatggagaatttgaacaaaa

SEQ ID NO: 12227 - DNA, 1252 bp, Homo sapiens
  source 1..1252: mol_type = unassigned DNA
gcaaaaccgtgagctggatttataatcgccctataaagctccagaggcggtcaggcacctgcagaggagccccgccgctccgccgactagctgcccccgcgagcaacggcctcgtgatttccccgccgatccggtccccgcctccccactctgcccccgcctaccccggagccgtgcagccgcctctccgaatctctctcttctcctggcgctcgcgtgcgagagggaactagcgagaacgaggaagcagctggaggtgacgccgggcagattacgcctgtcagggccgagccgagcggatcgctgggcgctgtgcagaggaaaggcgggagtgcccggctcgctgtcgcagagccgaggtggcctgtttctgcgccggaccagtcgaggactctggacagtagaggccccgggacgaccgagctgatggcgtcttcgaccccatcttcgtccgcaacctcctcgaacgcgggagcggaccccaataccactaacctgcgccccacaacgtacgatacctggtgcggcgtggcccatggatgcaccagaaaactggggctcaagatctgcggcttcttgcaaaggaccaacagcctggaagagaagagtcgccttgtgagtgccttcaaggagaggcaatcctccaagaacctgctttcctgtgaaaacagcgaccgggatgcccgcttccggcgcacagagactgacttctctaatctgtttgctagagatctgcttccggctaagaacggtgaggagcaaaccgtgcaattcctcctggaagtggtggacatactcctcaactatgtccgcaagacatttgatcgctccaccaaggtgctggactttcatcacccacaccagttgctggaaggcatggagggcttcaacttggagctctctgaccaccccgagtccctggagcagatcctggttgactgcagagacaccttgaagtatggggttcgcacaggtcatcctcgatttttcaaccagctctccactggattggatattattggcctagctggagaatggctgacatcaacggccaataccaacatgccatcagacatgagggagtgttggttgctacggtgatggggctcagagcagaaccaaagcatgattgtgacctccagaggtgatggtaactgcacacatggtttccaagggtcttcctcctaaatttccaggggcctcccaaggaaaatggacatattctttttggaaataaaatacttctaccaac

SEQ ID NO: 12228 - DNA, 639 bp, Homo sapiens
  source 1..639: mol_type = unassigned DNA
gtgcgtgtcatcaaccttcaaacgtgattaatcaggaggccttcttttcccatcaccaagggggccaaagcgaggagcgagcgcatagcaaaagggacgcggggtccttttctctgccggtggcactgggtagctgtggccagctccagaggcggtcaggcacctgcagaggagccccgccgctccgccgactagctgcccccgcgagcaacggcctcgtgatttccccgccgatccggtccccgcctccccactctgcccccgcctaccccggagccgtgcagccgcctctccgaatctctctcttctcctggcgctcgcgtgcgagagggaactagcgagaacgaggaagcagctggaggtgacgccgggcagattacgcctgtcagggccgagccgagcggatcgctgggcgctgtgcagaggaaaggcgggagtgcccggctcgctgtcgcagagccgagcctgtttctgcgccggaccagtcgaggactctggacagtagaggccccgggacgaccgagctgatggcgtcttcgaccccatcttcgtccgcaacctcctcgaacgcgggagcggaccccaataccactaacctgcgccccacaacgtacgatacctggtgcggcgtggcccatg

SEQ ID NO: 12229 - DNA, 529 bp, Homo sapiens
  source 1..529: mol_type = unassigned DNA
attttcctgcctcccagctgtgagtgttgtgtggtctgttgggatgggggtgtggatttagctatgatccttcaaaaaagtccagaataattcagggaactatctttaaagtacaaaaacagcaaatggaccttagctccgacttaagcagaatgaaaggttaagtaacgcttcccccagttctcgtctcgggagacagacgtttaaccgcctgtttctgcgccggaccagtcgaggactctggacagtagaggccccgggacgaccgagctgatggcgtcttcgaccccatcttcgtccgcaacctcctcgaacgcgggagcggaccccaataccactaacctgcgccccacaacgtacgatacctggtgcggcgtggcccatggatgcaccagaaaactggggctcaagatctgcggcttcttgcaaaggaccaacagcctggaagagaagagtcgccttgtgagtgccttcaaggagaggcaatcctccaagaacctgctttcctgtgaaaacagcgaccgggatg

SEQ ID NO: 12230 - DNA, 571 bp, Homo sapiens
  source 1..571: mol_type = unassigned DNA
ttcttatccctgccctccggattcacgccccggggaagcacggaggctgaggctctagttgaagtggggcaagagcgattttcccttgagcttccatgctgcgagcgcctgtccctccaaagggcgcctgggcagcagcagccgaaggcgctactaggaacgcctgtttctgcgccggaccagtcgaggactctggacagtagaggccccgggacgaccgagctgatggcgtcttcgaccccatcttcgtccgcaacctcctcgaacgcgggagcggaccccaataccactaacctgcgccccacaacgtacgatacctggtgcggcgtggcccatggatgcaccagaaaactggggctcaagatctgcggcttcttgcaaaggaccaacagcctggaagagaagagtcgccttgtgagtgccttcaaggagaggcaatcctccaagaacctgctttcctgtgaaaacagcgaccgggatgcccgcttccggcgcacagagactgacttctctaatctgtttgctagagatctgcttccggctaagaacggtgaggagcaaaccgtgcaat

SEQ ID NO: 12231 - DNA, 556 bp, Homo sapiens
  source 1..556: mol_type = unassigned DNA
aggtagaggagaaacgctgaaaccggaccgaaacctcgccctaggcttagcgatggctaaaaaccggctgggataagagggaggcaagcaacattccgactcgctgctttctggctgtctggagtgcaagcctgtttctgcgccggaccagtcgaggactctggacagtagaggccccgggacgaccgagctgatggcgtcttcgaccccatcttcgtccgcaacctcctcgaacgcgggagcggaccccaataccactaacctgcgccccacaacgtacgatacctggtgcggcgtggcccatggatgcaccagaaaactggggctcaagatctgcggcttcttgcaaaggaccaacagcctggaagagaagagtcgccttgtgagtgccttcaaggagaggcaatcctccaagaacctgctttcctgtgaaaacagcgaccgggatgcccgcttccggcgcacagagactgacttctctaatctgtttgctagagatctgcttccggctaagaacggtgaggagcaaaccgtgcaattcctcctggaagtggtg

SEQ ID NO: 12232 - DNA, 2462 bp, Homo sapiens
  source 1..2462: mol_type = unassigned DNA
acccgccctcgccgctcggccccgccggtccccgcgcggtgccctcctcccgccacacgggcacgcacgcgcgcgcagggccaagcccgaggcagctcgcccgcagctcgcactcgcaggcgacctgctccagtctccaaagccgatggcatctccgggctctggcttttggtctttcgggtcggaagatggctctggggattccgagaatcccggcacagcgcgagcctggtgccaagtggctcagaagttcacgggcggcatcggaaacaaactgtgcgccctgctctacggagacgccgagaagccggcggagagcggcgggagccaacccccgcgggccgccgcccggaaggccgcctgcgcctgcgaccagaagccctgcagctgctccaaagtggatgtcaactacgcgtttctccatgcaacagacctgctgccggcgtgtgatggagaaaggcccactttggcgtttctgcaagatgttatgaacattttacttcagtatgtggtgaaaagtttcgatagatcaaccaaagtgattgatttccattatcctaatgagcttctccaagaatataattgggaattggcagaccaaccacaaaatttggaggaaattttgatgcattgccaaacaactctaaaatatgcaattaaaacagggcatcctagatacttcaatcaactttctactggtttggatatggttggattagcagcagactggctgacatcaacagcaaatactaacatgttcacctatgaaattgctccagtatttgtgcttttggaatatgtcacactaaagaaaatgagagaaatcattggctggccagggggctctggcgatgggatattttctcccggtggcgccatatctaacatgtatgccatgatgatcgcacgctttaagatgttcccagaagtcaaggagaaaggaatggctgctcttcccaggctcattgccttcacgtctgaacatagtcatttttctctcaagaagggagctgcagccttagggattggaacagacagcgtgattctgattaaatgtgatgagagagggaaaatgattccatctgatcttgaaagaaggattcttgaagccaaacagaaagggtttgttcctttcctcgtgagtgccacagctggaaccaccgtgtacggagcatttgaccccctcttagctgtcgctgacatttgcaaaaagtataagatctggatgcatgtggatgcagcttggggtgggggattactgatgtcccgaaaacacaagtggaaactgagtggcgtggagagggccaactctgtgacgtggaatccacacaagatgatgggagtccctttgcagtgctctgctctcctggttagagaagagggattgatgcagaattgcaaccaaatgcatgcctcctacctctttcagcaagataaacattatgacctgtcctatgacactggagacaaggccttacagtgcggacgccacgttgatgtttttaaactatggctgatgtggagggcaaaggggactaccgggtttgaagcgcatgttgataaatgtttggagttggcagagtatttatacaacatcataaaaaaccgagaaggatatgagatggtgtttgatgggaagcctcagcacacaaatgtctgcttctggtacattcctccaagcttgcgtactctggaagacaatgaagagagaatgagtcgcctctcgaaggtggctccagtgattaaagccagaatgatggagtatggaaccacaatggtcagctaccaacccttgggagacaaggtcaatttcttccgcatggtcatctcaaacccagcggcaactcaccaagacattgacttcctgattgaagaaatagaacgccttggacaagatttataataaccttgctcaccaagctgttccacttctctagagaacatgccctcagctaagccccctactgagaaacttcctttgagaattgtgcgacttcacaaaatgcaaggtgaacaccactttgtctctgagaacagacgttaccaattatggagtgtcaccagctgccaaaatcgtaggtgttggctctgctggtcactggagtagttgctactcttcagaatatggacaaagaaggcacaggtgtaaatatagtagcaggatgaggaacctcaaactgggtatcattttgcacgtgctcttctgttctcaaatgctaaatgcaaacactgtgtatttattagttaggtgtgccaaactaccgttcccaaattggtgtttctgaatgacatcaacattcccccaacattactccattactaaagacagaaaaaaataaaaacataaaatatacaaacatgtggcaacctgttcttcctaccaaatataaacttgtgtatgatccaagtattttatctgtgttgtctctctaaacccaaataaatgtgtaaatgtggacaca

SEQ ID NO: 12233 - DNA, 680 bp, Homo sapiens
  source 1..680: mol_type = unassigned DNA
tccaagagggctctgaggccgtggcgctcttcccccagcgcggcccttgggatggcgggtggccgacgatccaggcgctcgtgcgctcactgaatcgatgacggctggcttccctaggccgctggggcctcggacctgctgccggcgtgtgatggagaaaggcccactttggcgtttctgcaagatgttatgaacattttacttcagtatgtggtgaaaagtttcgatagatcaaccaaagtgattgatttccattatcctaatgagcttctccaagaatataattgggaattggcagaccaaccacaaaatttggaggaaattttgatgcattgccaaacaactctaaaatatgcaattaaaacagggcatcctagatacttcaatcaactttctactggtttggatatggttggattagcagcagactggctgacatcaacagcaaatactaacatgttcacctatgaaattgctccagtatttgtgcttttggaatatgtcacactaaagaaaatgagagaaatcattggctggccagggggctctggcgatgggatattttctcccggtacatgatatttcaactttctttgtgttttttcttctaatatgcaatgccttgttgtaaacctagggaagattaaaaatctagcctatgcctctgcttaggttaaata

SEQ ID NO: 12234 - DNA, 5858 bp, Homo sapiens
  source 1..5858: mol_type = unassigned DNA
gcggccgcccgcacttcccgcctctggctcgcccgaggacgcgctggcacgcctcccaccccctcactctgactccagctggcgtgcatggtctgcctcgcatcctcacgactcagctccctccctctctcgtgtttttttcctccgccgccccctcattcatccccactgggctccctttccctcaaatgctctggggctctccgcgctttcctgagtccgggctccgaggacccttaggtagtcccggtctcttttaaagctccccggcttccaaagggttgccacgtccctaaaccctgtctccagctcgcatacacacacgcacagacacgcacgttttctgttcctgcgtgacacccgccctcgccgctcggccccgccggtccccgcgcggtgccctcctcccgccacacgggcacgcacgcgcgcgcagggccaagcccgaggcagctcgcccgcagctcgcactcgcaggcgacctgctccagtctccaaagccgatggcatctccgggctctggcttttggtctttcgggtcggaagatggctctggggattccgagaatcccggcacagcgcgagcctggtgccaagtggctcagaagttcacgggcggcatcggaaacaaactgtgcgccctgctctacggagacgccgagaagccggcggagagcggcgggagccaacccccgcgggccgccgcccggaaggccgcctgcgcctgcgaccagaagccctgcagctgctccaaagtggatgtcaactacgcgtttctccatgcaacagacctgctgccggcgtgtgatggagaaaggcccactttggcgtttctgcaagatgttatgaacattttacttcagtatgtggtgaaaagtttcgatagatcaaccaaagtgattgatttccattatcctaatgagcttctccaagaatataattgggaattggcagaccaaccacaaaatttggaggaaattttgatgcattgccaaacaactctaaaatatgcaattaaaacagggcatcctagatacttcaatcaactttctactggtttggatatggttggattagcagcagactggctgacatcaacagcaaatactaacatgttcacctatgaaattgctccagtatttgtgcttttggaatatgtcacactaaagaaaatgagagaaatcattggctggccagggggctctggcgatgggatattttctcccggtggcgccatatctaacatgtatgccatgatgatcgcacgctttaagatgttcccagaagtcaaggagaaaggaatggctgctcttcccaggctcattgccttcacgtctgaacatagtcatttttctctcaagaagggagctgcagccttagggattggaacagacagcgtgattctgattaaatgtgatgagagagggaaaatgattccatctgatcttgaaagaaggattcttgaagccaaacagaaagggtttgttcctttcctcgtgagtgccacagctggaaccaccgtgtacggagcatttgaccccctcttagctgtcgctgacatttgcaaaaagtataagatctggatgcatgtggatgcagcttggggtgggggattactgatgtcccgaaaacacaagtggaaactgagtggcgtggagagggccaactctgtgacgtggaatccacacaagatgatgggagtccctttgcagtgctctgctctcctggttagagaagagggattgatgcagaattgcaaccaaatgcatgcctcctacctctttcagcaagataaacattatgacctgtcctatgacactggagacaaggccttacagtgcggacgccacgttgatgtttttaaactatggctgatgtggagggcaaaggggactaccgggtttgaagcgcatgttgataaatgtttggagttggcagagtatttatacaacatcataaaaaaccgagaaggatatgagatggtgtttgatgggaagcctcagcacacaaatgtctgcttctggtacattcctccaagcttgcgtactctggaagacaatgaagagagaatgagtcgcctctcgaaggtggctccagtgattaaagccagaatgatggagtatggaaccacaatggtcagctaccaacccttgggagacaaggtcaatttcttccgcatggtcatctcaaacccagcggcaactcaccaagacattgacttcctgattgaagaaatagaacgccttggacaagatttataataaccttgctcaccaagctgttccacttctctaggtagacaattaagttgtcacaaactgtgtgaatgtatttgtagtttgttccaaagtaaatctatttctatattgtggtgtcaaagtagagtttaaaaattaaacaaaaaagacattgctccttttaaaagtcctttcttaagtttagaatacctctctaagaattcgtgacaaaaggctatgttctaatcaataaggaaaagcttaaaattgttataaatacttcccttacttttaatatagtgtgcaaagcaaactttattttcacttcagactagtaggactgaatagtgccaaattgcccctgaatcataaaaggttctttggggtgcagtaaaaaggacaaagtaaatataaaatatatgttgacaataaaaactcttgcctttttcatagtattagaaaaaaatttctaatttacctatagcaacatttcaaatgtatttaaatacatataattttacaaaaggaaaatatatatattaaaaaagatatcctattttgtaacatatagatttttattttatataggttatacaaactgcgggggcagatataaaatctaagccagatttttttttcctttctcttaatggaggcacaataaaacacttagcaaagttattttgaaacattgacccacgaaattcttaaaaggtattattgcttctttctatacatgttatggcttatcacatctctaaagttagtatttcaagacaaacacaaaagaatactgcgagttctttaaaataattgatcccattggcagtaagattctcttcccctttaagttttccacccattttactcttagcggactcactctgcaagcgtgacaaaccaggcttcatctcagattaaattagggtaattgtctctattctgctttccagttcggcctgttttgaacagaaggttgatgctagttcttgaggcatcttccaaatagtattcttttattaggtcatttgaattaattagagaaagtaaaaataaaaccttatcagcctgagcaaagaggaatgaagcacactcccagaatgtggtgagcccagaaaattaaagttggccttgggagaagagatctctgtgggacaataatgacatcatcctggcgccatattgccactgtccaggaaagagaaatttacctccaggccagttgcgcatttccatcccctccccattcctccccacaaagtctctcccactagactccctaccactgggacccaaaatagttactttatattccatgggtggttgtttttcttccatgaaatgagcctctcaccctagattttgaggcattatcttaagattttcctttatccatctcccatcgagatccaaagtgaccagaatatgcagaaataataagatccttagaattcaaaatagtatttttaaaacatccttctttccctgtgaacctgatagaaaaacatgagctaacaaaagcttccatagatatttatggggtcacacatcgtcagattccaagtgctgattggagaacaatagattgatatgcagactgcaaatgcaaatttaggaacattctccatttctgaatggaccaggtagttcagtactcagactgcaggtatacaagggaagagagaaggccctgcccttcaacgggtagaaatgccctacaatataacatagagaaatgccctataatataaccacaggatccagccatctgaaattttcataagcttccccctacattatttctcctaggctatatgcaaaaacagtgataacttgatatgaacatggctttgggccctttctgtctagaaaaacaaatgggttcactatgacaatcagaaataaactctttcatctgtcccgcagaatttcatgaaggagtaaccttccattctaggctttgtctaatggccaagcattagacaaagcattagaaagcagttcctttctcaaaactgcctgctgagaataagcacatagctgcccgactatccggagcctcaggcccaaaggttccacttcagagacagagatgctaattgatccaacctgctgtccttcgtggagaagacagtggggcccagtgccctggtgaaccaaccctgctgtactccaggatgctttatcttttgagttacagatcctagattataaactgctgctttttaggttaatgagatggtaaaattttaaaggacaatttgtgcctatatatgaaattccagcaaaacaattctagcaacaacaatagctcttcttccccgctcccctaccccttcccagtactccttcaaattggctgagagccttgctcaggcctgtgcagggaaatccttaccaactgtagcccaaagaaggaagcaaataaaagcctagtaggtcccagtagtttaataaatcatcttgaaaggagatgtggaatcaggtcagaagagagtaagggaggaagggagggagggagggagggagggaaggagggagggaggaaggaaatgaagggagggagggagggaggaaagaagggagattatttttaatattagcccaaattcccagtgccatggtctttatgtgtgcccattctttacaaatcttagaaaagtttggttttagctttaatcagaactgacatggccattttcatttatacagcaatattgtgtttatcatttaaaatacttgaacaaacaagtgtgatatgtctttatctgagacctatacatggtatggacttcatatactgccacaggatgtgaggaaagaaaaggaaatcaattctgactgtgttgcctttattatctggataatactgtcttgtcacctcagattggggttgtgcactttagatctgaactgtacagtgttgcaaatcaacatgtgtttctgtaaaagcttgtacaatatattattgatatgtctttttctgtgtggtagctgtattgaactttgatattatgaaaactacatttgcatctgttcctgttctctctctctctctctttcctaactatatgccctccacatcggctctaatagagaacatgccctcagctaagccccctactgagaaacttcctttgagaattgtgcgacttcacaaaatgcaaggtgaacaccactttgtctctgagaacagacgttaccaattatggagtgtcaccagctgccaaaatcgtaggtgttggctctgctggtcactggagtagttgctactcttcagaatatggacaaagaaggcacaggtgtaaatatagtagcaggatgaggaacctcaaactgggtatcattttgcacgtgctcttctgttctcaaatgctaaatgcaaacactgtgtatttattagttaggtgtgccaaactaccgttcccaaattggtgtttctgaatgacatcaacattcccccaacattactccattactaaagacagaaaaaaataaaaacataaaatatacaaacatgtggcaacctgttcttcctaccaaatataaacttgtgtatgatccaagtattttatctgtgttgtctctctaaacccaaataaatgtgtaaatgtggacaca

SEQ ID NO: 12235 - DNA, 641 bp, Homo sapiens
  source 1..641: mol_type = unassigned DNA
gcgcgcgcagggccaagcccgaggcagctcgcccgcagctcgcactcgcaggcgacctgctccagtctccaaagccgatggcatctccgggctctggcttttggtctttcgggtcggaagatggctctggggattccgagaatcccggcacagcgcgagcctggtgccaagtggctcagaagttcacgggcggcatcggaaacaaactgtgcgccctgctctacggagacgccgagaagccggcggagagcggcgggagccaacccccgcgggccgccgcccggaaggccgcctgcgcctgcgaccagaagccctgcagctgctccaaagtggatgtcaactacgcgtttctccatgcaacagacctgctgccggcgtgtgatggagaaaggcccactttggcgtttctgcaagatgttatgaacattttacttcagtatgtggtgaaaagtttcgatagatcaaccaaagtgattgatttccattatcctaatgagcttctccaagaatataattgggaattggcagaccaaccacaaaatttggaggaaattttgatgcattgccaaacaactctaaaatatgcaattaaaacaggtattgtctcatcgaaaataataaagctcttttttcgtttacaa

SEQ ID NO: 12236 - DNA, 3039 bp, Homo sapiens
  source 1..3039: mol_type = unassigned DNA
gggcaacccgcgcgggacccttcctccctagtcgcggggagtctgagaaagcgcgcctgtttcgcgaccatcacgcacctcccctccgcttgtggccatgtaccgctacctgggcgaagcgctgttgctgtcccgggccgggcccgctgccctgggctcggcgtccgccgactcggccgcgttgctgggctgggcccggggacagcccgccgccgccccgcagccggggctggcattggccgcccggcgccactacagcgaggcggtggccgaccgcgaggacgaccccaacttcttcaagatggtggagggcttcttcgatcgcggcgccagcatcgtggaggacaagctggtggaggacctgaggacccgggagagcgaggagcagaagcggaaccgggtgcgcggcatcctgcggatcatcaagccctgcaaccatgtgctgagtctctccttccccatccggcgcgacgacggctcctgggaggtcatcgaaggctaccgggcccagcacagccagcaccgcacgccctgcaagggaggtatccgttacagcactgatgtgagtgtagatgaagtaaaagctttggcttctctgatgacatacaagtgtgcagtggttgatgtgccgtttgggggtgctaaagctggtgttaagatcaatcccaagaactatactgataatgaattggaaaagatcacaaggaggttcaccatggagctagcaaaaaagggctttattggtcctggcattgatgtgcctgctccagacatgagcacaggtgagcgggagatgtcctggatcgctgatacctatgccagcaccatagggcactatgatattaatgcacacgcctgtgttactggtaaacccatcagccaagggggaatccatggacgcatctctgctactggccgtggtgtcttccatgggattgaaaatttcatcaatgaagcttcttacatgagcattttaggaatgacaccagggtttggagataaaacatttgttgttcagggatttggtaatgtgggcctacactctatgagatatttacatcgttttggtgctaaatgtattgctgttggtgagtctgatgggagtatatggaatccagatggtattgacccaaaggaactggaagacttcaaattgcaacatgggtccattctgggcttccccaaggcaaagccctatgaaggaagcatcttggaggccgactgtgacatactgatcccagctgccagtgagaagcagttgaccaaatccaacgcacccagagtcaaagccaagatcattgctgaaggtgccaatgggccaacaactccagaagctgacaagatcttcctggagagaaacattatggttattccagatctctacttgaatgctggaggagtgacagtatcttactttgagtggctgaagaatctaaatcatgtcagctatggccgtttgaccttcaaatatgaaagggattctaactaccacttgctcatgtctgttcaagagagtttagaaagaaaatttggaaagcatggtggaactattcccattgtacccacggcagagttccaagacaggatatcgggtgcatctgagaaagacatcgtgcactctggcttggcatacacaatggagcgttctgccaggcaaattatgcgcacagccatgaagtataacctgggattggacctgagaacagctgcctatgttaatgccattgagaaagtcttcaaagtgtacaatgaagctggtgtgaccttcacatagatggatcatggctgacttcctcactatcctcttcacatgtaacttctgcagacctatcacaagtttacatgtaaccacagaaatccctttctctcctgactcattaataatggataccattctcaacaagtcaatccaagtcagcccgttaaggagaaagaaattaaggttagcggatcatgtacaagctgagtgtgaaagtagaaatcacctacaccagagagccattttggtattttgcctttaaataaaaagcctcctttatctggctgtgcagccttgctctgtggcttttcccaacacaatcagtgctagtgctggggaggaacagtcaagagcagtcagttgcttgcttattttttctggatgagtctgggacacactgtaactttaacacatttaagaagtaggtgtgtggccttttcagaaggtggcatggtcctcaagtgagttcttagtattttatatcagcaaaataattcaattttgcaggttgcaaacaaatataaaacctgtttctgtttatgaatattattcttttagaatagaataagtacatgctgctgtaataaaattgcctttaatcacttaacaagcctaaccttgactcaaacagtgaatgcctatagaaataataaatgaaaaaaactagtatttttatatcataaaacaatgtcatttatagcttatcattcatgtattgtccagcagacattaaaagccctgtggataattaagttatcttcatacctgcaaaatggtggaggctattttcattaaaactgtcagaatttgcttactataattatgatacagtccaaagaatgcagtcactttttatcatgttaactaattgttctcttttgaagatctatggttgactaattaaacaataattcaagtagagtgtcccagaaaaaaaccacttgggctccctgtttggagtctggctggctctgagcattgccaatggcccctactcacctgactttgtatcctctccttttagaggctttgcattctgcacccagcttcactaacagtgggctgaaaacatccttgggttgagtgtttcatttgggagttatttggccagggccttttgaacagtagtgtccccatgaagtgctagataatatatgtgtaagagtcagctttttttttttttttaactctaacacccttcagaaatttctaactactttgtaactgcatggcttaacctggtgataaaagcagttattaaaagtctacgttttccaaaa

SEQ ID NO: 12237 - DNA, 2809 bp, Homo sapiens
  source 1..2809: mol_type = unassigned DNA
atgtaccgctacctgggcccggggacagcccgccgccgccccgcagccggggctggcattggccgcccggcgccactacagcgaggcggtggccgaccgcgaggacgaccccaacttcttcaagatggtggagggcttcttcgatcgcggcgccagcatcgtggaggacaagctggtggaggacctgaggacccgggagagcgaggagcagaagcggaaccgggtgcgcggcatcctgcggatcatcaagccctgcaaccatgtgctgagtctctccttccccagcacagccagcaccgcacgccctgcaagggaggtatccgttacagcactgatgtgagtgtagatgaagtaaaagctttggcttctctgatgacatacaagtgtgcagtggttgatgtgccgtttgggggtgctaaagctggtgttaagatcaatcccaagaactatactgataatgaattggaaaagatcacaaggaggttcaccatggagctagcaaaaaagggctttattggtcctggcattgatgtgcctgctccagacatgagcacaggtgagcgggagatgtcctggatcgctgatacctatgccagcaccatagggcactatgatattaatgcacacgcctgtgttactggtaaacccatcagccaagggggaatccatggacgcatctctgctactggccgtggtgtcttccatgggattgaaaatttcatcaatgaagcttcttacatgagcattttaggaatgacaccagggtttggagataaaacatttgttgttcagggatttggtaatgtgggcctacactctatgagatatttacatcgttttggtgctaaatgtattgctgttggtgagtctgatgggagtatatggaatccagatggtattgacccaaaggaactggaagacttcaaattgcaacatgggtccattctgggcttccccaaggcaaagccctatgaaggaagcatcttggaggccgactgtgacatactgatcccagctgccagtgagaagcagttgaccaaatccaacgcacccagagtcaaagccaagatcattgctgaaggtgccaatgggccaacaactccagaagctgacaagatcttcctggagagaaacattatggttattccagatctctacttgaatgctggaggagtgacagtatcttactttgagtggctgaagaatctaaatcatgtcagctatggccgtttgaccttcaaatatgaaagggattctaactaccacttgctcatgtctgttcaagagagtttagaaagaaaatttggaaagcatggtggaactattcccattgtacccacggcagagttccaagacaggatatcgggtgcatctgagaaagacatcgtgcactctggcttggcatacacaatggagcgttctgccaggcaaattatgcgcacagccatgaagtataacctgggattggacctgagaacagctgcctatgttaatgccattgagaaagtcttcaaagtgtacaatgaagctggtgtgaccttcacatagatggatcatggctgacttcctcactatcctcttcacatgtaacttctgcagacctatcacaagtttacatgtaaccacagaaatccctttctctcctgactcattaataatggataccattctcaacaagtcaatccaagtcagcccgttaaggagaaagaaattaaggttagcggatcatgtacaagctgagtgtgaaagtagaaatcacctacaccagagagccattttggtattttgcctttaaataaaaagcctcctttatctggctgtgcagccttgctctgtggcttttcccaacacaatcagtgctagtgctggggaggaacagtcaagagcagtcagttgcttgcttattttttctggatgagtctgggacacactgtaactttaacacatttaagaagtaggtgtgtggccttttcagaaggtggcatggtcctcaagtgagttcttagtattttatatcagcaaaataattcaattttgcaggttgcaaacaaatataaaacctgtttctgtttatgaatattattcttttagaatagaataagtacatgctgctgtaataaaattgcctttaatcacttaacaagcctaaccttgactcaaacagtgaatgcctatagaaataataaatgaaaaaaactagtatttttatatcataaaacaatgtcatttatagcttatcattcatgtattgtccagcagacattaaaagccctgtggataattaagttatcttcatacctgcaaaatggtggaggctattttcattaaaactgtcagaatttgcttactataattatgatacagtccaaagaatgcagtcactttttatcatgttaactaattgttctcttttgaagatctatggttgactaattaaacaataattcaagtagagtgtcccagaaaaaaaccacttgggctccctgtttggagtctggctggctctgagcattgccaatggcccctactcacctgactttgtatcctctccttttagaggctttgcattctgcacccagcttcactaacagtgggctgaaaacatccttgggttgagtgtttcatttgggagttatttggccagggccttttgaacagtagtgtccccatgaagtgctagataatatatgtgtaagagtcagctttttttttttttttaactctaacacccttcagaaatttctaactactttgtaactgcatggcttaacctggtgataaaagcagttattaaaagtctacgttttcc

SEQ ID NO: 12238 - DNA, 1763 bp, Homo sapiens
  source 1..1763: mol_type = unassigned DNA
aaaagggcaacccgcgcgggacccttcctccctagtcgcggggagtctgagaaagcgcgcctgtttcgcgaccatcacgcacctcccctccgcttgtggccgaccgcgaggacgaccccaacttcttcaagatggtggagggcttcttcgatcgcggcgccagcatcgtggaggacaagctggtggaggacctgaggacccgggagagcgaggagcagaagcggaaccgggtgcgcggcatcctgcggatcatcaagccctgcaaccatgtgctgagtctctccttccccatccggcgcgacgacggctcctgggaggtcatcgaaggctaccgggcccagcacagccagcaccgcacgccctgcaagggaggtatccgttacagcactgatgtgagtgtagatgaagtaaaagctttggcttctctgatgacatacaagtgtgcagtggttgatgtgccgtttgggggtgctaaagctggtgttaagatcaatcccaagaactatactgataatgaattggaaaagatcacaaggaggttcaccatggagctagcaaaaaagggctttattggtcctggcattgatgtgcctgctccagacatgagcacaggtgagcgggagatgtcctggatcgctgatacctatgccagcaccatagggcactatgatattaatgcacacgcctgtgttactggtaaacccatcagccaagggggaatccatggacgcatctctgctactggccgtggtgtcttccatgggattgaaaatttcatcaatgaagcttcttacatgagcattttaggaatgacaccagggtttggagataaaacatttgttgttcagggatttggtaatgtgggcctacactctatgagatatttacatcgttttggtgctaaatgtattgctgttggtgagtctgatgggagtatatggaatccagatggtattgacccaaaggaactggaagacttcaaattgcaacatgggtccattctgggcttccccaaggcaaagccctatgaaggaagcatcttggaggccgactgtgacatactgatcccagctgccagtgagaagcagttgaccaaatccaacgcacccagagtcaaagccaagatcattgctgaaggtgccaatgggccaacaactccagaagctgacaagatcttcctggagagaaacattatggttattccagatctctacttgaatgctggaggagtgacagtatcttactttgagtggctgaagaatctaaatcatgtcagctatggccgtttgaccttcaaatatgaaagggattctaactaccacttgctcatgtctgttcaagagagtttagaaagaaaatttggaaagcatggtggaactattcccattgtacccacggcagagttccaagacaggatatcgggtgcatctgagaaagacatcgtgcactctggcttggcatacacaatggagcgttctgccaggcaaattatgcgcacagccatgaagtataacctgggattggacctgagaacagctgcctatgttaatgccattgagaaagtcttcaaagtgtacaatgaagctggtgtgaccttcacatagatggatcatggctgacttcctcactatcctcttcacatgtaacttctgcagacctatcacaagtttacatgtaaccacagaaatccctttctctcctgactcattaataatggataccattctcaacaagtcaatccaagtcagcccgttaaggagaaa

SEQ ID NO: 12239 - DNA, 2035 bp, Homo sapiens
  source 1..2035: mol_type = unassigned DNA
gagaattttattgttgaaggatttggtaatgtgggcctacactctatgagatatttacatcgttttggtgctaaatgtattgctgttggtgagtctgatgggagtatatggaatccagatggtattgacccaaaggaactggaagacttcaaattgcaacatgggtccattctgggcttccccaaggcaaagccctatgaaggaagcatcttggaggccgactgtgacatactgatcccagctgccagtgagaagcagttgaccaaatccaacgcacccagagtcaaagccaagatcattgctgaaggtgccaatgggccaacaactccagaagctgacaagatcttcctggagagaaacattatggttattccagatctctacttgaatgctggaggagtgacagtatcttactttgagtggctgaagaatctaaatcatgtcagctatggccgtttgaccttcaaatatgaaagggattctaactaccacttgctcatgtctgttcaagagagtttagaaagaaaatttggaaagcatggtggaactattcccattgtacccacggcagagttccaagacaggatatcgggtgcatctgagaaagacatcgtgcactctggcttggcatacacaatggagcgttctgccaggcaaattatgcgcacagccatgaagtataacctgggattggacctgagaacagctgcctatgttaatgccattgagaaagtcttcaaagtgtacaatgaagctggtgtgaccttcacatagatggatcatggctgacttcctcactatcctcttcacatgtaacttctgcagacctatcacaagtttacatgtaaccacagaaatccctttctctcctgactcattaataatggataccattctcaacaagtcaatccaagtcagcccgttaaggagaaagaaattaaggttagcggatcatgtacaagctgagtgtgaaagtagaaatcacctacaccagagagccattttggtattttgcctttaaataaaaagcctcctttatctggctgtgcagccttgctctgtggcttttcccaacacaatcagtgctagtgctggggaggaacagtcaagagcagtcagttgcttgcttattttttctggatgagtctgggacacactgtaactttaacacatttaagaagtaggtgtgtggccttttcagaaggtggcatggtcctcaagtgagttcttagtattttatatcagcaaaataattcaattttgcaggttgcaaacaaatataaaacctgtttctgtttatgaatattattcttttagaatagaataagtacatgctgctgtaataaaattgcctttaatcacttaacaagcctaaccttgactcaaacagtgaatgcctatagaaataataaatgaaaaaaactagtatttttatatcataaaacaatgtcatttatagcttatcattcatgtattgtccagcagacattaaaagccctgtggataattaagttatcttcatacctgcaaaatggtggaggctattttcattaaaactgtcagaatttgcttactataattatgatacagtccaaagaatgcagtcactttttatcatgttaactaattgttctcttttgaagatctatggttgactaattaaacaataattcaagtagagtgtcccagaaaaaaaccacttgggctccctgtttggagtctggctggctctgagcattgccaatggcccctactcacctgactttgtatcctctccttttagaggctttgcattctgcacccagcttcactaacagtgggctgaaaacatccttgggttgagtgtttcatttgggagttatttggccagggccttttgaacagtagtgtccccatgaagtgctagataatatatgtgtaagagtcagctttttttttttttttaactctaacacccttcagaaatttctaactactttgtaactgcatggcttaacctggtgataaaagcagttattaaaagtctacgttttcc

SEQ ID NO: 12240 - DNA, 2984 bp, Homo sapiens
  source 1..2984: mol_type = unassigned DNA
atgcagagtagacgctgcaccggtctccttttggtcccggtgtctgtgtcacacacggcgggtcctgccgaaatgcacttctaggaaagggaatgacctgcccgtgtgataatgcctcgtcagtgttcttgggcttttatgcccagctctctcctgtttttataagtcgcagctccgcaaactcactgaagcaactcgtttaccatagtttttactacatgtacctgaggccgttagatttgtctgtgttaaggatttgaaaggaggcagaaattaatacagattcaagtgttcactatcaagtcggaattgttaatatgtgaaatactactgttaaaggcaggaaaggctttattaaggacaagaagacaaactaggagaaggagctactcaagaccttccgattatctttacaaaaaggcaactacacctagaagattctgcagccacacacattctgccttcacttgaggtcaactgccttcaccaaggtatccgttacagcactgatgtgagtgtagatgaagtaaaagctttggcttctctgatgacatacaagtgtgcagtggttgatgtgccgtttgggggtgctaaagctggtgttaagatcaatcccaagaactatactgataatgaattggaaaagatcacaaggaggttcaccatggagctagcaaaaaagggctttattggtcctggcattgatgtgcctgctccagacatgagcacaggtgagcgggagatgtcctggatcgctgatacctatgccagcaccatagggcactatgatattaatgcacacgcctgtgttactggtaaacccatcagccaagggggaatccatggacgcatctctgctactggccgtggtgtcttccatgggattgaaaatttcatcaatgaagcttcttacatgagcattttaggaatgacaccagggtttggagataaaacatttgttgttcagggatttggtaatgtgggcctacactctatgagatatttacatcgttttggtgctaaatgtattgctgttggtgagtctgatgggagtatatggaatccagatggtattgacccaaaggaactggaagacttcaaattgcaacatgggtccattctgggcttccccaaggcaaagccctatgaaggaagcatcttggaggccgactgtgacatactgatcccagctgccagtgagaagcagttgaccaaatccaacgcacccagagtcaaagccaagatcattgctgaaggtgccaatgggccaacaactccagaagctgacaagatcttcctggagagaaacattatggttattccagatctctacttgaatgctggaggagtgacagtatcttactttgagtggctgaagaatctaaatcatgtcagctatggccgtttgaccttcaaatatgaaagggattctaactaccacttgctcatgtctgttcaagagagtttagaaagaaaatttggaaagcatggtggaactattcccattgtacccacggcagagttccaagacaggatatcgggtgcatctgagaaagacatcgtgcactctggcttggcatacacaatggagcgttctgccaggcaaattatgcgcacagccatgaagtataacctgggattggacctgagaacagctgcctatgttaatgccattgagaaagtcttcaaagtgtacaatgaagctggtgtgaccttcacatagatggatcatggctgacttcctcactatcctcttcacatgtaacttctgcagacctatcacaagtttacatgtaaccacagaaatccctttctctcctgactcattaataatggataccattctcaacaagtcaatccaagtcagcccgttaaggagaaagaaattaaggttagcggatcatgtacaagctgagtgtgaaagtagaaatcacctacaccagagagccattttggtattttgcctttaaataaaaagcctcctttatctggctgtgcagccttgctctgtggcttttcccaacacaatcagtgctagtgctggggaggaacagtcaagagcagtcagttgcttgcttattttttctggatgagtctgggacacactgtaactttaacacatttaagaagtaggtgtgtggccttttcagaaggtggcatggtcctcaagtgagttcttagtattttatatcagcaaaataattcaattttgcaggttgcaaacaaatataaaacctgtttctgtttatgaatattattcttttagaatagaataagtacatgctgctgtaataaaattgcctttaatcacttaacaagcctaaccttgactcaaacagtgaatgcctatagaaataataaatgaaaaaaactagtatttttatatcataaaacaatgtcatttatagcttatcattcatgtattgtccagcagacattaaaagccctgtggataattaagttatcttcatacctgcaaaatggtggaggctattttcattaaaactgtcagaatttgcttactataattatgatacagtccaaagaatgcagtcactttttatcatgttaactaattgttctcttttgaagatctatggttgactaattaaacaataattcaagtagagtgtcccagaaaaaaaccacttgggctccctgtttggagtctggctggctctgagcattgccaatggcccctactcacctgactttgtatcctctccttttagaggctttgcattctgcacccagcttcactaacagtgggctgaaaacatccttgggttgagtgtttcatttgggagttatttggccagggccttttgaacagtagtgtccccatgaagtgctagataatatatgtgtaagagtcagctttttttttttttttaactctaacacccttcagaaatttctaactactttgtaactgcatggcttaacctggtgataaaagcagttattaaaagtctacgttttcc

SEQ ID NO: 12241 - DNA, 1537 bp, Homo sapiens
  source 1..1537: mol_type = unassigned DNA
gtatatgctgatcttgcatgcagagtagacgctgcaccggtctccttttggtcccggtgtctgtgtcacacacggcgggtcctgccgaaatgcacttctaggaaagggaatgacctgcccgtgtgataatgcctcgtcagtgttcttgggcttttgtatccgttacagcactgatgtgagtgtagatgaagtaaaagctttggcttctctgatgacatacaagtgtgcagtggttgatgtgccgtttgggggtgctaaagctggtgttaagatcaatcccaagaactatactgataatgaattggaaaagatcacaaggaggttcaccatggagctagcaaaaaagggctttattggtcctggcattgatgtgcctgctccagacatgagcacaggtgagcgggagatgtcctggatcgctgatacctatgccagcaccatagggcactatgatattaatgcacacgcctgtgttactggtaaacccatcagccaagggggaatccatggacgcatctctgctactggccgtggtgtcttccatgggattgaaaatttcatcaatgaagcttcttacatgagcattttaggaatgacaccagggtttggagataaaacatttgttgttcagggatttggtaatgtgggcctacactctatgagatatttacatcgttttggtgctaaatgtattgctgttggtgagtctgatgggagtatatggaatccagatggtattgacccaaaggaactggaagacttcaaattgcaacatgggtccattctgggcttccccaaggcaaagccctatgaaggaagcatcttggaggccgactgtgacatactgatcccagctgccagtgagaagcagttgaccaaatccaacgcacccagagtcaaagccaagatcattgctgaaggtgccaatgggccaacaactccagaagctgacaagatcttcctggagagaaacattatggttattccagatctctacttgaatgctggaggagtgacagtatcttactttgagtggctgaagaatctaaatcatgtcagctatggccgtttgaccttcaaatatgaaagggattctaactaccacttgctcatgtctgttcaagagagtttagaaagaaaatttggaaagcatggtggaactattcccattgtacccacggcagagttccaagacaggatatcgggtgcatctgagaaagacatcgtgcactctggcttggcatacacaatggagcgttctgccaggcaaattatgcgcacagccatgaagtataacctgggattggacctgagaacagctgcctatgttaatgccattgagaaagtcttcaaagtgtacaatgaagctggtgtgaccttcacatagatggatcatggctgacttcctcactatcctcttcacatgtaacttctgcagacctatcacaagtttacatgtaaccacagaaatccctttctctcctgactcattaataatggataccattctcaacaagtcaatccaagtcagcccgtt

SEQ ID NO: 12242 - DNA, 2333 bp, Homo sapiens
  source 1..2333: mol_type = unassigned DNA
ttccttcctagtcgcggggagtctgagaaagcgcacctgttccgcgaccgtcacgcacccctcctccgcctgccgcgatgtaccgctacctggccaaagcgctgctgccgtcccgggccgggcccgctgccctgggctccgcggccaaccactcggccgcgttgctgggccggggccgcggacagcccgccgccgcctcgcagccggggctcgcattggccgcccggcgccactacagcgagttggtggccgaccgcgaggacgaccccaacttcttcaagatggtggagggcttcttcgatcgcggcgccagcatcgtggaggacaagttggtgaaggacctgaggacccaggaaagcgaggagcagaagcggaaccgggtgcgcggcatcctgcggatcatcaagccctgcaaccatgtgctgagtctctccttccccatccggcgcgacgacggctcctgggaggtcatcgaaggctaccgggcccagcacagccagcaccgcacgccctgcaagggaggtatccgttacagcactgatgtgagtgtagatgaagtaaaagctttggcttctctgatgacatacaagtgtgcagtggttgatgtgccgtttgggggtgctaaagctggtgttaagatcaatcccaagaactataccgaaaatgaattggaaaagatcacaaggaggttcaccatggagctagcaaagaagggctttattggtcctggcgttgatgtgcctgctccagacatgaacacaggtgagcgggagatgtcctggattgctgatacctatgccagcaccatagggcactatgatattaatgcacacgcctgtgttactggtaaacccatcagccaagggggaatccatggacgcatctctgctactggccgtggtgtcttccatgggattgaaaacttcatcaatgaagcttcttacatgagcattttaggaatgacaccagggtttagagataaaacatttgttgttcagggatttggtaatgtgggcctacactctatgagatatttacatcgttttggtgctaaatgtattgctgttggtgagtctgatgggagtatatggaatccagatggtattgacccaaaggaactggaagacttcaaattgcaacatgggtccattctgggcttccccaaggcaaagccctatgaaggaagcatcttggaggtcgactgtgacatactgatcccagctgccactgagaagcagttgaccaaatccaacgcacccagagtcaaagccaagatcattgctgaaggtgccaatgggccaacaactccagaagctgataagatcttcctggagagaaacattttggttattccagatctctacttgaatgctggaggagtgacagtatcttactttgagtggctgaagaatctaaatcatgtcagctatggccgtttgaccttcaaatatgaaagggattctaactaccacttgctcctgtctgttcaagagagtttagaaagaaaatttggaaagcatggtggaactattcccattgtacccacggcagagttccaagacagtatatcgggtgcatctgagaaagacattgtgcactctgccttggcatacacaatggagcgttctgccaggcaaattatgcacacagccatgaagtataacctgggattggacctgagaacagctgcctatgtcaatgccattgaaaaagtcttcaaagtgtacagtgaagctggtgtgaccttcacatagatggatcatggctgacttcctcactaacctcttcacgtgtaacttctgcagacctaccacaagtttacatgtaaccacagaaatccctttctctcctgactcattactaatggataccattctcaacaagtcaatccaaatcagcccgttaaggagaaagaaattaatatacaagctgagtgtgaaagtagaaatcacctacaccagagagctattttggtattttgcctttaaataaaaagcctcctccatatggctgtgcagccttgctctgtggcttttcccagcacaatcagtgctagtgctggggaagggacagtcaagagcagtcagttgcttacttattttgctctggatgagtctgggacacgctgtaactttaacacatttaagaagaaggtgtgtggccttttcagaaggtggcatggtcctcaagtgagttcttagtattttatatcagcaaaataactcaattttgcagattgcaaacaaatataaaagctgtttctgtttatgaattttattcttttagaatagaataagtacatgctgctgtaataaaattgcctttaatcactt

SEQ ID NO: 12243 - DNA, 5171 bp, Homo sapiens
  source 1..5171: mol_type = unassigned DNA
gtgattgtgaagggggaggaggctgtggcaggcaggggtggtagtagtagtgaatgacacagatttgccagatgacatgtagcggacctctgcatcagccaagaggaattaagctttgtcactccccactgggactacctttctcctggtatgtgcgcaaggaattcatatgctgctgctgctgcagccaccagagcagagagccttgagtacactttgccacagaaagcagtgagcaagaatgatagctgtctcttttaaatgccgttgtcaaattctgaggcgacttactaaagatgagagtccctacactaaatccgccagccagacaaagccgcctgatggagcgttggctgtgaggagacagagcatcccagaggaattcaagggctccacagtcgtcgagctgatgaagaaggaaggcactaccctgggtctgacggtatcgggaggaattgataaggatggcaagccaagagtatctaatctgcggcaaggaggaattgctgctagaagtgaccagctggatgtgggtgactacatcaaagcagtgaatggaatcaacctggccaaattccgccatgacgagatcatcagcttgctgaagaatgtgggagaaagagtggttcttgaagtagagtacgagcttccaccggtctctgtgcaaggatcaagtgttattttccgaacagtggaggtcacattacataaagaaggcaatacctttggttttgtaattcgagggggagcacatgatgatagaaataaatctcgtccagttgtgataacatgtgttcgtcctggagggcctgctgacagagagggcacgatcaaacccggtgacaggttgctcagtgtggatggaattcggcttcttggaactacgcatgctgaagccatgagtattcttaaacaatgtggacaagaagcagcactgctgatagaatatgatgtctcagtaatggactctgtggcaacagcatccgggccactactagtcgaagttgccaaaactcctggtgccagccttggggttgccctaactacctcgatgtgctgtaacaaacaagtcattgtcatagacaaaatcaaatctgcaagtattgcagacagatgtggcgcattgcatgtgggagatcacatcctctccatcgatggaaccagcatggagtactgtacacttgcagaagcaacccagttcctggccaacaccactgaccaggtcaagcttgagatccttccccatcatcagacccggctggccctaaaggggcccgaccatgtgaaaattcagaggagcgacaggcaacttacctgggattcctgggccagcaaccacagcagccttcacaccaaccatcactataacacgtaccaccctgaccattgcagagtaccagccctgacattcccgaaagcacctcctccaaacagccctccagctttggtgtcttcatccttctctcctacctccatgagtgcatacagcctgagttccctgaacatggggactctacctcgaagcctctactccaccagcccacgtggaaccatgatgaggaggagactgaaaaagaaagacttcaaaagctcattgtccttagcctccagcacagtaggattggctgggcaggttgttcacacagaaaccacagaggttgtgctgacggcagatcctgtcacaggatttgggatccaactgcagggcagtgtgtttgccacagaaactctctcttctccacctctgatttcctatatcgaagctgacagcccagcagagagatgtggggtgctacagattggagacagagtgatggccatcaatggaattccaacagaagacagcaccttcgaagaagccagtcagctcctccgagactcttcaatcacgagcaaggtcacactggaaatcgagtttgatgttgcagagtctgtcatcccaagtagtggaacatttcatgtaaagctgcctaagaagcacaatgtggaacttggaataaccataagttcaccatccagtagaaaaccaggagaccccctcgtcatttcagatatcaagaaagggagtgtggcacacagaactgggaccctggaacttggggataaattgctcgcaatagataatatccggctggacaactgttccatggaagatgcagttcagatcctccagcaatgtgaagacctggtgaagctcaaaatccgcaaagatgaagataattcagatgagcaagaaagttccggagcaattatttacaccgtggagcttaaacgctacggggggccccttggcatcacaatttcaggaactgaagagccgtttgatcctataatcatttcaagcctcactaaagggggattagctgaaagaactggcgcaatccacataggagaccgaatcctagccatcaatagcagcagcttgaaagggaagcctctgagtgaagccatccatttgttacagatggcaggagagactgtcaccttgaaaattaagaaacagacagatgcccagtcagcatcgagccccaagaagttccctatttctagccatttgagtgacctgggggatgtggaggaggactcctcaccagcacagaagccaggcaagctctccgacatgtacccctccacggtgcccagtgtggacagtgctgtggattcatgggatgggtctgcaatagacaccagctatggaactcaaggcactagttttcaggcctcaggatacaatttcaacacctatgactggaggagtccaaaacagagaggcagcttgtccccagtcactaagcctcgaagccagacttacccagatgtggggctgagttatgaagactgggaccggtccacagccagtggttttgcaggggctgccgatagtgcagagacagaacaagaggagaacttctggtctcaagcgctggaggatttggaaacctgcggacagtcaggaattctgagagaactggaggcaacaatcatgtcggggagcacgatgagtttgaatcatgaggctccaacacctcgcagtcagctggggcgacaggccagcttccaggagcgcagcagctcgcggccgcactacagccaaacaactcggagcaacaccctgccttcagatgtgggtaggaagtcagtaaccctgagaaaaatgaaacaagaaataaaggagatcatgtctccaactcctgtggagctgcacaaggtgaccttgtacaaggactctgacatggaggactttgggttcagtgtagcagatggcttactggagaaaggagtgtatgtcaaaaatattcgcccagctgggccaggagatcttggtggcttaaagccctatgacaggctcttacaggtgaatcatgtccgaaccagagactttgactgctgccttgttgtgcccctcatagcagaatccgggaataagctggacctggttattagtagaaacccactggcttcacagaagtctatagaccaacagagtctaccaggagattggagtgaacagaacagtgcttttttccagcagcctagccacggtggtaatttggagacacgagaacccactaatacattatagcaacgctttttataaagcaggacaaaagacaatatctacatggtgctaaaaatcctttaagatttctgtgacctttgaagcacagataatcaatcaacgtggcattaactgcaagcacaggggtcttttaaatctctctcatggctcatgttcacttcccttttcaagttgaagaggtttcttttttggtgaccactatggtatatggtgggcaatgccctgccagtcccaacggtagagaaaaataggccgtcccccacaactctacaattaacatcagaggaaattttttacaagttcatcttactatcactttttaaaaagagaaacatctgtttgaaaatattctctgtgatgatttccttaattcactttgaaatcagtttcttactatgaagtcattaatgtaagaacttggccaacaaagcttttcttctcataggctggctctactaggggaactagtgtttggtaaactgctgggactaccacaatgggaggggtacaggtataaaattaagttatcttaaaatgtttcagcaatgatgcacgtaggagaccataataggtggtggtaaatgttttgcccacgtataggaatgattttaactaagatgtatgctattccctatgcaacaaattatcaaacaggatatgtcttgtgacctgttttttttttaaggacacatttttaatagctgaaaatctctgataatgaattagagtgtgtagtaaacatgagaattagttatattatcttatttttaaaattcaagactaagaacttcagagaatgaagagtctattaaaatgaggttcatcttaatgataggcaaaccaaactcatactgcttgacatgttttgaaaactggtaatattgagggtgtacagcacatgtacttaaaaatgacactggactatcttttgctctgagccatgccacttaccgaaattgtaaatacatttttcacaaatgcattgccaattattaccatccctcaaagcaataaattgtgacagttgctttaaatgtttgtcagcaactgttttcatttgttcagatattttgaatagctacactaataactgttattatttggtgaacataaaaaaataaatagatctgtatattgatggtagactctccatattgaaatgattattttccaaacattttcattttggtcaataattcaaactaccacttaggcaaagtattcgaacactgtgtcctttgtttaaggaaatataaaaaaaaaatcacctttctttttgtgcaaaaaaaatattatttcaatcacatttcagaaccgccagggcaagaaagtataaagcaggatcatgttaagaaaaaagaaaaaaagatcatgagtcacttaaatatgtatttttatttgtaacaaacaagtattaaactgtaaagtatttttgtacaaatttaatactttaatagcatggtatttatcgtctatgtatggttttggggaattcaaaattgttcaaatatttgtatggaaaaaaataaaaccctctaccaaatggaataaacagtgattttaaaaagccaaataaagaggatatgcatta

SEQ ID NO: 12244 - DNA, 5216 bp, Homo sapiens
  source 1..5216: mol_type = unassigned DNA
gtgattgtgaagggggaggaggctgtggcaggcaggggtggtagtagtagtgaatgacacagatttgccagatgacatgtagcggacctctgcatcagccaagaggaattaagctttgtcactccccactgggactacctttctcctggtatgtgcgcaaggaattcatatgctgctgctgctgcagccaccagagcagagagccttgagtacactttgccacagaaagcagtgagcaagaatgatagctgtctcttttaaatgccgttgtcaaattctgaggcgacttactaaagatgagagtccctacactaaatccgccagccagacaaagccgcctgatggagcgttggctgtgaggagacagagcatcccagaggaattcaagggctccacagtcgtcgagctgatgaagaaggaaggcactaccctgggtctgacggtatcgggaggaattgataaggatggcaagccaagagtatctaatctgcggcaaggaggaattgctgctagaagtgaccagctggatgtgggtgactacatcaaagcagtgaatggaatcaacctggccaaattccgccatgacgagatcatcagcttgctgaagaatgtgggagaaagagtggttcttgaagtagagtacgagcttccaccggtctctgtgcaaggatcaagtgttattttccgaacagtggaggtcacattacataaagaaggcaatacctttggttttgtaattcgagggggagcacatgatgatagaaataaatctcgtccagttgtgataacatgtgttcgtcctggagggcctgctgacagagagggcacgatcaaacccggtgacaggttgctcagtgtggatggaattcggcttcttggaactacgcatgctgaagccatgagtattcttaaacaatgtggacaagaagcagcactgctgatagaatatgatgtctcagtaatggactctgtggcaacagcatccgggccactactagtcgaagttgccaaaactcctggtgccagccttggggttgccctaactacctcgatgtgctgtaacaaacaagtcattgtcatagacaaaatcaaatctgcaagtattgcagacagatgtggcgcattgcatgtgggagatcacatcctctccatcgatggaaccagcatggagtactgtacacttgcagaagcaacccagttcctggccaacaccactgaccaggtcaagcttgagatccttccccatcatcagacccggctggccctaaaggggcccgaccatgtgaaaattcagaggagcgacaggcaacttacctgggattcctgggccagcaaccacagcagccttcacaccaaccatcactataacacgtaccaccctgaccattgcagagtaccagccctgacattcccgaaagcacctcctccaaacagccctccagctttggtgtcttcatccttctctcctacctccatgagtgcatacagcctgagttccctgaacatggggactctacctcgaagcctctactccaccagcccacgtggaaccatgatgaggaggagactgaaaaagaaagacttcaaaagctcattgtccttagcctccagcacagtaggattggctgggcaggttgttcacacagaaaccacagaggttgtgctgacggcagatcctgtcacaggatttgggatccaactgcagggcagtgtgtttgccacagaaactctctcttctccacctctgatttcctatatcgaagctgacagcccagcagagagatgtggggtgctacagattggagacagagtgatggccatcaatggaattccaacagaagacagcaccttcgaagaagccagtcagctcctccgagactcttcaatcacgagcaaggtcacactggaaatcgagtttgatgttgcagagtctgtcatcccaagtagtggaacatttcatgtaaagctgcctaagaagcacaatgtggaacttggaataaccataagttcaccatccagtagaaaaccaggagaccccctcgtcatttcagatatcaagaaagggagtgtggcacacagaactgggaccctggaacttggggataaattgctcgcaatagataatatccggctggacaactgttccatggaagatgcagttcagatcctccagcaatgtgaagacctggtgaagctcaaaatccgcaaagatgaagataattcagatgagcaagaaagttccggagcaattatttacaccgtggagcttaaacgctacggggggccccttggcatcacaatttcaggaactgaagagccgtttgatcctataatcatttcaagcctcactaaagggggattagctgaaagaactggcgcaatccacataggagaccgaatcctagccatcaatagcagcagcttgaaagggaagcctctgagtgaagccatccatttgttacagatggcaggagagactgtcaccttgaaaattaagaaacagacagatgcccagtcagcatcgagccccaagaagttccctatttctagccatttgagtgacctgggggatgtggaggaggactcctcaccagcacagaagccaggcaagctctccgacatgtacccctccacggtgcccagtgtggacagtgctgtggattcatgggatgggtctgcaatagacaccagctatggaactcaaggcactagttttcaggcctcaggatacaatttcaacacctatgactggaggagtccaaaacagagaggcagcttgtccccagtcactaagcctcgaagccagacttacccagatgtggggctgagttatgaagactgggaccggtccacagccagtggttttgcaggggctgccgatagtgcagagacagaacaagaggagaacttctggtctcaagcgctggaggatttggaaacctgcggacagtcaggaattctgagagaactggaggagaaagctgacaggcgtgtgtctttgagaaacatgactctcttggcaacaatcatgtcggggagcacgatgagtttgaatcatgaggctccaacacctcgcagtcagctggggcgacaggccagcttccaggagcgcagcagctcgcggccgcactacagccaaacaactcggagcaacaccctgccttcagatgtgggtaggaagtcagtaaccctgagaaaaatgaaacaagaaataaaggagatcatgtctccaactcctgtggagctgcacaaggtgaccttgtacaaggactctgacatggaggactttgggttcagtgtagcagatggcttactggagaaaggagtgtatgtcaaaaatattcgcccagctgggccaggagatcttggtggcttaaagccctatgacaggctcttacaggtgaatcatgtccgaaccagagactttgactgctgccttgttgtgcccctcatagcagaatccgggaataagctggacctggttattagtagaaacccactggcttcacagaagtctatagaccaacagagtctaccaggagattggagtgaacagaacagtgcttttttccagcagcctagccacggtggtaatttggagacacgagaacccactaatacattatagcaacgctttttataaagcaggacaaaagacaatatctacatggtgctaaaaatcctttaagatttctgtgacctttgaagcacagataatcaatcaacgtggcattaactgcaagcacaggggtcttttaaatctctctcatggctcatgttcacttcccttttcaagttgaagaggtttcttttttggtgaccactatggtatatggtgggcaatgccctgccagtcccaacggtagagaaaaataggccgtcccccacaactctacaattaacatcagaggaaattttttacaagttcatcttactatcactttttaaaaagagaaacatctgtttgaaaatattctctgtgatgatttccttaattcactttgaaatcagtttcttactatgaagtcattaatgtaagaacttggccaacaaagcttttcttctcataggctggctctactaggggaactagtgtttggtaaactgctgggactaccacaatgggaggggtacaggtataaaattaagttatcttaaaatgtttcagcaatgatgcacgtaggagaccataataggtggtggtaaatgttttgcccacgtataggaatgattttaactaagatgtatgctattccctatgcaacaaattatcaaacaggatatgtcttgtgacctgttttttttttaaggacacatttttaatagctgaaaatctctgataatgaattagagtgtgtagtaaacatgagaattagttatattatcttatttttaaaattcaagactaagaacttcagagaatgaagagtctattaaaatgaggttcatcttaatgataggcaaaccaaactcatactgcttgacatgttttgaaaactggtaatattgagggtgtacagcacatgtacttaaaaatgacactggactatcttttgctctgagccatgccacttaccgaaattgtaaatacatttttcacaaatgcattgccaattattaccatccctcaaagcaataaattgtgacagttgctttaaatgtttgtcagcaactgttttcatttgttcagatattttgaatagctacactaataactgttattatttggtgaacataaaaaaataaatagatctgtatattgatggtagactctccatattgaaatgattattttccaaacattttcattttggtcaataattcaaactaccacttaggcaaagtattcgaacactgtgtcctttgtttaaggaaatataaaaaaaaaatcacctttctttttgtgcaaaaaaaatattatttcaatcacatttcagaaccgccagggcaagaaagtataaagcaggatcatgttaagaaaaaagaaaaaaagatcatgagtcacttaaatatgtatttttatttgtaacaaacaagtattaaactgtaaagtatttttgtacaaatttaatactttaatagcatggtatttatcgtctatgtatggttttggggaattcaaaattgttcaaatatttgtatggaaaaaaataaaaccctctaccaaatggaataaacagtgattttaaaaagccaaataaagaggatatgcatta

SEQ ID NO: 12245 - DNA, 4888 bp, Homo sapiens
  source 1..4888: mol_type = unassigned DNA
ctgctgctgctgcagccaccagagcagagagccttgagtacactttgccacagaaagcagtgagcaagaatgatagctgtctcttttaaatgccgttgtcaaattctgaggcgacttactaaagatgagagtccctacactaaatccgccagccagacaaagccgcctgatggagcgttggctgtgaggagacagagcatcccagaggaattcaagggctccacagtcgtcgagctgatgaagaaggaaggcactaccctgggtctgacggtatcgggaggaattgataaggatggcaagccaagagtatctaatctgcggcaaggaggaattgctgctagaagtgaccagctggatgtgggtgactacatcaaagcagtgaatggaatcaacctggccaaattccgccatgacgagatcatcagcttgctgaagaatgtgggagaaagagtggttcttgaagtagagtacgagcttccaccggtctctgtgcaaggatcaagtgttattttccgaacagtggaggtcacattacataaagaaggcaatacctttggttttgtaattcgagggggagcacatgatgatagaaataaatctcgtccagttgtgataacatgtgttcgtcctggagggcctgctgacagagagggcacgatcaaacccggtgacaggttgctcagtgtggatggaattcggcttcttggaactacgcatgctgaagccatgagtattcttaaacaatgtggacaagaagcagcactgctgatagaatatgatgtctcagtaatggactctgtggcaacagcatccgggccactactagtcgaagttgccaaaactcctggtgccagccttggggttgccctaactacctcgatgtgctgtaacaaacaagtcattgtcatagacaaaatcaaatctgcaagtattgcagacagatgtggcgcattgcatgtgggagatcacatcctctccatcgatggaaccagcatggagtactgtacacttgcagaagcaacccagttcctggccaacaccactgaccaggtcaagcttgagatccttccccatcatcagacccggctggccctaaaggggcccgaccatgcagctttggtgtcttcatccttctctcctacctccatgagtgcatacagcctgagttccctgaacatggggactctacctcgaagcctctactccaccagcccacgtggaaccatgatgaggaggagactgaaaaagaaagacttcaaaagctcattgtccttagcctccagcacagtaggattggctgggcaggttgttcacacagaaaccacagaggttgtgctgacggcagatcctgtcacaggatttgggatccaactgcagggcagtgtgtttgccacagaaactctctcttctccacctctgatttcctatatcgaagctgacagcccagcagagagatgtggggtgctacagattggagacagagtgatggccatcaatggaattccaacagaagacagcaccttcgaagaagccagtcagctcctccgagactcttcaatcacgagcaaggtcacactggaaatcgagtttgatgttgcagagtctgtcatcccaagtagtggaacatttcatgtaaagctgcctaagaagcacaatgtggaacttggaataaccataagttcaccatccagtagaaaaccaggagaccccctcgtcatttcagatatcaagaaagggagtgtggcacacagaactgggaccctggaacttggggataaattgctcgcaatagataatatccggctggacaactgttccatggaagatgcagttcagatcctccagcaatgtgaagacctggtgaagctcaaaatccgcaaagatgaagataattcagatgagcaagaaagttccggagcaattatttacaccgtggagcttaaacgctacggggggccccttggcatcacaatttcaggaactgaagagccgtttgatcctataatcatttcaagcctcactaaagggggattagctgaaagaactggcgcaatccacataggagaccgaatcctagccatcaatagcagcagcttgaaagggaagcctctgagtgaagccatccatttgttacagatggcaggagagactgtcaccttgaaaattaagaaacagacagatgcccagtcagcatcgagccccaagaagttccctatttctagccatttgagtgacctgggggatgtggaggaggactcctcaccagcacagaagccaggcaagctctccgacatgtacccctccacggtgcccagtgtggacagtgctgtggattcatgggatgggtctgcaatagacaccagctatggaactcaaggcactagttttcaggcctcaggatacaatttcaacacctatgactggaggagtccaaaacagagaggcagcttgtccccagtcactaagcctcgaagccagacttacccagatgtggggctgagttatgaagactgggaccggtccacagccagtggttttgcaggggctgccgatagtgcagagacagaacaagaggagaacttctggtctcaagcgctggaggatttggaaacctgcggacagtcaggaattctgagagaactggaggagaaagctgacaggcgtgtgtctttgagaaacatgactctcttggcaacaatcatgtcggggagcacgatgagtttgaatcatgaggctccaacacctcgcagtcagctggggcgacaggccagcttccaggagcgcagcagctcgcggccgcactacagccaaacaactcggagcaacaccctgccttcagatgtgggtaggaagtcagtaaccctgagaaaaatgaaacaagaaataaaggagatcatgtctccaactcctgtggagctgcacaaggtgaccttgtacaaggactctgacatggaggactttgggttcagtgtagcagatggcttactggagaaaggagtgtatgtcaaaaatattcgcccagctgggccaggagatcttggtggcttaaagccctatgacaggctcttacaggtgaatcatgtccgaaccagagactttgactgctgccttgttgtgcccctcatagcagaatccgggaataagctggacctggttattagtagaaacccactggcttcacagaagtctatagaccaacagagtctaccaggagattggagtgaacagaacagtgcttttttccagcagcctagccacggtggtaatttggagacacgagaacccactaatacattatagcaacgctttttataaagcaggacaaaagacaatatctacatggtgctaaaaatcctttaagatttctgtgacctttgaagcacagataatcaatcaacgtggcattaactgcaagcacaggggtcttttaaatctctctcatggctcatgttcacttcccttttcaagttgaagaggtttcttttttggtgaccactatggtatatggtgggcaatgccctgccagtcccaacggtagagaaaaataggccgtcccccacaactctacaattaacatcagaggaaattttttacaagttcatcttactatcactttttaaaaagagaaacatctgtttgaaaatattctctgtgatgatttccttaattcactttgaaatcagtttcttactatgaagtcattaatgtaagaacttggccaacaaagcttttcttctcataggctggctctactaggggaactagtgtttggtaaactgctgggactaccacaatgggaggggtacaggtataaaattaagttatcttaaaatgtttcagcaatgatgcacgtaggagaccataataggtggtggtaaatgttttgcccacgtataggaatgattttaactaagatgtatgctattccctatgcaacaaattatcaaacaggatatgtcttgtgacctgttttttttttaaggacacatttttaatagctgaaaatctctgataatgaattagagtgtgtagtaaacatgagaattagttatattatcttatttttaaaattcaagactaagaacttcagagaatgaagagtctattaaaatgaggttcatcttaatgataggcaaaccaaactcatactgcttgacatgttttgaaaactggtaatattgagggtgtacagcacatgtacttaaaaatgacactggactatcttttgctctgagccatgccacttaccgaaattgtaaatacatttttcacaaatgcattgccaattattaccatccctcaaagcaataaattgtgacagttgctttaaatgtttgtcagcaactgttttcatttgttcagatattttgaatagctacactaataactgttattatttggtgaacataaaaaaataaatagatctgtatattgatggtagactctccatattgaaatgattattttccaaacattttcattttggtcaataattcaaactaccacttaggcaaagtattcgaacactgtgtcctttgtttaaggaaatataaaaaaaaaatcacctttctttttgtgcaaaaaaaatattatttcaatcacatttcagaaccgccagggcaagaaagtataaagcaggatcatgttaagaaaaaagaaaaaaagatcatgagtcacttaaatatgtatttttatttgtaacaaacaagtattaaactgtaaagtatttttgtacaaatttaatactttaatagcatggtatttatcgtctatgtatggttttggggaattcaaaattgttcaaatatttgtatggaaaaaaataaaaccctctaccaaatggaataaacagtgattttaaaaagccaaataaagaggatatgcatta

SEQ ID NO: 12246 - DNA, 5260 bp, Homo sapiens
  source 1..5260: mol_type = unassigned DNA
gtgtgtgcgcgcgcgcgtgagtgagagaggagagagggagaagagagcgcgagagagggggggctatttcctaggggcgccgatcaagaatacagtgcatttcgagtagggatggttcagttttccacttcggagttcagactgacaccccacatcgacaatttggaggtggcaaacagcttcgcagtcactaatgctttctgctcccagttttcgagaggagtctatgctatttttggattttatgacaagaagtctgtaaataccatcacatcattttgcggaacactccacgtctccttcatcactcccagcttcccaacagatggcacacatccatttgtcattcagatgagacccgacctcaaaggagctctccttagcttgattgaatactatcaatgggacaagtttgcatacctctatgacagtgacagaggcttatcaacactgcaagctgtgctggattctgctgctgaaaagaaatggcaagtgactgctatcaatgtgggaaacattaacaatgacaagaaagatgagatgtaccgatcactttttcaagatctggagttaaaaaaggaacggcgtgtaattctggactgtgaaagggataaagtaaacgacattgtagaccaggttattaccattggaaaacatgttaaagggtaccactacatcattgcaaatctgggatttactgatggagacctattaaaaatccagtttggaggtgcaaatgtctctggatttcagatagtggactatgatgattcgttggtatctaaatttatagaaagatggtcaacactggaagaaaaagaataccctggagctcacacaacaacaattaagtatacttctgctctgacctatgatgccgttcaagtgatgactgaagccttccgcaacctaaggaagcaaagaattgaaatctcccgaagggggaatgcaggagactgtctggcaaacccagcagtgccctggggacaaggtgtagaaatagaaagggccctcaaacaggttcaggttgaaggtctctcaggaaatataaagtttgaccagaatggaaaaagaataaactatacaattaacatcatggagctcaaaactaatgggccccggaagattggctactggagtgaagtggacaaaatggttgttacccttactgagctcccttctggaaatgacacctctgggcttgagaataagactgttgttgtcaccacaattttggaatctccgtatgttatgatgaagaaaaatcatgaaatgcttgaaggcaatgagcgctatgagggctactgtgttgacctggctgcagaaatcgccaaacattgtgggttcaagtacaagttgacaattgttggtgatggcaagtatggggccagggatgcagacacgaaaatttggaatgggatggttggagaacttgtatatgggaaagctgatattgcaattgctccattaactattacccttgtgagagaagaggtgattgacttctcaaagcccttcatgagcctcgggatatctatcatgatcaagaagcctcagaagtccaaaccaggagtgttttcctttcttgatcctttagcctatgagatctggatgtgcattgtttttgcctacattggggtcagtgtagttttattcctggtcagcagatttagcccctacgagtggcacactgaggagtttgaagatggaagagaaacacaaagtagtgaatcaactaatgaatttgggatttttaatagtctctggttttccttgggtgcctttatgcagcaaggatgcgatatttcgccaagatccctctctgggcgcattgttggaggtgtgtggtggttctttaccctgatcataatctcctcctacacggctaacttagctgccttcctgactgtagagaggatggtgtctcccatcgaaagtgctgaggatctttctaagcaaacagaaattgcttatggaacattagactctggctccactaaagagtttttcaggagatctaaaattgcagtgtttgataaaatgtggacctacatgcggagtgcggagccctctgtgtttgtgaggactacggccgaaggggtggctagagtgcggaagtccaaagggaaatatgcctacttgttggagtccacgatgaacgagtacattgagcaaaggaagccttgcgacaccatgaaagttggtggaaacctggattccaaaggctatggcatcgcaacacctaaaggatcctcattaagaaccccagtaaatcttgcagtattgaaactcagtgagcaaggcgtcttagacaagctgaaaaacaaatggtggtacgataaaggtgaatgtggagccaaggactctggaagtaaggaaaagaccagtgccctcagtctgagcaacgttgctggagtattctacatccttgtcgggggccttggtttggcaatgctggtggctttgattgagttctgttacaagtcaagggccgaggcgaaacgaatgaaggtggcaaagaatgcacagaatattaacccatcttcctcgcagaattcacagaattttgcaacttataaggaaggttacaacgtatatggcatcgaaagtgttaaaatttaggggatgaccttgaatgatgccatgaggaacaaggcaaggctgtcaattacaggaagtactggagaaaatggacgtgttatgactccagaatttcccaaagcagtgcatgctgtcccttacgtgagtcctggcatgggaatgaatgtcagtgtgactgatctctcgtgattgataagaaccttttgagtgccttacacaatggttttcttgtgtgtttattgtcaaagtggtgagaggcatccagtatcttgaagacttttctttcagccaagaattcttaaatatgtggagttcatcttgaattgtaaggaatgattaattaaaacacaacatctttttctactcgagttacagacaaagcgtggtggacatgcacagctaacatggaagtactataatttacctgaagtctttgtacagacaacaaacctgtttctgcagccactattgttagtctcttgattcataatgacttaagcacacttgacatcaactgcatcaagatgtgacatgttttataaaaaaaggaaaaaaaacatttaaaactaaaaaatatttttaggtattttcacaaacaaactggcttttaaataaatttgcttccatattggttgaataagacaaaaacaattaaactgagtgggaagtgaataaaaaaaggctttaggtatcgattccatatttttcaaagccaaatatgtaaatgctaaggaaagtaaacaaagaggagattccaatcttgtaatttaatattgttattaaaactttaatgtatcctattctttaacatttggtgttaatataaaattacttggcaatgcttgacatttgaaataaacatttttctattgttttattgcaagtggtccaattaattttgcttagctacagtttggtcataaatcaagtgagtttaaagacactaccaagttgttaggtgcccagagaaaatttctcccttttaaaaaggccaggtgatttttcaaatgtaatcttgcccccaaagtaatatctgaatatctttttgacatgtctaaatatatatatatataaagaaatatttgttaacacaaaagcatttgatctatgtagataaatgctaatagatttaaaaagctaatattaacaaataccagaatacgtgaagttccatttttaaagtgtttgagcttacagaagagaaacattcattttaaatgaagtaaaaaatgccttgaaagtaattctttagatagttgcccattgattaaattccaaaaactaaatatgtttttagctttaaaattataaaagctgtcataaactttatatattatgaattttaaaatatgtttgagtctcctgcaatatagtttcatcccattgacatcaattaaaaataaccctaatatattatttttatatttattcctcaggtggaatggctattttaatatgcccagtgtggataaaatgtcacatttctgtaacttttgactaaagagcctatatttatctagttaatgaatttaaaggatctatctttcccttcataaaatacctcttatttccattaaagccccccaagtttaattaatttaggattttgaatgattattgacatccaatagttatttttaatatttgtattcttgttatttctggaagaaagcctttgtgtagcacttggtattttgcaaagtgcttttaaaacattcttacttaccgtatttcatagaagggaaggaaaaatgtaaggtttaacagtaagcacttgcattgaacatggaggcatgtggtatcatgatattcttcactaaatttagctgtccctaatcacagatcctaaggtaatataatataattttagtgcatttctcctcatcaggaatgctggaggtgcattttaagttttaataataagtgctagaatgaccaaattgcagactaattgtttccatattgtacttaaaatgagtttttaaaagtgaaaaagaaatgactatatacaatcaatgctatttattgtacctctgggcctactcttctaaaaattgtagcttatcgatttttctctgtcaagcttgaactaatgtaaataattgaaataatgtaaagttatattttcatgtttttatagatacaacatgacaagaatacataatgtaagagtatttcaactatggataatgttgattggataatgcacatctcagttacaagcagtactcatagtttaatatccatgtaacggtgcatcaatatattgctatataaatatgtctgtgtgcatataagtgaaaagtggtcaaacaagagtgatgacagctgtctaaaggtttttttattcattttatataaaaactgttatggaaagaccaaaatgtttatgaactattcttatgtaaatttacaattgtcctttactgtacttttttgtttacagtatagtaccttattttctgctgtgttaagtgggtgtcaaactccaagaagacatacactttctataacttctattgaagatattggaatttccaatttttcatgtgtactatgtcagaaaatgctttcgattttatttttaaatctaacatcggatggcttttccggagtgttgtaaaaacttcaatcatacataaaacatgttcttacaaaa

SEQ ID NO: 12247 - DNA, 3940 bp, Homo sapiens
  source 1..3940: mol_type = unassigned DNA
gagcccatgagcaccatgcgcctgctgacgctcgccctgctgttctcctgctccgtcgcccgtgccgcgtgcgaccccaagatcgtcaacattggcgcggtgctgagcacgcggaagcacgagcagatgttccgcgaggccgtgaaccaggccaacaagcggcacggctcctggaagattcagctcaatgccacctccgtcacgcacaagcccaacgccatccagatggctctgtcggtgtgcgaggacctcatctccagccaggtctacgccatcctagttagccatccacctacccccaacgaccacttcactcccacccctgtctcctacacagccggcttctaccgcatacccgtgctggggctgaccacccgcatgtccatctactcggacaagagcatccacctgagcttcctgcgcaccgtgccgccctactcccaccagtccagcgtgtggtttgagatgatgcgtgtctacagctggaaccacatcatcctgctggtcagcgacgaccacgagggccgggcggctcagaaacgcctggagacgctgctggaggagcgtgagtccaaggcagagaaggtgctgcagtttgacccagggaccaagaacgtgacggccctgctgatggaggcgaaagagctggaggcccgggtcatcatcctttctgccagcgaggacgatgctgccactgtataccgcgcagccgcgatgctgaacatgacgggctccgggtacgtgtggctggtcggcgagcgcgagatctcggggaacgccctgcgctacgccccagacggcatcctcgggctgcagctcatcaacggcaagaacgagtcggcccacatcagcgacgccgtgggcgtggtggcccaggccgtgcacgagctcctcgagaaggagaacatcaccgacccgccgcggggctgcgtgggcaacaccaacatctggaagaccgggccgctcttcaagagagtgctgatgtcttccaagtatgcggatggggtgactggtcgcgtggagttcaatgaggatggggaccggaagttcgccaactacagcatcatgaacctgcagaaccgcaagctggtgcaagtgggcatctacaatggcacccacgtcatccctaatgacaggaagatcatctggccaggcggagagacagagaagcctcgagggtaccagatgtccaccagactgaagattgtgacgatccaccaggagcccttcgtgtacgtcaagcccacgctgagtgatgggacatgcaaggaggagttcacagtcaacggcgacccagtcaagaaggtgatctgcaccgggcccaacgacacgtcgccgggcagcccccgccacacggtgcctcagtgttgctacggcttttgcatcgacctgctcatcaagctggcacggaccatgaacttcacctacgaggtgcacctggtggcagatggcaagttcggcacacaggagcgggtgaacaacagcaacaagaaggagtggaatgggatgatgggcgagctgctcagcgggcaggcagacatgatcgtggcgccgctaaccataaacaacgagcgcgcgcagtacatcgagttttccaagcccttcaagtaccagggcctgactattctggtcaagaaggagattccccggagcacgctggactcgttcatgcagccgttccagagcacactgtggctgctggtggggctgtcggtgcacgtggtggccgtgatgctgtacctgctggaccgcttcagccccttcggccggttcaaggtgaacagcgaggaggaggaggaggacgcactgaccctgtcctcggccatgtggttctcctggggcgtcctgctcaactccggcatcggggaaggcgcccccagaagcttctcagcgcgcatcctgggcatggtgtgggccggctttgccatgatcatcgtggcctcctacaccgccaacctggcggccttcctggtgctggaccggccggaggagcgcatcacgggcatcaacgaccctcggctgaggaacccctcggacaagtttatctacgccacggtgaagcagagctccgtggatatctacttccggcgccaggtggagctgagcaccatgtaccggcatatggagaagcacaactacgagagtgcggcggaggccatccaggccgtgagagacaacaagctgcatgccttcatctgggactcggcggtgctggagttcgaggcctcgcagaagtgcgacctggtgacgactggagagctgtttttccgctcgggcttcggcataggcatgcgcaaagacagcccctggaagcagaacgtctccctgtccatcctcaagtcccacgagaatggcttcatggaagacctggacaagacgtgggttcggtatcaggaatgtgactcgcgcagcaacgcccctgcgacccttacttttgagaacatggccggggtcttcatgctggtagctgggggcatcgtggccgggatcttcctgattttcatcgagattgcctacaagcggcacaaggatgctcgccggaagcagatgcagctggcctttgccgccgttaacgtgtggcggaagaacctgcagagcaccgggggtggacgcggcgctttgcaaaaccaaaaagacacagtgctgccgcgacgcgctattgagagggaggagggccagctgcagctgtgttcccgtcatagggagagctgagactccccgcccgccctcctctgccccctcccccgcagacagacagacagacggacgggacagcggcccggcccacgcagagccccggagcaccacggggtcgggggaggagcacccccagcctcccccaggctgcgcctgcccgcccgccggttggccggctggccggtccaccccgtcccggccccgcgcgtgcccccagcgtggggctaacgggcgccttgtctgtgtatttctattttgcagcagtaccatcccactgatatcacgggcccgctcaacctctcagatccctcggtcagcaccgtggtgtgaggcccccggaggcgcccacctgcccagttagcccggccaaggacactgatgggtcctgctgctcgggaaggcctgagggaagcccacccgccccagagactgcccaccctgggcctcccgtccgtccgcccgcccaccccgctgcctggcgggcagcccctgctggaccaaggtgcggaccggagcggctgaggacggggcagagctgagtcggctgggcagggccgcagggcgctccggcagaggcagggccctggggtctctgagcagtggggagcgggggctaactggccccaggcggaggggcttggagcagagacggcagccccatccttcccgcagcaccagcctgagccacagtggggcccatggccccagctggctgggtcgcccctcctcgggcgcctgcgctcctctgcagcctgagctccaccctcccctcttcttgcggcaccgcccacccacaccccgtctgccccttgaccccacacgccggggctggccctgccctcccccacggccgtccctgacttcccagctggcagcgcctcccgccgcctcgggccgcctcctccagactcgagagggctgagcccctcctctcctcgtccggcctgcagcccagaacgggcctccccgggggtccccggacgctggctcgggactgtcttcaaccctgccctgcaccttgggcacgggagagcgccacccgcccgcccccgccctcgctccgggtgcgtgaccggcccgccaccttgtacagaaccagcactcccagggcccgagcgcgtgccttccccgtgcggcccgtgcgcagccgcgctctgcccctccgtccccagggtgcaggcgcgcaccgcccaacccccacctcccggtgtatgcagtggtgatgcctaaaggaatgtcacgc

SEQ ID NO: 12248 - DNA, 3577 bp, Homo sapiens
  source 1..3577: mol_type = unassigned DNA
gagcccatgagcaccatgcgcctgctgacgctcgccctgctgttctcctgctccgtcgcccgtgccgcgtgcgaccccaagatcgtcaacattggcgcggtgctgagcacgcggaagcacgagcagatgttccgcgaggccgtgaaccaggccaacaagcggcacggctcctggaagattcagctcaatgccacctccgtcacgcacaagcccaacgccatccagatggctctgtcggtgtgcgaggacctcatctccagccaggtctacgccatcctagttagccatccacctacccccaacgaccacttcactcccacccctgtctcctacacagccggcttctaccgcatacccgtgctggggctgaccacccgcatgtccatctactcggacaagagcatccacctgagcttcctgcgcaccgtgccgccctactcccaccagtccagcgtgtggtttgagatgatgcgtgtctacagctggaaccacatcatcctgctggtcagcgacgaccacgagggccgggcggctcagaaacgcctggagacgctgctggaggagcgtgagtccaaggcagagaaggtgctgcagtttgacccagggaccaagaacgtgacggccctgctgatggaggcgaaagagctggaggcccgggtcatcatcctttctgccagcgaggacgatgctgccactgtataccgcgcagccgcgatgctgaacatgacgggctccgggtacgtgtggctggtcggcgagcgcgagatctcggggaacgccctgcgctacgccccagacggcatcctcgggctgcagctcatcaacggcaagaacgagtcggcccacatcagcgacgccgtgggcgtggtggcccaggccgtgcacgagctcctcgagaaggagaacatcaccgacccgccgcggggctgcgtgggcaacaccaacatctggaagaccgggccgctcttcaagagagtgctgatgtcttccaagtatgcggatggggtgactggtcgcgtggagttcaatgaggatggggaccggaagttcgccaactacagcatcatgaacctgcagaaccgcaagctggtgcaagtgggcatctacaatggcacccacgtcatccctaatgacaggaagatcatctggccaggcggagagacagagaagcctcgagggtaccagatgtccaccagactgaagattgtgacgatccaccaggagcccttcgtgtacgtcaagcccacgctgagtgatgggacatgcaaggaggagttcacagtcaacggcgacccagtcaagaaggtgatctgcaccgggcccaacgacacgtcgccgggcagcccccgccacacggtgcctcagtgttgctacggcttttgcatcgacctgctcatcaagctggcacggaccatgaacttcacctacgaggtgcacctggtggcagatggcaagttcggcacacaggagcgggtgaacaacagcaacaagaaggagtggaatgggatgatgggcgagctgctcagcgggcaggcagacatgatcgtggcgccgctaaccataaacaacgagcgcgcgcagtacatcgagttttccaagcccttcaagtaccagggcctgactattctggtcaagaaggagattccccggagcacgctggactcgttcatgcagccgttccagagcacactgtggctgctggtggggctgtcggtgcacgtggtggccgtgatgctgtacctgctggaccgcttcagccccttcggccggttcaaggtgaacagcgaggaggaggaggaggacgcactgaccctgtcctcggccatgtggttctcctggggcgtcctgctcaactccggcatcggggaaggcgcccccagaagcttctcagcgcgcatcctgggcatggtgtgggccggctttgccatgatcatcgtggcctcctacaccgccaacctggcggccttcctggtgctggaccggccggaggagcgcatcacgggcatcaacgaccctcggctgaggaacccctcggacaagtttatctacgccacggtgaagcagagctccgtggatatctacttccggcgccaggtggagctgagcaccatgtaccggcatatggagaagcacaactacgagagtgcggcggaggccatccaggccgtgagagacaacaagctgcatgccttcatctgggactcggcggtgctggagttcgaggcctcgcagaagtgcgacctggtgacgactggagagctgtttttccgctcgggcttcggcataggcatgcgcaaagacagcccctggaagcagaacgtctccctgtccatcctcaagtcccacgagaatggcttcatggaagacctggacaagacgtgggttcggtatcaggaatgtgactcgcgcagcaacgcccctgcgacccttacttttgagaacatggccggggtcttcatgctggtagctgggggcatcgtggccgggatcttcctgattttcatcgagattgcctacaagcggcacaaggatgctcgccggaagcagatgcagctggcctttgccgccgttaacgtgtggcggaagaacctgcagcagtaccatcccactgatatcacgggcccgctcaacctctcagatccctcggtcagcaccgtggtgtgaggcccccggaggcgcccacctgcccagttagcccggccaaggacactgatgggtcctgctgctcgggaaggcctgagggaagcccacccgccccagagactgcccaccctgggcctcccgtccgtccgcccgcccaccccgctgcctggcgggcagcccctgctggaccaaggtgcggaccggagcggctgaggacggggcagagctgagtcggctgggcagggccgcagggcgctccggcagaggcagggccctggggtctctgagcagtggggagcgggggctaactggccccaggcggaggggcttggagcagagacggcagccccatccttcccgcagcaccagcctgagccacagtggggcccatggccccagctggctgggtcgcccctcctcgggcgcctgcgctcctctgcagcctgagctccaccctcccctcttcttgcggcaccgcccacccacaccccgtctgccccttgaccccacacgccggggctggccctgccctcccccacggccgtccctgacttcccagctggcagcgcctcccgccgcctcgggccgcctcctccagactcgagagggctgagcccctcctctcctcgtccggcctgcagcccagaacgggcctccccgggggtccccggacgctggctcgggactgtcttcaaccctgccctgcaccttgggcacgggagagcgccacccgcccgcccccgccctcgctccgggtgcgtgaccggcccgccaccttgtacagaaccagcactcccagggcccgagcgcgtgccttccccgtgcggcccgtgcgcagccgcgctctgcccctccgtccccagggtgcaggcgcgcaccgcccaacccccacctcccggtgtatgcagtggtgatgcctaaaggaatgtcacgc

SEQ ID NO: 12249 - DNA, 4236 bp, Homo sapiens
  source 1..4236: mol_type = unassigned DNA
agtgctgggctgttggagagagcgagcagcaagccggtgagcgcgagcgcggcgcgccggccggctaacccgagagcgcgaggcgccccaggctggcaggcgccgcgggacccctcaccctctctggtcgcccctccccggattcccccaccctccgtgcctgcaggagcccctgggctttcccggaggagctcgccctgaagggcccggacctcggcgagcccaccaccgttccctccagcgccgccgccgccaccgcagcagccggagcagcatggtccagctgaggaagctgctccgcgtcctgactttgatgaagttcccctgctgcgtgctggaggtgctcctgtgcgcgctggcggcggcggcgcgcggccaggagatgtacgccccgcactcaatccggatcgagggggacgtcaccctcggggggctgttccccgtgcacgccaagggtcccagcggagtgccctgcggcgacatcaagagggaaaacgggatccacaggctggaagcgatgctctacgccctggaccagatcaacagtgatcccaacctactgcccaacgtgacgctgggcgcgcggatcctggacacttgttccagggacacttacgcgctcgaacagtcgcttactttcgtccaggcgctcatccagaaggacacctccgacgtgcgctgcaccaacggcgaaccgccggttttcgtcaagccggagaaagtagttggagtgattggggcttcggggagttcggtctccatcatggtagccaacatcctgaggctcttccagatcccccagattagttatgcatcaacggcacccgagctaagtgatgaccggcgctatgacttcttctctcgcgtggtgccacccgattccttccaagcccaggccatggtagacattgtaaaggccctaggctggaattatgtgtctaccctcgcatcggaaggaagttatggagagaaaggtgtggagtccttcacgcagatttccaaagaggcaggtggactctgcattgcccagtccgtgagaatcccccaggaacgcaaagacaggaccattgactttgatagaattatcaaacagctcctggacacccccaactccagggccgtcgtgatttttgccaacgatgaggatataaagcagatccttgcagcagccaaaagagctgaccaagttggccattttctttgggtgggatcagacagctggggatccaaaataaacccactgcaccagcatgaagatatcgcagaaggggccatcaccattcagcccaagcgagccacggtggaagggtttgatgcctactttacgtcccgtacacttgaaaacaacagaagaaatgtatggtttgccgaatactgggaggaaaacttcaactgcaagttgacgattagtgggtcaaaaaaagaagacacagatcgcaaatgcacaggacaggagagaattggaaaagattccaactatgagcaggagggtaaagtccagttcgtgattgacgcagtctatgctatggctcacgcccttcaccacatgaacaaggatctctgtgctgactaccggggtgtctgcccagagatggagcaagctggaggcaagaagttgctgaagtatatacgcaatgttaatttcaatggtagtgctggcactccagtgatgtttaacaagaacggggatgcacctgggcgttatgacatctttcagtaccagaccacaaacaccagcaacccgggttaccgtctgatcgggcagtggacagacgaacttcagctcaatatagaagacatgcagtggggtaaaggagtccgagagatacccgcctcagtgtgcacactaccatgtaagccaggacagagaaagaagacacagaaaggaactccttgctgttggacctgtgagccttgcgatggttaccagtaccagtttgatgagatgacatgccagcattgcccctatgaccagaggcccaatgaaaatcgaaccggatgccaggatattcccatcatcaaactggagtggcactccccctgggctgtgattcctgtcttcctggcaatgttggggatcattgccaccatctttgtcatggccactttcatccgctacaatgacacgcccattgtccgggcatctgggcgggaactcagctatgttcttttgacgggcatctttctttgctacatcatcactttcctgatgattgccaaaccagatgtggcagtgtgttctttccggcgagttttcttgggcttgggtatgtgcatcagttatgcagccctcttgacgaaaacaaatcggatttatcgcatatttgagcagggcaagaaatcagtaacagctcccagactcataagcccaacatcacaactggcaatcacttccagtttaatatcagttcagcttctaggggtgttcatttggtttggtgttgatccacccaacatcatcatagactatgatgaacacaagacaatgaaccctgagcaagccagaggggttctcaagtgtgacattacagatctccaaatcatttgctccttgggatatagcattcttctcatggtcacatgtactgtgtatgccatcaagactcggggtgtacccgagaattttaacgaagccaagcccattggattcactatgtacacgacatgtatagtatggcttgccttcattccaattttttttggcaccgctcaatcagcggaaaagctctacatacaaactaccacgcttacaatctccatgaacctaagtgcatcagtggcgctggggatgctatacatgccgaaagtgtacatcatcattttccaccctgaactcaatgtccagaaacggaagcgaagcttcaaggcggtagtcacagcagccaccatgtcatcgaggctgtcacacaaacccagtgacagacccaacggtgaggcaaagaccgagctctgtgaaaacgtagacccaaacaactgtataccaccagtaagaaagagtgtacaaaagtctgttacttggtacactatcccaccaacagtatagcttttgactgctttcccaaaggccctgctgcaaaaaagaagtatgtcagttataataacctggttatctaacctgttccattccatggaaccatggaggaggaagaccctcagttattttgtcacccaacctggcataggactctttggtcctacccgcttcccatcaccggaggagcttccccggccgggagaccagtgttagaggatccaagcgacctaaacagctgctttatgaaatatccttactttatctgggcttaataagtcactgacatcagcactgccaactcggctgcaattgtggaccttccctaccaaagggagtgttgaaactcaagtcccgccctggctctttagaatggaccactgagagccacaggaccgttttggggctgacctgtcttattacgtatgtacttctaggttgcaaggttttgaaattttctgtacagtttgtgaggacctttgcactttgccatctgatgtcgtacctcggttcactgtttgttttcgaatgccttgttttcatagagccctattctctcagacggtggaatatttggaaaaattttaaaacaattaaaattttaaagcaatcttggcagactaaaacaagtacatctgtacatgactgtataattacgattatagtaccactgcacatcatgtttttttttttaagacaaaaaagatgtttaaagaccaaaaactgtgctgagaaagtatgccccacctatctttggtatatgataggttacataaaaggaaggtattggctgaactgaatagaggtcttgatctttggaatgcatgccagtaatgtattttacagtacatgtttattatgttcaatatttgtatttgtgttctcttttgttatttttaattagggtatatgaatattttgcaataattttaataattattaagctgtttgaaggaaagaatatggatttttcatgtcttgaggttttgttcatgccccctttgactgatcagtgtgataaggactttaggaaaaaaagcatgtatgttttttactgtttgtaataagtactttcgttaatcttgctgcttatgtgccaatttagtggaaaaaaacaacccttgctgaaaaattccctctttccattctctttcaattctgtgatattgtccaagaatgtatcaataaaatactttggttaactt

SEQ ID NO: 12250 - DNA, 5172 bp, Homo sapiens
  source 1..5172: mol_type = unassigned DNA
agagatcctgggagcgagagggagagagagggagcaagaaaggaagagagagcgagcgagagagagcgagcgaataagagagagagtaagagggagagagaagaagaggaagaagaggaggcggcggcagcggaggaggaggaggactagtgtggggtggaaaggaagagtgagcgagagcaagttaaggggagggggtgtaagagccagcgaattctttttctttttctattattattttgacgactcctgagttgcgcccatgctcttgtcagcttcgttttaggcgtacatggccaggcagaagaaaatggggcaaagcgtgctccgggcggtcttctttttagtcctggggcttttgggtcattctcacggaggattccccaacaccatcagcataggtggacttttcatgagaaacacagtgcaggagcacagcgctttccgctttgccgtgcagttatacaacaccaaccagaacaccaccgagaagcccttccatttgaattaccacgtagatcacttggattcctccaatagtttttccgtgacaaatgctttctgctcccagttctcgagaggggtgtatgccatctttggattctatgaccagatgtcaatgaacaccctgacctccttctgtggggccctgcacacatcctttgttacgcctagcttccccactgacgcagatgtgcagtttgtcatccagatgcgcccagccttgaagggcgctattctgagtcttctgggtcattacaagtgggagaagtttgtgtacctctatgacacagaacgaggattttccatcctccaagcgattatggaagcagcagtgcaaaacaactggcaagtaacagcaaggtctgtgggaaacataaaggacgtccaagaattcaggcgcatcattgaagaaatggacaggaggcaggaaaagcgatacttgattgactgcgaagtcgaaaggattaacacaattttggaacaggttgtgatcctagggaaacactcaagaggttatcactacatgctcgctaacctgggttttactgatattttactggaaagagtcatgcatgggggagccaacattacaggtttccagattgtcaacaatgaaaaccctatggttcagcagttcatacagcgctgggtgaggctggatgaaagggaattccctgaagccaagaatgcaccactaaagtatacatctgcattgacacacgacgcaatactggtcatagcagaagctttccgctacctgaggaggcagcgagtagatgtgtcccggagaggaagtgctggagactgcttagcaaatcctgctgtgccctggagtcaaggaattgatattgagagagctctgaaaatggtgcaagtacaaggaatgactggaaatattcaatttgacacttatggacgtaggacaaattataccatcgatgtgtatgaaatgaaagtcagtggctctcgaaaagctggctactggaatgagtatgaaaggtttgtgcctttctcagatcagcaaatcagcaatgacagtgcatcctcagagaatcggaccatagtagtgactaccattctggaatcaccatatgtaatgtacaagaagaaccatgagcaactggaaggaaatgaacgatatgaaggctattgtgtagacctagcctatgaaatagccaaacatgtaaggatcaaatacaaattgtccatcgttggtgacgggaaatatggtgcaagggatccagagactaaaatatggaacggcatggttggggaacttgtctatgggagagctgatatagctgttgctccactcactataacattggtccgtgaagaagtcatagatttttcaaagccattcatgagcctgggcatctccatcatgataaagaagcctcagaaatcaaaaccaggcgtattctcatttctggatcccctggcttatgaaatctggatgtgcattgtctttgcttacattggagtcagcgtagttcttttcctagtcagcaggttcagtccttatgaatggcacttggaagacaacaatgaagaacctcgtgacccacaaagtcctcctgatcctccaaatgaatttggaatatttaacagtctttggttttccttgggtgcctttatgcagcaaggatgtgatatttctccaagatcactctccgggcgcattgttggaggggtttggtggttcttcaccctgatcataatttcttcctatactgccaatctcgctgctttcctgactgtggagaggatggtttctcccatagagagtgctgaagacttagctaaacagactgaaattgcatatgggaccctggactccggttcaacaaaagaatttttcagaagatccaaaattgctgtgtacgagaaaatgtggtcttacatgaaatcagcggagccatctgtgtttaccaaaacaacagcagacggagtggcccgagtgcgaaagtccaagggaaagttcgccttcctgctggagtcaaccatgaatgagtacattgagcagagaaaaccatgtgatacgatgaaagttggtggaaatctggattccaaaggctatggtgtggcaacccctaaaggctcagcattaagaaatgctgttaacctggcagtattaaaactgaatgagcaaggcctcttggacaaattgaaaaacaaatggtggtacgacaaaggagagtgcggcagcgggggcggtgactccaaggacaagaccagcgctctgagcctgagcaatgtggcaggcgttttctatatacttgtcggaggtctggggctggccatgatggtggctttgatagaattctgttacaaatcacgggcagagtccaaacgcatgaaactcacaaagaacacccaaaactttaagcctgctcctgccaccaacactcagaattatgctacatacagagaaggctacaacgtgtatggaacagagagtgttaagatctagggatcccttcccactggaggcatgtgatgagaggaaatcaccgaaaacgtggctgcttcaaggatcctgagccagatttcactctccttggtgtcgggcatgacacgaatattgctgatggtgcaatgacctttcaataggaaaaactgatttttttttccttcagtgccttatggaacactctgagactcgcgacaatgcaaaccatcattgaaatctttttgctttgcttgaaaaaaaataattaaaataaaaaccaacaaaaatggacatgcaagattccagtatgcgaaaaaaaatcttattaagtcaattcaacaaaagccattctttgataccactgcagagtatataaacaccatgttctttaatacacacacacacacacacacacacacacacacacatttaaattccaattcagcaaagaggcccatctaagctaaaaaaattaattcttcctgattaaaaagaaaaaatctgtctcccagtgtttgggaagacggactggcatttcttctaggatctgctgaccagatgtttttggtatttcctgttggtggtgatgttctgtgcactctatttcctttcaatgttgctgaaatgtgtatatctttagaatgtaaatgcaacacttaagaaaattcaaacactttggaaaagggactaaacagtgatttctctgtgttcttgaaatggttttgtgaaaatgctttgataacttcccactcaaagaagagatttacagagctttcgaaattgactttgtgtgtagcaagggacggggcactatcaggatacctcttggtgctttcctaaaatggatcccggggctttccaaggagcctggaatttcagctcacagatctgtttttcttgcttcagtgtgcattttaagtcaatagagctgagtatctagcattgaggtgagggaaatgctgcctatactcccagatgtgtttagaatatctcagaaacaacactgtgtttagctcggctttctctgctaagtatgcctttcaagtgtacaccacggagacaggaccgcgttgcaaggcgggacagcaggttcagaccacagttctcagtctgactttactcttgctaggtctgtcctactagctgttgcctgctaccgcccatggctctccatcggactgcatgtgtccttttctagtttgcaaagactaaaatgcattcccaaacctactgctaatctgagggcctcagcatcacttccagatccttgcttggagcagtctctctattgactctctcagatcgctccactgctccatgggctatcaagtaactaactgcatacctgccgttggcatcatcagaacagtccgaagaaatagtctccactcactaattacctcctatataacgacgtatgcttcctgtagttcagtagtttgctctcatcgataacgtgcattgggaagtttccagactgcaaaaactaggagctcgcattcatttcccaagtgtgacccttagatgcttagttgactcgctgcatatttgctcttgtcttcagaaaagaaaggaagaagtatcgttccaacgaaatgtttccagaaaagtgtactataaactttcattccaaaaatggtgtcataagcaaacaactcacttgtcaaatttcaaatggtattgaacaaaaaaagaaagctgttgtgtttttgttttgttttgttttcatgaaactgtgattttcaacttatgaatgctataatgtcccagcgcgggaagctcacgctgtgtgaacatgaagttgtataaaacaaaccaaccaacctacacacaaatgttttcataggcactgtataaagaaaaatgtatgtttattaactcaaatcagtttttcagagaggaaacgtcactgagatgaagaggcgggtaaattggtttgttattttttaaaaaaaacttgcatgtttaaaaaaaagttgattgcttcaaatttctgctactaacttcaagctatgggagtttggcagtagtcacttgaggattttttttccaattcttttctttttgttgttaaagctgtacttcagtgaacagaaaaattgccaagcaaactaatggctataaaagcgtaatttgcatgtgtgggcataaactacagagcctcattgccatgaggtattgtacaaagttttaatacattttgtaaataaaattgt

SEQ ID NO: 12251 - DNA, 596 bp, Homo sapiens
  source 1..596: mol_type = unassigned DNA
agcggaggaggaggaggactagtgtggggtggaaaggaagagtgagcgagagcaagttaaggggagggggtgtaagagccagcgaattctttttctttttctattattattttgacgactcctgagttgcgcccatgctcttgtcagcttcgttttaggcgtacatggccaggcagaagaaaatggggcaaagcgtgctccgggcggtcttctttttagtcctggggcttttgggtcattctcacggaggattccccaacaccatcagcataggtggacttttcatgagaaacacagtgcaggagcacagcgctttccgctttgccgtgcagttatacaacaccaaccagaacaccaccgagaagcccttccatttgaattaccacgtagatcacttggattcctccaatagtttttccgtgacaaatgcttgtcctgctgaaagggactacctgccttggccaggaagcatcagggaaaacaattggacagctctgccgtgctgcaaagatcatgggctgctgcacctaaaatgttcaccaggtgggcgccaaaactgggcctattgtatctggggcgttacaggtgaactgtaa

SEQ ID NO: 12252 - DNA, 2739 bp, Homo sapiens
  source 1..2739: mol_type = unassigned DNA
tgacgactcctgagttgcgcccatgctcttgtcagcttcgttttaggcgtacatggccaggcagaagaaaatggggcaaagcgtgctccgggcggtcttctttttagtcctggggcttttgggtcattctcacggaggattccccaacaccatcagcataggtggacttttcatgagaaacacagtgcaggagcacagcgctttccgctttgccgtgcagttatacaacaccaaccagaacaccaccgagaagcccttccatttgaattaccacgtagatcacttggattcctccaatagtttttccgtgacaaatgctttctgctcccagttctcgagaggggtgtatgccatctttggattctatgaccagatgtcaatgaacaccctgacctccttctgtggggccctgcacacatcctttgttacgcctagcttccccactgacgcagatgtgcagtttgtcatccagatgcgcccagccttgaagggcgctattctgagtcttctgggtcattacaagtgggagaagtttgtgtacctctatgacacagaacgaggattttccatcctccaagcgattatggaagcagcagtgcaaaacaactggcaagtaacagcaaggtctgtgggaaacataaaggacgtccaagaattcaggcgcatcattgaagaaatggacaggaggcaggaaaagcgatacttgattgactgcgaagtcgaaaggattaacacaattttggaacaggttgtgatcctagggaaacactcaagaggttatcactacatgctcgctaacctgggttttactgatattttactggaaagagtcatgcatgggggagccaacattacaggtttccagattgtcaacaatgaaaaccctatggttcagcagttcatacagcgctgggtgaggctggatgaaagggaattccctgaagccaagaatgcaccactaaagtatacatctgcattgacacacgacgcaatactggtcatagcagaagctttccgctacctgaggaggcagcgagtagatgtgtcccggagaggaagtgctggagactgcttagcaaatcctgctgtgccctggagtcaaggaattgatattgagagagctctgaaaatggtgcaagtacaaggaatgactggaaatattcaatttgacacttatggacgtaggacaaattataccatcgatgtgtatgaaatgaaagtcagtggctctcgaaaagctggctactggaatgagtatgaaaggtttgtgcctttctcagatcagcaaatcagcaatgacagtgcatcctcagagaatcggaccatagtagtgactaccattctggaatcaccatatgtaatgtacaagaagaaccatgagcaactggaaggaaatgaacgatatgaaggctattgtgtagacctagcctatgaaatagccaaacatgtaaggatcaaatacaaattgtccatcgttggtgacgggaaatatggtgcaagggatccagagactaaaatatggaacggcatggttggggaacttgtctatgggagagctgatatagctgttgctccactcactataacattggtccgtgaagaagtcatagatttttcaaagccattcatgagcctgggcatctccatcatgataaagaagcctcagaaatcaaaaccaggcgtattctcatttctggatcccctggcttatgaaatctggatgtgcattgtctttgcttacattggagtcagcgtagttcttttcctagtcagcaggttcagtccttatgaatggcacttggaagacaacaatgaagaacctcgtgacccacaaagtcctcctgatcctccaaatgaatttggaatatttaacagtctttggttttccttgggtgcctttatgcagcaaggatgtgatatttctccaagatcactctccgggcgcattgttggaggggtttggtggttcttcaccctgatcataatttcttcctatactgccaatctcgctgctttcctgactgtggagaggatggtttctcccatagagagtgctgaagacttagctaaacagactgaaattgcatatgggaccctggactccggttcaacaaaagaatttttcagaagatccaaaattgctgtgtacgagaaaatgtggtcttacatgaaatcagcggagccatctgtgtttaccaaaacaacagcagacggagtggcccgagtgcgaaagtccaagggaaagttcgccttcctgctggagtcaaccatgaatgagtacattgagcagagaaaaccatgtgatacgatgaaagttggtggaaatctggattccaaaggctatggtgtggcaacccctaaaggctcagcattaagaaatgctgttaacctggcagtattaaaactgaatgagcaaggcctcttggacaaattgaaaaacaaatggtggtacgacaaaggagagtgcggcagcgggggcggtgactccaaggacaagaccagcgctctgagcctgagcaatgtggcaggcgttttctatatacttgtcggaggtctggggctggccatgatggtggctttgatagaattctgttacaaatcacgggcagagtccaaacgcatgaaactcacaaagaacacccaaaactttaagcctgctcctgccaccaacactcagaattatgctacatacagagaaggctacaacgtgtatggaacagagagtgttaagatctaggg

SEQ ID NO: 12253 - DNA, 4942 bp, Homo sapiens
  source 1..4942: mol_type = unassigned DNA
tgacgactcctgagttgcgcccatgctcttgtcagcttcgttttaggcgtacatggccaggcagaagaaaatggggcaaagcgtgctccgggcggtcttctttttagtcctggggcttttgggtcattctcacggaggattccccaacaccatcagcataggtggacttttcatgagaaacacagtgcaggagcacagcgctttccgctttgccgtgcagttatacaacaccaaccagaacaccaccgagaagcccttccatttgaattaccacgtagatcacttggattcctccaatagtttttccgtgacaaatgctttctgctcccagttctcgagaggggtgtatgccatctttggattctatgaccagatgtcaatgaacaccctgacctccttctgtggggccctgcacacatcctttgttacgcctagcttccccactgacgcagatgtgcagtttgtcatccagatgcgcccagccttgaagggcgctattctgagtcttctgggtcattacaagtgggagaagtttgtgtacctctatgacacagaacgaggattttccatcctccaagcgattatggaagcagcagtgcaaaacaactggcaagtaacagcaaggtctgtgggaaacataaaggacgtccaagaattcaggcgcatcattgaagaaatggacaggaggcaggaaaagcgatacttgattgactgcgaagtcgaaaggattaacacaattttggaacaggttgtgatcctagggaaacactcaagaggttatcactacatgctcgctaacctgggttttactgatattttactggaaagagtcatgcatgggggagccaacattacaggtttccagattgtcaacaatgaaaaccctatggttcagcagttcatacagcgctgggtgaggctggatgaaagggaattccctgaagccaagaatgcaccactaaagtatacatctgcattgacacacgacgcaatactggtcatagcagaagctttccgctacctgaggaggcagcgagtagatgtgtcccggagaggaagtgctggagactgcttagcaaatcctgctgtgccctggagtcaaggaattgatattgagagagctctgaaaatggtgcaagtacaaggaatgactggaaatattcaatttgacacttatggacgtaggacaaattataccatcgatgtgtatgaaatgaaagtcagtggctctcgaaaagctggctactggaatgagtatgaaaggtttgtgcctttctcagatcagcaaatcagcaatgacagtgcatcctcagagaatcggaccatagtagtgactaccattctggaatcaccatatgtaatgtacaagaagaaccatgagcaactggaaggaaatgaacgatatgaaggctattgtgtagacctagcctatgaaatagccaaacatgtaaggatcaaatacaaattgtccatcgttggtgacgggaaatatggtgcaagggatccagagactaaaatatggaacggcatggttggggaacttgtctatgggagagctgatatagctgttgctccactcactataacattggtccgtgaagaagtcatagatttttcaaagccattcatgagcctgggcatctccatcatgataaagaagcctcagaaatcaaaaccaggcgtattctcatttctggatcccctggcttatgaaatctggatgtgcattgtctttgcttacattggagtcagcgtagttcttttcctagtcagcaggttcagtccttatgaatggcacttggaagacaacaatgaagaacctcgtgacccacaaagtcctcctgatcctccaaatgaatttggaatatttaacagtctttggttttccttgggtgcctttatgcagcaaggatgtgatatttctccaagatcactctccgggcgcattgttggaggggtttggtggttcttcaccctgatcataatttcttcctatactgccaatctcgctgctttcctgactgtggagaggatggtttctcccatagagagtgctgaagacttagctaaacagactgaaattgcatatgggaccctggactccggttcaacaaaagaatttttcagaagatccaaaattgctgtgtacgagaaaatgtggtcttacatgaaatcagcggagccatctgtgtttaccaaaacaacagcagacggagtggcccgagtgcgaaagtccaagggaaagttcgccttcctgctggagtcaaccatgaatgagtacattgagcagagaaaaccatgtgatacgatgaaagttggtggaaatctggattccaaaggctatggtgtggcaacccctaaaggctcagcattaagaacgcctgtaaaccttgcagtattgaaactcagtgaacaaggcatcttagacaagctgaaaaacaaatggtggtacgataagggggaatgtggagccaaggactccgggagtaaggacaagaccagcgctctgagcctgagcaatgtggcaggcgttttctatatacttgtcggaggtctggggctggccatgatggtggctttgatagaattctgttacaaatcacgggcagagtccaaacgcatgaaactcacaaagaacacccaaaactttaagcctgctcctgccaccaacactcagaattatgctacatacagagaaggctacaacgtgtatggaacagagagtgttaagatctagggatcccttcccactggaggcatgtgatgagaggaaatcaccgaaaacgtggctgcttcaaggatcctgagccagatttcactctccttggtgtcgggcatgacacgaatattgctgatggtgcaatgacctttcaataggaaaaactgatttttttttccttcagtgccttatggaacactctgagactcgcgacaatgcaaaccatcattgaaatctttttgctttgcttgaaaaaaaataattaaaataaaaaccaacaaaaatggacatgcaagattccagtatgcgaaaaaaaatcttattaagtcaattcaacaaaagccattctttgataccactgcagagtatataaacaccatgttctttaatacacacacacacacacacacacacacacacacacatttaaattccaattcagcaaagaggcccatctaagctaaaaaaattaattcttcctgattaaaaagaaaaaatctgtctcccagtgtttgggaagacggactggcatttcttctaggatctgctgaccagatgtttttggtatttcctgttggtggtgatgttctgtgcactctatttcctttcaatgttgctgaaatgtgtatatctttagaatgtaaatgcaacacttaagaaaattcaaacactttggaaaagggactaaacagtgatttctctgtgttcttgaaatggttttgtgaaaatgctttgataacttcccactcaaagaagagatttacagagctttcgaaattgactttgtgtgtagcaagggacggggcactatcaggatacctcttggtgctttcctaaaatggatcccggggctttccaaggagcctggaatttcagctcacagatctgtttttcttgcttcagtgtgcattttaagtcaatagagctgagtatctagcattgaggtgagggaaatgctgcctatactcccagatgtgtttagaatatctcagaaacaacactgtgtttagctcggctttctctgctaagtatgcctttcaagtgtacaccacggagacaggaccgcgttgcaaggcgggacagcaggttcagaccacagttctcagtctgactttactcttgctaggtctgtcctactagctgttgcctgctaccgcccatggctctccatcggactgcatgtgtccttttctagtttgcaaagactaaaatgcattcccaaacctactgctaatctgagggcctcagcatcacttccagatccttgcttggagcagtctctctattgactctctcagatcgctccactgctccatgggctatcaagtaactaactgcatacctgccgttggcatcatcagaacagtccgaagaaatagtctccactcactaattacctcctatataacgacgtatgcttcctgtagttcagtagtttgctctcatcgataacgtgcattgggaagtttccagactgcaaaaactaggagctcgcattcatttcccaagtgtgacccttagatgcttagttgactcgctgcatatttgctcttgtcttcagaaaagaaaggaagaagtatcgttccaacgaaatgtttccagaaaagtgtactataaactttcattccaaaaatggtgtcataagcaaacaactcacttgtcaaatttcaaatggtattgaacaaaaaaagaaagctgttgtgtttttgttttgttttgttttcatgaaactgtgattttcaacttatgaatgctataatgtcccagcgcgggaagctcacgctgtgtgaacatgaagttgtataaaacaaaccaaccaacctacacacaaatgttttcataggcactgtataaagaaaaatgtatgtttattaactcaaatcagtttttcagagaggaaacgtcactgagatgaagaggcgggtaaattggtttgttattttttaaaaaaaacttgcatgtttaaaaaaaagttgattgcttcaaatttctgctactaacttcaagctatgggagtttggcagtagtcacttgaggattttttttccaattcttttctttttgttgttaaagctgtacttcagtgaacagaaaaattgccaagcaaactaatggctataaaagcgtaatttgcatgtgtgggcataaactacagagcctcattgccatgaggtattgtacaaagttttaatacattttgtaaataaaattgtaaagaaagaa

SEQ ID NO: 12254 - DNA, 934 bp, Homo sapiens
  source 1..934: mol_type = unassigned DNA
cgagagagagcgagcgaataagagagagagtaagagggagagagaagaagaggaagaagaggaggcggcggcagcggaggaggaggaggactagtgtggggtggaaaggaagagtgagcgagagcaagttaaggggagggggtgtaagagccagcgaattctttttctttttctattattattttgacgactcctgagttgcgcccatgctcttgtcagcttcgttttaggcgtacatggccaggcagaagaaaatggggcaaagcgtgctccgggcggtcttctttttagtcctggggcttttgggtcattctcacggaggattccccaacaccatcagcataggtggacttttcatgagaaacacagtgcaggagcacagcgctttccgctttgccgtgcagttatacaacaccaaccagaacaccaccgagaagcccttccatttgaattaccacgtagatcacttggattcctccaatagtttttccgtgacaaatgcttgtcctgctgaaagggactacctgccttggccaggaagcatcagggaaaacaattggacagctctgccgtgctgcaaagatcatgggctgctgcacctaaaatgttcaccaggtgggcccgccaaaactgggcctattgtatctggggcgttacaggtgaactgtaagatgagaacaagatcacaagtcagcactacctcctcccttcttgagttctcaactgagtgagcatcatggagggagaagaaagaaagaagttcagcctgggtgtgtgaagctgtaaagttgcaggttgaacccaaacccattttagagacagaagaaactaccctctggagataaaataaaaagatgaagctgagatgggacaggatcaaagttgatgaaatatcaagagaggttaataaaggaacattaatttattcctcaaa

SEQ ID NO: 12255 - DNA, 782 bp, Homo sapiens
  source 1..782: mol_type = unassigned DNA
cgctttggcaaacccagcttgcagccaatgaacccgccttccagattggtgtgaagacagaagtgagcttcgttttaggcgtacatggccaggcagaagaaaatggggcaaagcgtgctccgggcggtcttctttttagtcctggggcttttgggtcattctcacggaggattccccaacaccatcagcataggtggacttttcatgagaaacacagtgcaggagcacagcgctttccgctttgccgtgcagttatacaacaccaaccagaacaccaccgagaagcccttccatttgaattaccacgtagatcacttggattcctccaatagtttttccgtgacaaatgcttgtcctgctgaaagggactacctgccttggccaggaagcatcagggaaaacaattggacagctctgccgtgctgcaaagatcatgggctgctgcacctaaaatgttcaccaggtgggcccgccaaaactgggcctattgtatctggggcgttacaggtgaactgtaagatgagaacaagatcacaagtcagcactacctcctcccttcttgagttctcaactgagtgagcatcatggagggagaagaaagaaagaagttcagcctgggtgtgtgaagctgtaaagttgcaggttgaacccaaacccattttagagacagaagaaactaccctctggagataaaataaaaagatgaagctgagatgggacaggatcaaagttgatgaaatatcaagagaggttaataaaggaacattaatttattcctcaaa

SEQ ID NO: 12256 - DNA, 2169 bp, Homo sapiens
  source 1..2169: mol_type = unassigned DNA
agcaccggaggcgagcaggaggctgggatgctgcaagggggtgaagagtcgaggcttttcggctcgctgctctggactttgccatggcgtggacttttcatgagaaacacagtgcaggagcacagcgctttccgctttgccgtgcagttatacaacaccaaccagaacaccaccgagaagcccttccatttgaattaccacgtagatcacttggattcctccaatagtttttccgtgacaaatgctttctgctcccagttctcgagaggggtgtatgccatctttggattctatgaccagatgtcaatgaacaccctgacctccttctgtggggccctgcacacatcctttgttacgcctagcttccccactgacgcagatgtgcagtttgtcatccagatgcgcccagccttgaagggcgctattctgagtcttctgggtcattacaagtgggagaagtttgtgtacctctatgacacagaacgaggattttccatcctccaagcgattatggaagcagcagtgcaaaacaactggcaagtaacagcaaggtctgtgggaaacataaaggacgtccaagaattcaggcgcatcattgaagaaatggacaggaggcaggaaaagcgatacttgattgactgcgaagtcgaaaggattaacacaattttggaacaggttgtgatcctagggaaacactcaagaggttatcactacatgctcgctaacctgggttttactgatattttactggaaagagtcatgcatgggggagccaacattacaggtttccagattgtcaacaatgaaaaccctatggttcagcagttcatacagcgctgggtgaggctggatgaaagggaattccctgaagccaagaatgcaccactaaagtatacatctgcattgacacacgacgcaatactggtcatagcagaagctttccgctacctgaggaggcagcgagtagatgtgtcccggagaggaagtgctggagactgcttagcaaatcctgctgtgccctggagtcaaggaattgatattgagagagctctgaaaatggtgcaagtacaaggaatgactggaaatattcaatttgacacttatggacgtaggacaaattataccatcgatgtgtatgaaatgaaagtcagtggctctcgaaaagctggctactggaatgagtatgaaaggtttgtgcctttctcagatcagcaaatcagcaatgacagtgcatcctcagagaatcggaccatagtagtgactaccattctggaatcaccatatgtaatgtacaagaagaaccatgagcaactggaaggaaatgaacgatatgaaggctattgtgtagacctagcctatgaaatagccaaacatgtaaggatcaaatacaaattgtccatcgttggtgacgggaaatatggtgcaagggatccagagactaaaatatggaacggcatggttggggaacttgtctatgggagagctgatatagctgttgctccactcactataacattggtccgtgaagaagtcatagatttttcaaagccattcatgagcctgggcatctccatcatgataaagaagcctcagaaatcaaaaccaggcgtattctcatttctggatcccctggcttatgaaatctggatgtgcattgtctttgcttacattggagtcagcgtagttcttttcctagtcagcaggttcagtccttatgaatggcacttggaagacaacaatgaagaacctcgtgacccacaaagtcctcctgatcctccaaatgaatttggaatatttaacagtctttggttttccttgggtgcctttatgcagcaaggatgtgatatttctccaaggtttgtttttgtggcatactcaatgcctcattgcattttatggtcatactccattcatgtacatatggtattcatccatctcaactccagatttttttcatttaacattccatcaaatgacagattatcatcaagccattgtgtttgcttatgtccatgaagtgagtgtgtcattggtgttgctttgaatgtctttcatgcatttctatggtattgtatatacattaaaacaaacatttgaactctggataaaggcaacattgccactaatattaatattattcagataaagtaaatactaaatcttcatcag

SEQ ID NO: 12257 - DNA, 2990 bp, Homo sapiens
  source 1..2990: mol_type = unassigned DNA
agcggaggaggaggaggactagtgtggggtggaaaggaagagtgagcgagagcaagttaaggggagggggtgtaagagccagcgaattctttttctttttctattattattttgacgactcctgagttgcgcccatgctcttgtcagcttcgttttaggcgtacatggccaggcagaagaaaatggggcaaagcgtgctccgggcggtcttctttttagtcctggggcttttgggtcattctcacggaggattccccaacaccatcagcataggtggacttttcatgagaaacacagtgcaggagcacagcgctttccgctttgccgtgcagttatacaacaccaaccagaacaccaccgagaagcccttccatttgaattaccacgtagatcacttggattcctccaatagtttttccgtgacaaatgctttctgctcccagttctcgagaggggtgtatgccatctttggattctatgaccagatgtcaatgaacaccctgacctccttctgtggggccctgcacacatcctttgttacgcctagcttccccactgacgcagatgtgcagtttgtcatccagatgcgcccagccttgaagggcgctattctgagtcttctgggtcattacaagtgggagaagtttgtgtacctctatgacacagaacgaggattttccatcctccaagcgattatggaagcagcagtgcaaaacaactggcaagtaacagcaaggtctgtgggaaacataaaggacgtccaagaattcaggcgcatcattgaagaaatggacaggaggcaggaaaagcgatacttgattgactgcgaagtcgaaaggattaacacaattttggaacaggttgtgatcctagggaaacactcaagaggttatcactacatgctcgctaacctgggttttactgatattttactggaaagagtcatgcatgggggagccaacattacaggtttccagattgtcaacaatgaaaaccctatggttcagcagttcatacagcgctgggtgaggctggatgaaagggaattccctgaagccaagaatgcaccactaaagtatacatctgcattgacacacgacgcaatactggtcatagcagaagctttccgctacctgaggaggcagcgagtagatgtgtcccggagaggaagtgctggagactgcttagcaaatcctgctgtgccctggagtcaaggaattgatattgagagagctctgaaaatggtgcaagtacaaggaatgactggaaatattcaatttgacacttatggacgtaggacaaattataccatcgatgtgtatgaaatgaaagtcagtggctctcgaaaagctggctactggaatgagtatgaaaggtttgtgcctttctcagatcagcaaatcagcaatgacagtgcatcctcagagaatcggaccatagtagtgactaccattctggaatcaccatatgtaatgtacaagaagaaccatgagcaactggaaggaaatgaacgatatgaaggctattgtgtagacctagcctatgaaatagccaaacatgtaaggatcaaatacaaattgtccatcgttggtgacgggaaatatggtgcaagggatccagagactaaaatatggaacggcatggttggggaacttgtctatgggagagctgatatagctgttgctccactcactataacattggtccgtgaagaagtcatagatttttcaaagccattcatgagcctgggcatctccatcatgataaagaagcctcagaaatcaaaaccaggcgtattctcatttctggatcccctggcttatgaaatctggatgtgcattgtctttgcttacattggagtcagcgtagttcttttcctagtcagcaggttcagtccttatgaatggcacttggaagacaacaatgaagaacctcgtgacccacaaagtcctcctgatcctccaaatgaatttggaatatttaacagtctttggttttccttgggtgcctttatgcagcaaggatgtgatatttctccaagatcactctccgggcgcattgttggaggggtttggtggttcttcaccctgatcataatttcttcctatactgccaatctcgctgctttcctgactgtggagaggatggtttctcccatagagagtgctgaagacttagctaaacagactgaaattgcatatgggaccctggactccggttcaacaaaagaatttttcagaagatccaaaattgctgtgtacgagaaaatgtggtcttacatgaaatcagcggagccatctgtgtttaccaaaacaacagcagacggagtggcccgagtgcgaaagtccaagggaaagttcgccttcctgctggagtcaaccatgaatgagtacattgagcagagaaaaccatgtgatacgatgaaagttggtggaaatctggattccaaaggctatggtgtggcaacccctaaaggctcagcattaagaaatgctgttaacctggcagtattaaaactgaatgagcaaggcctcttggacaaattgaaaaacaaatggtggtacgacaaaggagagtgcggcagcgggggcggtgactccaagaacgcctgtaaaccttgcagtattgaaactcagtgaacaaggcatcttagacaagctgaaaaacaaatggtggtacgataagggggaatgtggagccaaggactccgggagtaaggacaagaccagcgctctgagcctgagcaatgtggcaggcgttttctatatacttgtcggaggtctggggctggccatgatggtggctttgatagaattctgttacaaatcacgggcagagtccaaacgcatgaaactcacaaagaacacccaaaactttaagcctgctcctgccaccaacactcagaattatgctacatacagagaaggctacaacgtgtatggaacagagagtgttaagatctagggatcccttcccactggaggcatgtg

SEQ ID NO: 12258 - DNA, 5508 bp, Homo sapiens
  source 1..5508: mol_type = unassigned DNA
agtggcagaagagggctaggctgagagggaagccaggactgtaggagagggaggcagcccgtcctcctcacgaacctgcaaggatgcggcaggggcctgggggcatggggaggtactaaccccccggagcccccgattggggcttgcagacctggcccgtgggcggattttctgcctagcgcagccgagaagcagaggtgccaggaaaaccaagagaggggcgctgggggtgcccatccccagagtcggtccctctgcgaaccgaggaagaaaagaggagggagtcagcgagtggtcagaagggaaaacctgacaccagactggctccggagcgtccgggagactggggcgctccgcgccatcgtcttcaatgcttctctgaacagcctttaggaagagtgcgagagaaagagagagagcgcgcgccagggagaggagaaaagaagatgaggattatttccagacagattgtcttgttattttctggattttggggactcgccatgggagcctttccgagcagcgtgcaaataggtggtctcttcatccgaaacacagatcaggaatacactgcttttcgattagcaatttttcttcataacaccagccccaatgcgtcggaagctccttttaatttggtacctcatgtggacaacattgagacagccaacagttttgctgtaacaaacgccttctgttcccagtattctagaggagtatttgccatttttggactctatgataagaggtcggtacataccttgacctcattctgcagcgccttacatatctccctcatcacaccaagtttccctactgagggggagagccagtttgtgctgcaactaagaccttcgttacgaggagcactcttgagtttgctggatcactacgaatggaactgttttgtcttcctgtatgacacagacaggggatactcgatactccaagctattatggaaaaagcaggacaaaatggttggcatgtcagcgctatatgtgtggaaaattttaatgatgtcagctataggcaacttctagaagaacttgacagaagacaagagaagaagtttgtaatagactgtgagatagagagacttcaaaacatattagaacagattgtaagtgttggaaagcatgttaaaggctaccattatatcattgcaaacttgggattcaaggatatttctcttgagaggtttatacatggtggagccaatgttactggattccagttggtggattttaatacacctatggtaatcaaactaatggatcgctggaagaaactagatcagagagagtatccaggatctgagactcctccaaagtacacctctgctctgacttatgatggagtccttgtgatggctgaaactttccgaagtcttaggaggcagaaaattgatatctcaaggagaggaaatgctggggattgtctggcaaatcctgctgctccatggggccagggaattgacatggagaggacactcaaacaggttcgaattcaagggctgacagggaatgttcagtttgaccactatggacgtagagtcaattacacaatggatgtgtttgagctgaaaagcacaggacctagaaaggttggttactggaatgatatggataagttagtcttgattcaagatgtaccaactcttggcaatgacacagctgctattgagaacagaacagtggttgtaaccacaattatggaatccccatatgttatgtacaagaaaaatcatgaaatgtttgaaggaaatgacaagtatgaaggatactgtgtagatttggcatctgaaattgcaaaacatattggtatcaagtataaaattgccattgtccctgatggaaaatatggagcaagggatgcagacacaaaaatctggaatgggatggtaggagaacttgtttatgggaaagcagagattgctattgcccctctgacaatcactttggtacgagaggaggtcattgacttttctaagcccttcatgagtttgggcatatctatcatgatcaaaaagcctcagaaatccaaaccaggagtgttttccttcttggatcctctggcctatgagatttggatgtgcatagtctttgcctacattggtgtcagcgtggtcttattcctagttagtagatttagtccatatgagtggcacacagaagagccagaggacggaaaggaaggacccagcgaccagcctcccaatgagtttggcatctttaacagcctctggttttccctgggtgcttttatgcagcaaggatgtgacatttcacccagatccctctcaggtcgaattgttggaggtgtttggtggttctttacactcatcattatatcatcttatactgctaacctcgctgctttcctgacggttgagcgaatggtctctcccatagaaagtgcagaagacctggccaaacaaacagaaattgcctatggaacactggattcaggatcaacaaaagaattcttcagaagatcaaaaatagcagtgtatgaaaagatgtggacctacatgcgatcagcagagccatcagtattcactaggactacagctgagggagtagctcgtgtccgcaaatccaagggcaaatttgcctttctcctggagtccactatgaatgaatacattgagcagcgaaagccatgtgacacgatgaaagtgggaggaaatctggattccaaaggctatggagtagcaacgcccaagggttcctcattaagaactcctgtaaaccttgccgttttgaaactcagtgaggcaggcgtcttagacaagctgaaaaacaaatggtggtacgataaaggtgaatgtggacccaaggactctggaagcaaggacaagacgagtgccttgagcctgagcaatgtagcaggcgtcttctacattctggttggcggcttgggcttggcaatgctggtggctttgatagagttctgttacaagtccagggcagaagcgaagagaatgaagctgaccttttctgaagccataagaaacaaagccagattatccatcactgggagtgtgggagagaatggccgcgtcttgacgcctgactgcccaaaggctgtacacactggaactgcaatcagacaaagttcaggattggctgtcattgcatcggacctaccataaaaaccaaaaaaataattgagtgccttaattaaactgttggtgactggtggaaacgcagccctgagggacacgccacgcgcgggtctttgctaaaccaatcctttggctgagagcgggaagtccgtcctaacgcgctggccggacatcagcagcagcaacgtgtgcatgagctcagctcggaaacccaaactcagattttatatcaggaaaactcacaattgaggtttttttcggggagtgggtgggggagggatctgggatgggtgtattaacagcaacaaatttcattcgagtggactcaaaaactaatcagacttatgagttagcgcattaaactgtgaagttcttgctcagaaaggcctttgtcttcaccggaaaggataaaatagttgtagaagtccgtgaacatgctaacctgtgtctccagaacatccatatagtccatggaagaaaatccagctgagaaaacaaatcactaaactgtgataagaaaataatgaacaaacatgtaaaacctgtgggaaaaaaaaataaaggaagtatgtacacttactttggagaaaacaaatactgaaacatgcttgctttttaactgacgtaaattcagtagaggacaacacaattcttttttctaaccatcttagggaacaatacattgcaataattgatataaatgccatcactgtaataaactttagagacttttttttataaaagttgttggtcatcttcttgtttgctgtaaccttcactatgtcacatgagtcgattcaccgattgcatttgtctcacaaccaggaagaaaagcaaaaggaagaaaacgtttaggttcaatcatcagtctgcggtgtagactcgaaagagatgacaggtcactcatgttaatggtattatttataatctcattctgtgtacaacattgtggtttttgtacccaccaaaaagaataaaacagcagatgttcttacaatatctacagagcttaaaagttttttcttatcgttataaaagttatttgagaaattataagactataagagagattgtattagtggtgggccatagtggaaaatgtagctagccctcattattttttgcatactaagctacccctccttttcagatctttgactcattaacagattaaactgtcaaagatggagtctttgagttggggaatgaatcactgtcctaacaacaacataccttgtaattgtgtgttgaaattttacttgactgtattttgctgcataaaattatgtgtctcttgggcttcttcccttattcctattgttccctttaaatcatatgaaggcattcataatagcttggggtagataacaaatgaagaattagtctttgttttcaactggaaattgtaaagaaaattatactcatgtttatttataaaaatcaccttatgtatgaattaaactaacatggttcaaaagaaggtttggttcatttgaaataataaataagtactctaatacagataaaaatcatgtacttagggtattggcagaaagcacaagttaggatgatttcagaagtctggccttgaaggatgagttgagttttaacaggaggagaaggtgttaagagccatatgagtgagcagtggcccaaagccatgcacatcagtggctcatttaaggaatgaatgccattagatgggctactgagagtacagggatattatggaagataaagttggaaaagctgaaggattgattttcttccatcaactctcaagatcccattcgccattcaatctctgtgctgcagtaagagcaatcttaaacagtataaatcacacacacacacacacacacacacacacacacacacaagtccctcaggaaaaattccaagctcttgagaagatcacatgagccccttcatgacctggcgcttgcttatttcttccaggacttctctcacttctatccagctattcccgtcagcaaatgaacctccaaagcagcacatggagcactgcatagactatttcctcagtgcgtaactcctccctgtctcctctttacctgagtaacttgtactcatccttcaatactccaactgaattttacttaccctgaaaagatttccatggctatccaccacccccctgcctgtgagactgagttaggtgccctttttcatgtctttcccccatcacggcacttaccatactgcgttgtaattgcctgtgtactcgtctgtataactactagactgtaagctccttgagggcagggactgtgtctatcttgttcacagttgtatccccagcacccagcacagtgcctggcatattgtaggtgcttaataaatatttgttgaatgaatg

SEQ ID NO: 12259 - DNA, 2994 bp, Homo sapiens
  source 1..2994: mol_type = unassigned DNA
aaatctttgctgcagcgaggaccggagtcccccgcgcgcagcccagtggcagaagagggctaggctgagagggaagccaggactgtaggagagggaggcagcccgtcctcctcacgaacctgcaaggatgcggcaggggcctgggggcatggggaggtactaaccccccggagcccccgattggggcttgcagacctggcccgtgggcggattttctgcctagcgcagccgagaagcagaggtgccaggaaaaccaagagaggggcgctgggggtgcccatccccagagtcggtccctctgcgaaccgaggaagaaaagaggagggagtcagcgagtggtcagaagggaaaacctgacaccagactggctccggagcgtccgggagactggggcgctccgcgccatcgtcttcaatgcttctctgaacagcctttaggaagagtgcgagagaaagagagagagcgcgcgccagggagaggagaaaagaagatgaggattatttccagacagattgtcttgttattttctggattttggggactcgccatgggagcctttccgagcagcgtgcaaataggtggtctcttcatccgaaacacagatcaggaatacactgcttttcgattagcaatttttcttcataacaccagccccaatgcgtcggaagctccttttaatttggtacctcatgtggacaacattgagacagccaacagttttgctgtaacaaacgccttctgttcccagtattctagaggagtatttgccatttttggactctatgataagaggtcggtacataccttgacctcattctgcagcgccttacatatctccctcatcacaccaagtttccctactgagggggagagccagtttgtgctgcaactaagaccttcgttacgaggagcactcttgagtttgctggatcactacgaatggaactgttttgtcttcctgtatgacacagacaggggatactcgatactccaagctattatggaaaaagcaggacaaaatggttggcatgtcagcgctatatgtgtggaaaattttaatgatgtcagctataggcaacttctagaagaacttgacagaagacaagagaagaagtttgtaatagactgtgagatagagagacttcaaaacatattagaacagattgtaagtgttggaaagcatgttaaaggctaccattatatcattgcaaacttgggattcaaggatatttctcttgagaggtttatacatggtggagccaatgttactggattccagttggtggattttaatacacctatggtaatcaaactaatggatcgctggaagaaactagatcagagagagtatccaggatctgagactcctccaaagtacacctctgctctgacttatgatggagtccttgtgatggctgaaactttccgaagtcttaggaggcagaaaattgatatctcaaggagaggaaatgctggggattgtctggcaaatcctgctgctccatggggccagggaattgacatggagaggacactcaaacaggttcgaattcaagggctgacagggaatgttcagtttgaccactatggacgtagagtcaattacacaatggatgtgtttgagctgaaaagcacaggacctagaaaggttggttactggaatgatatggataagttagtcttgattcaagatgtaccaactcttggcaatgacacagctgctattgagaacagaacagtggttgtaaccacaattatgcctctgatgaagaatcctattttaagaaattgatcaagaaagaaaagagttccgcgctgttcgaccattcctaactaaggctcaagtcttgttctccagtgtagtaaatttaagcttatttttcatgtgggattcttcttggatgaccaactctggactaccagaaaaaaaaaattttaagttctgtgacttttctgagatactagaacaaaagaagaattaatcttcatctttctcaagaaatagatgttgacaaagaatcacttagcgattctgacatatcaattcccctatcttgaaatgaggtcactgtatgtaaatgatggaattatatcactccatttccaagggtagattttctataagtaaatatctcggaatttgtgtgcttgttttctgaatatatacagttgttttctttaaagatctcttggaattttgcctgttctgtgtgaaataaagtgttttaatgtgcattataggtatgatatagagaatctcctttccatccttgttactaaagggactggacaaataaatcttaaaaccaaaatactgaattaattttgcaagcatggctagtttttaggaagcatgctatcaaaaaaaaaaagactaaaaatgactgaaaaaatccaactgttttatatatatataaatatatatatatttatatatatatataaaggatattctgtaaagttatatgttgtttgacagtaaagccatcaatatttttgctatcaaaatagtataatactagtatctttttgtatgaaaatgtaatctttatataaataatacctctgatatttgcaactgcataatcgttcagtaattcaaaaagacatactagaatcctttttctgaaagtgttccttcaatttgcttttgttgaaaacggtagtccaggacctatgatatccctccacttcattcattatgaaagaaatcccttgtagataaacaagatattggcatctgcatgtaattatccccagattcagctgaaaactcccaacacagatggaattggctagacattttaatatatgtgatacctatatctagatatagaaggctgagagtgagcactggatataattcattttgattgaaattgatatggtgttattgttcttccagttgtctgtcctttgtgtatgttcttatttatatgttgatacactgtaacactatatgctattgctaaataaaattgattgagaaattca

SEQ ID NO: 12260 - DNA, 5621 bp, Homo sapiens
  source 1..5621: mol_type = unassigned DNA
agtggcagaagagggctaggctgagagggaagccaggactgtaggagagggaggcagcccgtcctcctcacgaacctgcaaggatgcggcaggggcctgggggcatggggaggtactaaccccccggagcccccgattggggcttgcagacctggcccgtgggcggattttctgcctagcgcagccgagaagcagaggtgccaggaaaaccaagagaggggcgctgggggtgcccatccccagagtcggtccctctgcgaaccgaggaagaaaagaggagggagtcagcgagtggtcagaagggaaaacctgacaccagactggctccggagcgtccgggagactggggcgctccgcgccatcgtcttcaatgcttctctgaacagcctttaggaagagtgcgagagaaagagagagagcgcgcgccagggagaggagaaaagaagatgaggattatttccagacagattgtcttgttattttctggattttggggactcgccatgggagcctttccgagcagcgtgcaaataggtggtctcttcatccgaaacacagatcaggaatacactgcttttcgattagcaatttttcttcataacaccagccccaatgcgtcggaagctccttttaatttggtacctcatgtggacaacattgagacagccaacagttttgctgtaacaaacgccttctgttcccagtattctagaggagtatttgccatttttggactctatgataagaggtcggtacataccttgacctcattctgcagcgccttacatatctccctcatcacaccaagtttccctactgagggggagagccagtttgtgctgcaactaagaccttcgttacgaggagcactcttgagtttgctggatcactacgaatggaactgttttgtcttcctgtatgacacagacaggggatactcgatactccaagctattatggaaaaagcaggacaaaatggttggcatgtcagcgctatatgtgtggaaaattttaatgatgtcagctataggcaacttctagaagaacttgacagaagacaagagaagaagtttgtaatagactgtgagatagagagacttcaaaacatattagaacagattgtaagtgttggaaagcatgttaaaggctaccattatatcattgcaaacttgggattcaaggatatttctcttgagaggtttatacatggtggagccaatgttactggattccagttggtggattttaatacacctatggtaatcaaactaatggatcgctggaagaaactagatcagagagagtatccaggatctgagactcctccaaagtacacctctgctctgacttatgatggagtccttgtgatggctgaaactttccgaagtcttaggaggcagaaaattgatatctcaaggagaggaaatgctggggattgtctggcaaatcctgctgctccatggggccagggaattgacatggagaggacactcaaacaggttcgaattcaagggctgacagggaatgttcagtttgaccactatggacgtagagtcaattacacaatggatgtgtttgagctgaaaagcacaggacctagaaaggttggttactggaatgatatggataagttagtcttgattcaagatgtaccaactcttggcaatgacacagctgctattgagaacagaacagtggttgtaaccacaattatggaatccccatatgttatgtacaagaaaaatcatgaaatgtttgaaggaaatgacaagtatgaaggatactgtgtagatttggcatctgaaattgcaaaacatattggtatcaagtataaaattgccattgtccctgatggaaaatatggagcaagggatgcagacacaaaaatctggaatgggatggtaggagaacttgtttatgggaaagcagagattgctattgcccctctgacaatcactttggtacgagaggaggtcattgacttttctaagcccttcatgagtttgggcatatctatcatgatcaaaaagcctcagaaatccaaaccaggagtgttttccttcttggatcctctggcctatgagatttggatgtgcatagtctttgcctacattggtgtcagcgtggtcttattcctagttagtagatttagtccatatgagtggcacacagaagagccagaggacggaaaggaaggacccagcgaccagcctcccaatgagtttggcatctttaacagcctctggttttccctgggtgcttttatgcagcaaggatgtgacatttcacccagatccctctcaggtcgaattgttggaggtgtttggtggttctttacactcatcattatatcatcttatactgctaacctcgctgctttcctgacggttgagcgaatggtctctcccatagaaagtgcagaagacctggccaaacaaacagaaattgcctatggaacactggattcaggatcaacaaaagaattcttcagaagatcaaaaatagcagtgtatgaaaagatgtggacctacatgcgatcagcagagccatcagtattcactaggactacagctgagggagtagctcgtgtccgcaaatccaagggcaaatttgcctttctcctggagtccactatgaatgaatacattgagcagcgaaagccatgtgacacgatgaaagtgggaggaaatctggattccaaaggctatggagtagcaacgcccaagggttcctcattaagaaatgctgttaacctcgcagttttaaaactgaatgaacaaggcctcttggacaaattgaaaaacaaatggtggtacgacaaaggagaatgtggcagcgggggaggtgactccaaggacaagacgagtgccttgagcctgagcaatgtagcaggcgtcttctacattctggttggcggcttgggcttggcaatgctggtggctttgatagagttctgttacaagtccagggcagaagcgaagagaatgaaggtggcaaagagtgcacagacttttaacccaacttcctcgcagaatacccagaatttagcaacctatagagaaggttacaacgtatatggaaccgaaagtattaaaatttagggctgaccttttctgaagccataagaaacaaagccagattatccatcactgggagtgtgggagagaatggccgcgtcttgacgcctgactgcccaaaggctgtacacactggaactgcaatcagacaaagttcaggattggctgtcattgcatcggacctaccataaaaaccaaaaaaataattgagtgccttaattaaactgttggtgactggtggaaacgcagccctgagggacacgccacgcgcgggtctttgctaaaccaatcctttggctgagagcgggaagtccgtcctaacgcgctggccggacatcagcagcagcaacgtgtgcatgagctcagctcggaaacccaaactcagattttatatcaggaaaactcacaattgaggtttttttcggggagtgggtgggggagggatctgggatgggtgtattaacagcaacaaatttcattcgagtggactcaaaaactaatcagacttatgagttagcgcattaaactgtgaagttcttgctcagaaaggcctttgtcttcaccggaaaggataaaatagttgtagaagtccgtgaacatgctaacctgtgtctccagaacatccatatagtccatggaagaaaatccagctgagaaaacaaatcactaaactgtgataagaaaataatgaacaaacatgtaaaacctgtgggaaaaaaaaataaaggaagtatgtacacttactttggagaaaacaaatactgaaacatgcttgctttttaactgacgtaaattcagtagaggacaacacaattcttttttctaaccatcttagggaacaatacattgcaataattgatataaatgccatcactgtaataaactttagagacttttttttataaaagttgttggtcatcttcttgtttgctgtaaccttcactatgtcacatgagtcgattcaccgattgcatttgtctcacaaccaggaagaaaagcaaaaggaagaaaacgtttaggttcaatcatcagtctgcggtgtagactcgaaagagatgacaggtcactcatgttaatggtattatttataatctcattctgtgtacaacattgtggtttttgtacccaccaaaaagaataaaacagcagatgttcttacaatatctacagagcttaaaagttttttcttatcgttataaaagttatttgagaaattataagactataagagagattgtattagtggtgggccatagtggaaaatgtagctagccctcattattttttgcatactaagctacccctccttttcagatctttgactcattaacagattaaactgtcaaagatggagtctttgagttggggaatgaatcactgtcctaacaacaacataccttgtaattgtgtgttgaaattttacttgactgtattttgctgcataaaattatgtgtctcttgggcttcttcccttattcctattgttccctttaaatcatatgaaggcattcataatagcttggggtagataacaaatgaagaattagtctttgttttcaactggaaattgtaaagaaaattatactcatgtttatttataaaaatcaccttatgtatgaattaaactaacatggttcaaaagaaggtttggttcatttgaaataataaataagtactctaatacagataaaaatcatgtacttagggtattggcagaaagcacaagttaggatgatttcagaagtctggccttgaaggatgagttgagttttaacaggaggagaaggtgttaagagccatatgagtgagcagtggcccaaagccatgcacatcagtggctcatttaaggaatgaatgccattagatgggctactgagagtacagggatattatggaagataaagttggaaaagctgaaggattgattttcttccatcaactctcaagatcccattcgccattcaatctctgtgctgcagtaagagcaatcttaaacagtataaatcacacacacacacacacacacacacacacacacacacaagtccctcaggaaaaattccaagctcttgagaagatcacatgagccccttcatgacctggcgcttgcttatttcttccaggacttctctcacttctatccagctattcccgtcagcaaatgaacctccaaagcagcacatggagcactgcatagactatttcctcagtgcgtaactcctccctgtctcctctttacctgagtaacttgtactcatccttcaatactccaactgaattttacttaccctgaaaagatttccatggctatccaccacccccctgcctgtgagactgagttaggtgccctttttcatgtctttcccccatcacggcacttaccatactgcgttgtaattgcctgtgtactcgtctgtataactactagactgtaagctccttgagggcagggactgtgtctatcttgttcacagttgtatccccagcacccagcacagtgcctggcatattgtaggtgcttaataaatatttgttgaatgaatg

SEQ ID NO: 12261 - DNA, 2778 bp, Homo sapiens
  source 1..2778: mol_type = unassigned DNA
atttgcagccggacagaaaacctctcccagggctatggagactgcgggaaaaatctggcggctcgcgatggattgctaaggagaactagtcataatcttaaaccaccgaaacctctttccttttttttctttcttttctttcttttctttttttttttttttttttggttgattttaattttagcgccatcgtcttcaatgcttctctgaacagcctttaggaagagtgcgagagaaagagagagagcgcgcgccagggagaggagaaaagaagatgaggattatttccagacagattgtcttgttattttctggattttggggactcgccatgggagcctttccgagcagcgtgcaaataggtggtctcttcatccgaaacacagatcaggaatacactgcttttcgattagcaatttttcttcataacaccagccccaatgcgtcggaagctccttttaatttggtacctcatgtggacaacattgagacagccaacagttttgctgtaacaaacgccttctgttcccagtattctagaggagtatttgccatttttggactctatgataagaggtcggtacataccttgacctcattctgcagcgccttacatatctccctcatcacaccaagtttccctactgagggggagagccagtttgtgctgcaactaagaccttcgttacgaggagcactcttgagtttgctggatcactacgaatggaactgttttgtcttcctgtatgacacagacaggggatactcgatactccaagctattatggaaaaagcaggacaaaatggttggcatgtcagcgctatatgtgtggaaaattttaatgatgtcagctataggcaacttctagaagaacttgacagaagacaagagaagaagtttgtaatagactgtgagatagagagacttcaaaacatattagaacagattgtaagtgttggaaagcatgttaaaggctaccattatatcattgcaaacttgggattcaaggatatttctcttgagaggtttatacatggtggagccaatgttactggattccagttggtggattttaatacacctatggtaatcaaactaatggatcgctggaagaaactagatcagagagagtatccaggatctgagactcctccaaagtacacctctgctctgacttatgatggagtccttgtgatggctgaaactttccgaagtcttaggaggcagaaaattgatatctcaaggagaggaaatgctggggattgtctggcaaatcctgctgctccatggggccagggaattgacatggagaggacactcaaacaggttcgaattcaagggctgacagggaatgttcagtttgaccactatggacgtagagtcaattacacaatggatgtgtttgagctgaaaagcacaggacctagaaaggttggttactggaatgatatggataagttagtcttgattcaagatgtaccaactcttggcaatgacacagctgctattgagaacagaacagtggttgtaaccacaattatgcctctgatgaagaatcctattttaagaaattgatcaagaaagaaaagagttccgcgctgttcgaccattcctaactaaggctcaagtcttgttctccagtgtagtaaatttaagcttatttttcatgtgggattcttcttggatgaccaactctggactaccagaaaaaaaaaattttaagttctgtgacttttctgagatactagaacaaaagaagaattaatcttcatctttctcaagaaatagatgttgacaaagaatcacttagcgattctgacatatcaattcccctatcttgaaatgaggtcactgtatgtaaatgatggaattatatcactccatttccaagggtagattttctataagtaaatatctcggaatttgtgtgcttgttttctgaatatatacagttgttttctttaaagatctcttggaattttgcctgttctgtgtgaaataaagtgttttaatgtgcattataggtatgatatagagaatctcctttccatccttgttactaaagggactggacaaataaatcttaaaaccaaaatactgaattaattttgcaagcatggctagtttttaggaagcatgctatcaaaaaaaaaaagactaaaaatgactgaaaaaatccaactgttttatatatatataaatatatatatatttatatatatatataaaggatattctgtaaagttatatgttgtttgacagtaaagccatcaatatttttgctatcaaaatagtataatactagtatctttttgtatgaaaatgtaatctttatataaataatacctctgatatttgcaactgcataatcgttcagtaattcaaaaagacatactagaatcctttttctgaaagtgttccttcaatttgcttttgttgaaaacggtagtccaggacctatgatatccctccacttcattcattatgaaagaaatcccttgtagataaacaagatattggcatctgcatgtaattatccccagattcagctgaaaactcccaacacagatggaattggctagacattttaatatatgtgatacctatatctagatatagaaggctgagagtgagcactggatataattcattttgattgaaattgatatggtgttattgttcttccagttgtctgtcctttgtgtatgttcttatttatatgttgatacactgtaacactatatgctattgctaaataaaattgattgagaaattca

SEQ ID NO: 12262 - DNA, 2822 bp, Homo sapiens
  source 1..2822: mol_type = unassigned DNA
atgaggattatttccagacagattgtcttgttattttctggattttggggactcgccatgggagcctttccgagcagcgtgcaaataggtggtctcttcatccgaaacacagatcaggaatacactgcttttcgattagcaatttttcttcataacaccagccccaatgcgtcggaagctccttttaatttggtacctcatgtggacaacattgagacagccaacagttttgctgtaacaaacgccttctgttcccagtattctagaggagtatttgccatttttggactctatgataagaggtcggtacataccttgacctcattctgcagcgccttacatatctccctcatcacaccaagtttccctactgagggggagagccagtttgtgctgcaactaagaccttcgttacgaggagcactcttgagtttgctggatcactacgaatggaactgttttgtcttcctgtatgacacagacaggggatactcgatactccaagctattatggaaaaagcaggacaaaatggttggcatgtcagcgctatatgtgtggaaaattttaatgatgtcagctataggcaacttctagaagaacttgacagaagacaagagaagaagtttgtaatagactgtgagatagagagacttcaaaacatattagaacagattgtaagtgttggaaagcatgttaaaggctaccattatatcattgcaaacttgggattcaaggatatttctcttgagaggtttatacatggtggagccaatgttactggattccagttggtggattttaatacacctatggtaatcaaactaatggatcgctggaagaaactagatcagagagagtatccaggatctgagactcctccaaagtacacctctgctctgacttatgatggagtccttgtgatggctgaaactttccgaagtcttaggaggcagaaaattgatatctcaaggagaggaaatgctggggattgtctggcaaatcctgctgctccatggggccagggaattgacatggagaggacactcaaacaggttcgaattcaagggctgacagggaatgttcagtttgaccactatggacgtagagtcaattacacaatggatgtgtttgagctgaaaagcacaggacctagaaaggttggttactggaatgatatggataagttagtcttgattcaagatgtaccaactcttggcaatgacacagctgctattgagaacagaacagtggttgtaaccacaattatggaatccccatatgttatgtacaagaaaaatcatgaaatgtttgaaggaaatgacaagtatgaaggatactgtgtagatttggcatctgaaattgcaaaacatattggtatcaagtataaaattgccattgtccctgatggaaaatatggagcaagggatgcagacacaaaaatctggaatgggatggtaggagaacttgtttatgggaaagcagagattgctattgcccctctgacaatcactttggtacgagaggaggtcattgacttttctaagcccttcatgagtttgggcatatctatcatgatcaaaaagcctcagaaatccaaaccaggagtgttttccttcttggatcctctggcctatgagatttggatgtgcatagtctttgcctacattggtgtcagcgtggtcttattcctagttagtagatttagtccatatgagtggcacacagaagagccagaggacggaaaggaaggacccagcgaccagcctcccaatgagtttggcatctttaacagcctctggttttccctgggtgcttttatgcagcaaggatgtgacatttcacccagatccctctcaggtcgaattgttggaggtgtttggtggttctttacactcatcattatatcatcttatactgctaacctcgctgctttcctgacggttgagcgaatggtctctcccatagaaagtgcagaagacctggccaaacaaacagaaattgcctatggaacactggattcaggatcaacaaaagaattcttcagaagatcaaaaatagcagtgtatgaaaagatgtggacctacatgcgatcagcagagccatcagtattcactaggactacagctgagggagtagctcgtgtccgcaaatccaagggcaaatttgcctttctcctggagtccactatgaatgaatacattgagcagcgaaagccatgtgacacgatgaaagtgggaggaaatctggattccaaaggctatggagtagcaacgcccaagggttcctcattaagaaatgctgttaacctcgcagttttaaaactgaatgaacaaggcctcttggacaaattgaaaaacaaatggtggtacgacaaaggagaatgtggcagcgggggaggtgactccaaggacaagacgagtgccttgagcctgagcaatgtagcaggcgtcttctacattctggttggcggcttgggcttggcaatgctggtggctttgatagagttctgttacaagtccagggcagaagcgaagagaatgaaggtggcaaagagtgcacagacttttaacccaacttcctcgcagaatacccagaatttagcaacctatagagaaggttacaacgtatatggaaccgaaagtattaaaatttagggctgaccttttctgaagccataagaaacaaagccagattatccatcactgggagtgtgggagagaatggccgcgtcttgacgcctgactgcccaaaggctgtacacactggaactgcaatcagacaaagttcaggattggctgtcattgcatcggacctaccataa

SEQ ID NO: 12263 - DNA, 470 bp, Homo sapiens
  source 1..470: mol_type = unassigned DNA
agaggtgccaggaaaaccaagagaggggcgctgggggtgcccatccccagagtcggtccctctgcgaaccgaggaagaaaagaggagggagtcagcgagtggtcagaagggaaaacctgacaccagactggctccggagcgtccgggagactggggcgctccgcctttaggaagagtgcgagagaaagagagagagcgcgcgccagggagaggagaaaagaagatgaggattatttccagacagattgtcttgttattttctggattttggggactcgccatgggagcctttccgagcagcgtgcaaataggtggtctcttcatccgaaacacagatcaggaatacactgcttttcgattagcaatttttcttcataacaccagccccaatgcgtcggaagctccttttaatttggtacctcatgtggacaacattgagacagccaacagttttgctgtaacaaacgcct

SEQ ID NO: 12264 - DNA, 367 bp, Homo sapiens
  source 1..367: mol_type = unassigned DNA
aggctctccagattcccgggctgtttgctgcgccatcgtcttcaatgcttctctgaacagcctttaggaagagtgcgagagaaagagagagagcgcgcgccagggagaggagaaaagaagatgaggattatttccagacagattgtcttgttattttctggattttggggactcgccatgggagcctttccgagcagcgtgcaaataggtggtctcttcatccgaaacacagatcaggaatacactgcttttcgattagcaatttttcttcataacaccagccccaatgcgtcggaagctccttttaatttggtacctcatgtggacaacattgagacagccaacagttttgctgtaacaaacgcct

SEQ ID NO: 12265 - DNA, 5059 bp, Homo sapiens
  source 1..5059: mol_type = unassigned DNA
atgaggattatttccagacagattgtcttgttattttctggattttggggactcgccatgggagcctttccgagcagcgtgcaaataggtggtctcttcatccgaaacacagatcaggaatacactgcttttcgattagcaatttttcttcataacaccagccccaatgcgtcggaagctccttttaatttggtacctcatgtggacaacattgagacagccaacagttttgctgtaacaaacgccttctgttcccagtattctagaggagtatttgccatttttggactctatgataagaggtcggtacataccttgacctcattctgcagcgccttacatatctccctcatcacaccaagtttccctactgagggggagagccagtttgtgctgcaactaagaccttcgttacgaggagcactcttgagtttgctggatcactacgaatggaactgttttgtcttcctgtatgacacagacaggggatactcgatactccaagctattatggaaaaagcaggacaaaatggttggcatgtcagcgctatatgtgtggaaaattttaatgatgtcagctataggcaacttctagaagaacttgacagaagacaagagaagaagtttgtaatagactgtgagatagagagacttcaaaacatattagaacagattgtaagtgttggaaagcatgttaaaggctaccattatatcattgcaaacttgggattcaaggatatttctcttgagaggtttatacatggtggagccaatgttactggattccagttggtggattttaatacacctatggtaatcaaactaatggatcgctggaagaaactagatcagagagagtatccaggatctgagactcctccaaagtacacctctgctctgacttatgatggagtccttgtgatggctgaaactttccgaagtcttaggaggcagaaaattgatatctcaaggagaggaaatgctggggattgtctggcaaatcctgctgctccatggggccagggaattgacatggagaggacactcaaacaggttcgaattcaagggctgacagggaatgttcagtttgaccactatggacgtagagtcaattacacaatggatgtgtttgagctgaaaagcacaggacctagaaaggttggttactggaatgatatggataagttagtcttgattcaagatgtaccaactcttggcaatgacacagctgctattgagaacagaacagtggttgtaaccacaattatggaatccccatatgttatgtacaagaaaaatcatgaaatgtttgaaggaaatgacaagtatgaaggatactgtgtagatttggcatctgaaattgcaaaacatattggtatcaagtataaaattgccattgtccctgatggaaaatatggagcaagggatgcagacacaaaaatctggaatgggatggtaggagaacttgtttatgggaaagcagagattgctattgcccctctgacaatcactttggtacgagaggaggtcattgacttttctaagcccttcatgagtttgggcatatctatcatgatcaaaaagcctcagaaatccaaaccaggagtgttttccttcttggatcctctggcctatgagatttggatgtgcatagtctttgcctacattggtgtcagcgtggtcttattcctagttagtagatttagtccatatgagtggcacacagaagagccagaggacggaaaggaaggacccagcgaccagcctcccaatgagtttggcatctttaacagcctctggttttccctgggtgcttttatgcagcaaggatgtgacatttcacccagatccctctcaggtcgaattgttggaggtgtttggtggttctttacactcatcattatatcatcttatactgctaacctcgctgctttcctgacggttgagcgaatggtctctcccatagaaagtgcagaagacctggccaaacaaacagaaattgcctatggaacactggattcaggatcaacaaaagaattcttcagaagatcaaaaatagcagtgtatgaaaagatgtggacctacatgcgatcagcagagccatcagtattcactaggactacagctgagggagtagctcgtgtccgcaaatccaagggcaaatttgcctttctcctggagtccactatgaatgaatacattgagcagcgaaagccatgtgacacgatgaaagtgggaggaaatctggattccaaaggctatggagtagcaacgcccaagggttcctcattaagaactcctgtaaaccttgccgttttgaaactcagtgaggcaggcgtcttagacaagctgaaaaacaaatggtggtacgataaaggtgaatgtggacccaaggactctggaagcaaggacaagacgagtgccttgagcctgagcaatgtagcaggcgtcttctacattctggttggcggcttgggcttggcaatgctggtggctttgatagagttctgttacaagtccagggcagaagcgaagagaatgaagctgaccttttctgaagccataagaaacaaagccagattatccatcactgggagtgtgggagagaatggccgcgtcttgacgcctgactgcccaaaggctgtacacactggaactgcaatcagacaaagttcaggattggctgtcattgcatcggacctaccataaaaaccaaaaaaataattgagtgccttaattaaactgttggtgactggtggaaacgcagccctgagggacacgccacgcgcgggtctttgctaaaccaatcctttggctgagagcgggaagtccgtcctaacgcgctggccggacatcagcagcagcaacgtgtgcatgagctcagctcggaaacccaaactcagattttatatcaggaaaactcacaattgaggtttttttcggggagtgggtgggggagggatctgggatgggtgtattaacagcaacaaatttcattcgagtggactcaaaaactaatcagacttatgagttagcgcattaaactgtgaagttcttgctcagaaaggcctttgtcttcaccggaaaggataaaatagttgtagaagtccgtgaacatgctaacctgtgtctccagaacatccatatagtccatggaagaaaatccagctgagaaaacaaatcactaaactgtgataagaaaataatgaacaaacatgtaaaacctgtgggaaaaaaaaataaaggaagtatgtacacttactttggagaaaacaaatactgaaacatgcttgctttttaactgacgtaaattcagtagaggacaacacaattcttttttctaaccatcttagggaacaatacattgcaataattgatataaatgccatcactgtaataaactttagagacttttttttataaaagttgttggtcatcttcttgtttgctgtaaccttcactatgtcacatgagtcgattcaccgattgcatttgtctcacaaccaggaagaaaagcaaaaggaagaaaacgtttaggttcaatcatcagtctgcggtgtagactcgaaagagatgacaggtcactcatgttaatggtattatttataatctcattctgtgtacaacattgtggtttttgtacccaccaaaaagaataaaacagcagatgttcttacaatatctacagagcttaaaagttttttcttatcgttataaaagttatttgagaaattataagactataagagagattgtattagtggtgggccatagtggaaaatgtagctagccctcattattttttgcatactaagctacccctccttttcagatctttgactcattaacagattaaactgtcaaagatggagtctttgagttggggaatgaatcactgtcctaacaacaacataccttgtaattgtgtgttgaaattttacttgactgtattttgctgcataaaattatgtgtctcttgggcttcttcccttattcctattgttccctttaaatcatatgaaggcattcataatagcttggggtagataacaaatgaagaattagtctttgttttcaactggaaattgtaaagaaaattatactcatgtttatttataaaaatcaccttatgtatgaattaaactaacatggttcaaaagaaggtttggttcatttgaaataataaataagtactctaatacagataaaaatcatgtacttagggtattggcagaaagcacaagttaggatgatttcagaagtctggccttgaaggatgagttgagttttaacaggaggagaaggtgttaagagccatatgagtgagcagtggcccaaagccatgcacatcagtggctcatttaaggaatgaatgccattagatgggctactgagagtacagggatattatggaagataaagttggaaaagctgaaggattgattttcttccatcaactctcaagatcccattcgccattcaatctctgtgctgcagtaagagcaatcttaaacagtataaatcacacacacacacacacacacacacacacacacacacaagtccctcaggaaaaattccaagctcttgagaagatcacatgagccccttcatgacctggcgcttgcttatttcttccaggacttctctcacttctatccagctattcccgtcagcaaatgaacctccaaagcagcacatggagcactgcatagactatttcctcagtgcgtaactcctccctgtctcctctttacctgagtaacttgtactcatccttcaatactccaactgaattttacttaccctgaaaagatttccatggctatccaccacccccctgcctgtgagactgagttaggtgccctttttcatgtctttcccccatcacggcacttaccatactgcgttgtaattgcctgtgtactcgtctgtataactactagactgtaagctccttgagggcagggactgtgtctatcttgttcacagttgtatccccagcacccagcacagtgcctggcatattgtaggtgcttaataaatatttgttgaatga

SEQ ID NO: 12266 - DNA, 2444 bp, Homo sapiens
  source 1..2444: mol_type = unassigned DNA
tgaggattatttccagacagattgtcttgttattttctggattttggggactcgccatgggagcctttccgagcagcgtgcaaataggtggtctcttcatccgaaacacagatcaggaatacactgcttttcgattagcaatttttcttcataacaccagccccaatgcgtcggaagctccttttaatttggtacctcatgtggacaacattgagacagccaacagttttgctgtaacaaacgccttctgttcccagtattctagaggagtatttgccatttttggactctatgataagaggtcggtacataccttgacctcattctgcagcgccttacatatctccctcatcacaccaagtttccctactgagggggagagccagtttgtgctgcaactaagaccttcgttacgaggagcactcttgagtttgctggatcactacgaatggaactgttttgtcttcctgtatgacacagacaggggatactcgatactccaagctattatggaaaaagcaggacaaaatggttggcatgtcagcgctatatgtgtggaaaattttaatgatgtcagctataggcaacttctagaagaacttgacagaagacaagagaagaagtttgtaatagactgtgagatagagagacttcaaaacatattagaacagattgtaagtgttggaaagcatgttaaaggctaccattatatcattgcaaacttgggattcaaggatatttctcttgagaggtttatacatggtggagccaatgttactggattccagttggtggattttaatacacctatggtaatcaaactaatggatcgctggaagaaactagatcagagagagtatccaggatctgagactcctccaaagtacacctctgctctgacttatgatggagtccttgtgatggctgaaactttccgaagtcttaggaggcagaaaattgatatctcaaggagaggaaatgctggggattgtctggcaaatcctgctgctccatggggccagggaattgacatggagaggacactcaaacaggttcgaattcaagggctgacagggaatgttcagtttgaccactatggacgtagagtcaattacacaatggatgtgtttgagctgaaaagcacaggacctagaaaggttggttactggaatgatatggataagttagtcttgattcaagatgtaccaactcttggcaatgacacagctgctattgagaacagaacagtggttgtaaccacaattatggaatccccatatgttatgtacaagaaaaatcatgaaatgtttgaaggaaatgacaagtatgaaggatactgtgtagatttggcatctgaaattgcaaaacatattggtatcaagtataaaattgccattgtccctgatggaaaatatggagcaagggatgcagacacaaaaatctggaatgggatggtaggagaacttgtttatgggaaagcagagattgctattgcccctctgacaatcactttggtacgagaggaggtcattgacttttctaagcccttcatgagtttgggcatatctatcatgatcaaaaagcctcagaaatccaaaccaggagtgttttccttcttggatcctctggcctatgagatttggatgtgcatagtctttgcctacattggtgtcagcgtggtcttattcctagttagtagatttagtccatatgagtggcacacagaagagccagaggacggaaaggaaggacccagcgaccagcctcccaatgagtttggcatctttaacagcctctggttttccctgggtgcttttatgcagcaaggatgtgacatttcacccagatccctctcaggtcgaattgttggaggtgtttggtggttctttacactcatcattatatcatcttatactgctaacctcgctgctttcctgacggttgagcgaatggtctctcccatagaaagtgcagaagacctggccaaacaaacagaaattgcctatggaacactggattcaggatcaacaaaagaattcttcagaagatcaaaaatagcagtgtatgaaaagatgtggacctacatgcgatcagcagagccatcagtattcactaggactacagctgagggagtagctcgtgtccgcaaatccaagggcaaatttgcctttctcctggagtccactatgaatgaatacattgagcagcgaaagccatgtgacacgatgaaagtgggaggaaatctggattccaaaggctatggagtagcaacgcccaagggttcctcattaagaaatgctgttaacctcgcagttttaaaactgaatgaacaaggcctcttggacaaattgaaaaacaaatggtggtacgacaaaggagaatgtggcagcgggggaggtgactccaagaactcctgtaaaccttgccgttttgaaactcagtga

SEQ ID NO: 12267 - DNA, 5519 bp, Homo sapiens
  source 1..5519: mol_type = unassigned DNA
gtgtgagggggagagcgagagagagcaagggagggagagagaggcaggctgcgaggggagaggagagggagtgggggagccagcgctccagctagcatgaggacgggcttcttttcccgtgctcagttaatctggctgtcagttggtgttaacgctgcagtttaagtgttcggattccaagggaaacagacaaacctcacgaaaggaaggaagcaagcaagcaaggaaggaactgcaggaggaaaagaacaggcagaacagcgagaagaataaagggaaagggggggaaacaccaaatctatgattggacctgggcttctttttcgccaatgcaaaaaggaatatgcagcacatttttgccttcttctgcaccggtttcctaggcgcggtagtaggtgccaatttccccaacaatatccagatcgggggattatttccaaaccagcagtcacaggaacatgctgcttttagatttgctttgtcgcaactcacagagcccccgaagctgctcccccagattgatattgtgaacatcagcgacagctttgagatgacctatagattctgttcccagttctccaaaggagtctatgccatctttgggttttatgaacgtaggactgtcaacatgctgacctccttttgtggggccctccacgtctgcttcattacgccgagctttcccgttgatacatccaatcagtttgtccttcagctgcgccctgaactgcaggatgccctcatcagcatcattgaccattacaagtggcagaaatttgtctacatttatgatgccgaccggggcttatccgtcctgcagaaagtcctggatacagctgctgagaagaactggcaggtgacagcagtcaacattttgacaaccacagaggagggataccggatgctctttcaggacctggagaagaaaaaggagcggctggtggtggtggactgtgaatcagaacgcctcaatgctatcttgggccagattataaagctagagaagaatggcatcggctaccactacattcttgcaaatctgggcttcatggacattgacttaaacaaattcaaggagagtggcgccaatgtgacaggtttccagctggtgaactacacagacactattccggccaagatcatgcagcagtggaagaatagtgatgctcgagaccacacacgggtggactggaagagacccaagtacacctctgcgctcacctacgatggggtgaaggtgatggctgaggctttccagagcctgcggaggcagagaattgatatatctcgccgggggaatgctggggattgtctggctaacccagctgttccctggggccaagggatcgacatccagagagctctgcagcaggtgcgatttgaaggtttaacaggaaacgtgcagtttaatgagaaaggacgccggaccaactacacgctccacgtgattgaaatgaaacatgacggcatccgaaagattggttactggaatgaagatgataagtttgtccctgcagccaccgatgcccaagctgggggcgataattcaagtgttcagaacagaacatacatcgtcacaacaatcctagaagatccttatgtgatgctcaagaagaacgccaatcagtttgagggcaatgaccgttacgagggctactgtgtagagctggcggcagagattgccaagcacgtgggctactcctaccgtctggagattgtcagtgatggaaaatacggagcccgagaccctgacacgaaggcctggaatggcatggtgggagagctggtctatggaagagcagatgtggctgtggctcccttaactatcactttggtccgggaagaagttatagatttctccaaaccatttatgagtttggggatctccatcatgattaaaaaaccacagaaatccaagccgggtgtcttctccttccttgatcctttggcttatgagatttggatgtgcattgtttttgcctacattggagtgagtgttgtcctcttcctggtcagccgcttcagtccctatgaatggcacagtgaagagtttgaggaaggacgggaccagacaaccagtgaccagtccaatgagtttgggatattcaacagtttgtggttctccctgggagccttcatgcagcaaggatgtgacatttctcccaggtccctgtctggtcgcatcgttggtggcgtctggtggttcttcaccttaatcatcatctcctcatatacagccaatctggccgccttcctgaccgtggagaggatggtgtctcccattgagagtgcagaggacctagcgaagcagacagaaattgcctacgggacgctggaagcaggatctactaaggagttcttcaggaggtctaaaattgctgtgtttgagaagatgtggacatacatgaagtcagcagagccatcagtttttgtgcggaccacagaggaggggatgattcgagtgaggaaatccaaaggcaaatatgcctacctcctggagtccaccatgaatgagtacattgagcagcggaaaccctgtgacaccatgaaggtgggaggtaacttggattccaaaggctatggcattgcaacacccaaggggtctgccctgagaaatccagtaaacctggcagtgttaaaactgaacgagcaggggcttttggacaaattgaaaaacaaatggtggtacgacaagggcgagtgcggcagcgggggaggtgattccaaggacaagacaagcgctctgagcctcagcaatgtggcaggcgtgttctacatcctgatcggaggacttggactagccatgctggttgccttaatcgagttctgctacaaatcccgtagtgaatccaagcggatgaagggtttttgtttgatcccacagcaatccatcaacgaagccatacggacatcgaccctcccccgcaacagcggggcaggagccagcagcggcggcagtggagagaatggtcgggtggtcagccatgacttccccaagtccatgcaatcgattccttgcatgagccacagttcagggatgcccttgggagccacgggattgtaactggagcagatggagaccccttggggagcaggctcgggctccccagccccatcccaaacccttcagtgccaaaaacaacaacaaaatgaaacgcaaccaccaccaaccactgcgaccacaagaaggatgattcaacaggttttcctgaagaattgaaaaaccattttgctgtcccttttccttttttgatgttctttcacccttttctgtttgctaagtgaggatgaaaaaataacactgtactgcaataaggggagagtaaccctgtctaatgaaacctgtgtctctgagagtagagtcactggaacactaatgaggaaactgcactgttttattttaattcagttgttagtgtgtcttagtgtgtgcaattttttttcttactaatatccatggtttgcaggttctgttaggccctttccttctccttacttcttatccccaactccctacccacccctcttcagttttcagattggagattcaagatttgttccactttacaagcaagaggaaaaaaaagcaaccttcaaactaattctccatgggggctctccatgttaccctccactccttggcccaaacctctgatggagatagacattgttggagaagtgggctgccttccccaagtggggcactgcttaagcacttattcagtggagaacacaggtgaaaagcaactcaggatgagggtggtggagagggcaggggcagatgtgcagtcagagaaggactcctgaagttactgctgctcagaaaaacagttcctttaatgtggaagagccatttcataggtcataggtggtatggtatatttcttcagagtcaaccttggccctgagaagtatgtcctcctggtgtgctcaggctcaacggcagtctggtggctgaaggcacttggcctcctaaaccaagcagaattttgggaagagataacagccagggagatattgcccatgattctcactttttctttgcctggcatctaagcaggaacccattgtggagtagactctcttcttctatggagcctctgacatggggagcaatgctaagcaagctaagtgtaaaagaaaagtgacagaataattttggaagaggaagcctcatcaaaagctcacacaaaatagagcttcccatggtgtgccctatcctaggtttaagaaaacacgtatgaagtttatgctgatgcaaagaacttgggtttttatgttaatataaagtgttgttttagcatgtggccagatgatgctctgtcatctttagaaagtgagataaccaaggaaataattgaaggagtatagggagatggattaagttgataatgacatttagggcaacttaagacctttgatcccaggttctaactcaaagaggctgaccttcccccagctaagatagcatgaggacgttgtattccaatatacgtatgattggggctacaaagctgaactaaagcaagattggtgaagtggcagggtttatagagagaagcccaggctgagttcagcttttgttggaagtgagaatccctgacatatagctttcttggagatcccaactctcattcttggtgcaactggcttccagctctccagcagtcactctcctaggtgcatgattcagtgcgtgccatgtgtcattagcttttactgataaccatattctggcttgttcccttaccccctacttctatccaattttctctgctaggggttatcattagcaattgacatgctaaaggttttggagcccacctaggggtaggtgcagctttattggcttttctgtggattctctcagtggacccacaccatctctatgtctctccactctcctgccttcagccatagcaaagaatccttccaaaatcaaactcttcacttttttgactcaagtgttgttgttcagtctctcgcgtgtcaatgtggtcatggttcatgaaaccggaccctcaagatggatgattgcttttaactactgccagctgatgtctctcagcccctgccctcatacaagatttttctcagccttcagcctaccactgcagaatccgatgtgacccaccattagggagtctgcatcttggaagagttggaaataaccctttaacatcaacatgcttcaaagactttttgcctttggcctagtaagatgcctctccagctactgagcccacaagtaacatgagcggataaaaagagacttgtttgtgctagaaatgagggtctatgctatgagggggtccaagactctggcgaaatgtgctttttcatcaatggagaaatgaaaggaaaacacaagcaagaaaaaagttaacttgtattatgtatttttactacacttttcttaaaaatagagcattgggaaaactctgaaagagactgacatttttctcaacaggaatccatacttaacagttctggctttcattaaattttgctctttggta

SEQ ID NO: 12268 - DNA, 3170 bp, Homo sapiens
  source 1..3170: mol_type = unassigned DNA
taaagggaaagggggggaaacaccaaatctatgattggacctgggcttctttttcgccaatgcaaaaaggaatatgcagcacatttttgccttcttctgcaccggtttcctaggcgcggtagtaggtgccaatttccccaacaatatccagatcgggggattatttccaaaccagcagtcacaggaacatgctgcttttagatttgctttgtcgcaactcacagagcccccgaagctgctcccccagattgatattgtgaacatcagcgacagctttgagatgacctatagattctgttcccagttctccaaaggagtctatgccatctttgggttttatgaacgtaggactgtcaacatgctgacctccttttgtggggccctccacgtctgcttcattacgccgagctttcccgttgatacatccaatcagtttgtccttcagctgcgccctgaactgcaggatgccctcatcagcatcattgaccattacaagtggcagaaatttgtctacatttatgatgccgaccggggcttatccgtcctgcagaaagtcctggatacagctgctgagaagaactggcaggtgacagcagtcaacattttgacaaccacagaggagggataccggatgctctttcaggacctggagaagaaaaaggagcggctggtggtggtggactgtgaatcagaacgcctcaatgctatcttgggccagattataaagctagagaagaatggcatcggctaccactacattcttgcaaatctgggcttcatggacattgacttaaacaaattcaaggagagtggcgccaatgtgacaggtttccagctggtgaactacacagacactattccggccaagatcatgcagcagtggaagaatagtgatgctcgagaccacacacgggtggactggaagagacccaagtacacctctgcgctcacctacgatggggtgaaggtgatggctgaggctttccagagcctgcggaggcagagaattgatatatctcgccgggggaatgctggggattgtctggctaacccagctgttccctggggccaagggatcgacatccagagagctctgcagcaggtgcgatttgaaggtttaacaggaaacgtgcagtttaatgagaaaggacgccggaccaactacacgctccacgtgattgaaatgaaacatgacggcatccgaaagattggttactggaatgaagatgataagtttgtccctgcagccaccgatgcccaagctgggggcgataattcaagtgttcagaacagaacatacatcgtcacaacaatcctagaagatccttatgtgatgctcaagaagaacgccaatcagtttgagggcaatgaccgttacgagggctactgtgtagagctggcggcagagattgccaagcacgtgggctactcctaccgtctggagattgtcagtgatggaaaatacggagcccgagaccctgacacgaaggcctggaatggcatggtgggagagctggtctatggaagagcagatgtggctgtggctcccttaactatcactttggtccgggaagaagttatagatttctccaaaccatttatgagtttggggatctccatcatgattaaaaaaccacagaaatccaagccgggtgtcttctccttccttgatcctttggcttatgagatttggatgtgcattgtttttgcctacattggagtgagtgttgtcctcttcctggtcagccgcttcagtccctatgaatggcacagtgaagagtttgaggaaggacgggaccagacaaccagtgaccagtccaatgagtttgggatattcaacagtttgtggttctccctgggagccttcatgcagcaaggatgtgacatttctcccaggtccctgtctggtcgcatcgttggtggcgtctggtggttcttcaccttaatcatcatctcctcatatacagccaatctggccgccttcctgaccgtggagaggatggtgtctcccattgagagtgcagaggacctagcgaagcagacagaaattgcctacgggacgctggaagcaggatctactaaggagttcttcaggaggtctaaaattgctgtgtttgagaagatgtggacatacatgaagtcagcagagccatcagtttttgtgcggaccacagaggaggggatgattcgagtgaggaaatccaaaggcaaatatgcctacctcctggagtccaccatgaatgagtacattgagcagcggaaaccctgtgacaccatgaaggtgggaggtaacttggattccaaaggctatggcattgcaacacccaaggggtctgccctgagaggtcccgtaaacctagcggttttgaaactcagtgagcaaggcgtcttagacaagctgaaaagcaaatggtggtacgataaaggggaatgtggaagcaaggactccggaagtaaggacaagacaagcgctctgagcctcagcaatgtggcaggcgtgttctacatcctgatcggaggacttggactagccatgctggttgccttaatcgagttctgctacaaatcccgtagtgaatccaagcggatgaagggtttttgtttgatcccacagcaatccatcaacgaagccatacggacatcgaccctcccccgcaacagcggggcaggagccagcagcggcggcagtggagagaatggtcgggtggtcagccatgacttccccaagtccatgcaatcgattccttgcatgagccacagttcagggatgcccttgggagccacgggattgtaactggagcagatggagaccccttggggagcaggctcgggctccccagccccatcccaaacccttcagtgccaaaaacaacaacaaaatgaaacgcaaccaccaccaaccactgcgaccacaagaaggatgattcaacaggttttcctgaagaattgaaaaaccattttgctgtcccttttccttttttgatgttctttcacccttttctgtttgctaagtgaggatgaaaaaataacactgtactgcaataaggggagagtaaccctgtctaatgaaacctgtgtctctgagagtagagtcactggaacactaatgaggaaactgcactgttttattttaattcagttgttagtgtgtcttagtgtgtgcaattttt

SEQ ID NO: 12269 - DNA, 3041 bp, Homo sapiens
  source 1..3041: mol_type = unassigned DNA
gtgcaattgatattttgtcgggcatacatgtgctgcagtacccatctctttcagcctctccagctagctggcggcttggagtggccatggagtaacttgctttgtttcctgacacctgttaagctacatcctgaagtgtggggattatttccaaaccagcagtcacaggaacatgctgcttttagatttgctttgtcgcaactcacagagcccccgaagctgctcccccagattgatattgtgaacatcagcgacagctttgagatgacctatagattctgttcccagttctccaaaggagtctatgccatctttgggttttatgaacgtaggactgtcaacatgctgacctccttttgtggggccctccacgtctgcttcattacgccgagctttcccgttgatacatccaatcagtttgtccttcagctgcgccctgaactgcaggatgccctcatcagcatcattgaccattacaagtggcagaaatttgtctacatttatgatgccgaccggggcttatccgtcctgcagaaagtcctggatacagctgctgagaagaactggcaggtgacagcagtcaacattttgacaaccacagaggagggataccggatgctctttcaggacctggagaagaaaaaggagcggctggtggtggtggactgtgaatcagaacgcctcaatgctatcttgggccagattataaagctagagaagaatggcatcggctaccactacattcttgcaaatctgggcttcatggacattgacttaaacaaattcaaggagagtggcgccaatgtgacaggtttccagctggtgaactacacagacactattccggccaagatcatgcagcagtggaagaatagtgatgctcgagaccacacacgggtggactggaagagacccaagtacacctctgcgctcacctacgatggggtgaaggtgatggctgaggctttccagagcctgcggaggcagagaattgatatatctcgccgggggaatgctggggattgtctggctaacccagctgttccctggggccaagggatcgacatccagagagctctgcagcaggtgcgatttgaaggtttaacaggaaacgtgcagtttaatgagaaaggacgccggaccaactacacgctccacgtgattgaaatgaaacatgacggcatccgaaagattggttactggaatgaagatgataagtttgtccctgcagccaccgatgcccaagctgggggcgataattcaagtgttcagaacagaacatacatcgtcacaacaatcctagaagatccttatgtgatgctcaagaagaacgccaatcagtttgagggcaatgaccgttacgagggctactgtgtagagctggcggcagagattgccaagcacgtgggctactcctaccgtctggagattgtcagtgatggaaaatacggagcccgagaccctgacacgaaggcctggaatggcatggtgggagagctggtctatggaagagcagatgtggctgtggctcccttaactatcactttggtccgggaagaagttatagatttctccaaaccatttatgagtttggggatctccatcatgattaaaaaaccacagaaatccaagccgggtgtcttctccttccttgatcctttggcttatgagatttggatgtgcattgtttttgcctacattggagtgagtgttgtcctcttcctggtcagccgcttcagtccctatgaatggcacagtgaagagtttgaggaaggacgggaccagacaaccagtgaccagtccaatgagtttgggatattcaacagtttgtggttctccctgggagccttcatgcagcaaggatgtgacatttctcccaggtccctgtctggtcgcatcgttggtggcgtctggtggttcttcaccttaatcatcatctcctcatatacagccaatctggccgccttcctgaccgtggagaggatggtgtctcccattgagagtgcagaggacctagcgaagcagacagaaattgcctacgggacgctggaagcaggatctactaaggagttcttcaggaggtctaaaattgctgtgtttgagaagatgtggacatacatgaagtcagcagagccatcagtttttgtgcggaccacagaggaggggatgattcgagtgaggaaatccaaaggcaaatatgcctacctcctggagtccaccatgaatgagtacattgagcagcggaaaccctgtgacaccatgaaggtgggaggtaacttggattccaaaggctatggcattgcaacacccaaggggtctgccctgagaggtcccgtaaacctagcggttttgaaactcagtgagcaaggcgtcttagacaagctgaaaagcaaatggtggtacgataaaggggaatgtggaagcaaggactccggaagtaaggacaagacaagcgctctgagcctcagcaatgtggcaggcgtgttctacatcctgatcggaggacttggactagccatgctggttgccttaatcgagttctgctacaaatcccgtagtgaatccaagcggatgaagggtttttgtttgatcccacagcaatccatcaacgaagccatacggacatcgaccctcccccgcaacagcggggcaggagccagcagcggcggcagtggagagaatggtcgggtggtcagccatgacttccccaagtccatgcaatcgattccttgcatgagccacagttcagggatgcccttgggagccacgggattgtaactggagcagatggagaccccttggggagcaggctcgggctccccagccccatcccaaacccttcagtgccaaaaacaacaacaaaatgaaacgcaaccaccaccaaccactgcgaccacaagaaggatgattcaacaggttttcctgaagaattgaaaaaccattttgctgtcccttttccttttttgatgttctttcacccttttctgtttgctaagtgaggatgaaaaaataacactgtactgcaataaggggagagtaac

SEQ ID NO: 12270 - DNA, 2761 bp, Homo sapiens
  source 1..2761: mol_type = unassigned DNA
tcttttcccgtgctcagttaatctggctgtcagttggtgttaacgctgcagtttaagtgttcggattccaagggaaacagacaaacctcacgaaaggaaggaagcaagcaagcaaggaaggaactgcaggaggaaaagaacaggcagaacagcgagaagaataaagggaaagggggggaaacaccaaatctatgattggacctgggcttctttttcgccaatgcaaaaaggaatatgcagcacatttttgccttcttctgcaccggtttcctaggcgcggtagtaggtgccaatttccccaacaatatccagatcgggggattatttccaaaccagcagtcacaggaacatgctgcttttagatttgctttgtcgcaactcacagagcccccgaagctgctcccccagattgatattgtgaacatcagcgacagctttgagatgacctatagatgcttatccgtcctgcagaaagtcctggatacagctgctgagaagaactggcaggtgacagcagtcaacattttgacaaccacagaggagggataccggatgctctttcaggacctggagaagaaaaaggagcggctggtggtggtggactgtgaatcagaacgcctcaatgctatcttgggccagattataaagctagagaagaatggcatcggctaccactacattcttgcaaatctgggcttcatggacattgacttaaacaaattcaaggagagtggcgccaatgtgacaggtttccagctggtgaactacacagacactattccggccaagatcatgcagcagtggaagaatagtgatgctcgagaccacacacgggtggactggaagagacccaagtacacctctgcgctcacctacgatggggtgaaggtgatggctgaggctttccagagcctgcggaggcagagaattgatatatctcgccgggggaatgctggggattgtctggctaacccagctgttccctggggccaagggatcgacatccagagagctctgcagcaggtgcgatttgaaggtttaacaggaaacgtgcagtttaatgagaaaggacgccggaccaactacacgctccacgtgattgaaatgaaacatgacggcatccgaaagattggttactggaatgaagatgataagtttgtccctgcagccaccgatgcccaagctgggggcgataattcaagtgttcagaacagaacatacatcgtcacaacaatcctagaagatccttatgtgatgctcaagaagaacgccaatcagtttgagggcaatgaccgttacgagggctactgtgtagagctggcggcagagattgccaagcacgtgggctactcctaccgtctggagattgtcagtgatggaaaatacggagcccgagaccctgacacgaaggcctggaatggcatggtgggagagctggtctatggaagagcagatgtggctgtggctcccttaactatcactttggtccgggaagaagttatagatttctccaaaccatttatgagtttggggatctccatcatgattaaaaaaccacagaaatccaagccgggtgtcttctccttccttgatcctttggcttatgagatttggatgtgcattgtttttgcctacattggagtgagtgttgtcctcttcctggtcagccgcttcagtccctatgaatggcacagtgaagagtttgaggaaggacgggaccagacaaccagtgaccagtccaatgagtttgggatattcaacagtttgtggttctccctgggagccttcatgcagcaaggatgtgacatttctcccaggtccctgtctggtcgcatcgttggtggcgtctggtggttcttcaccttaatcatcatctcctcatatacagccaatctggccgccttcctgaccgtggagaggatggtgtctcccattgagagtgcagaggacctagcgaagcagacagaaattgcctacgggacgctggaagcaggatctactaaggagttcttcaggaggtctaaaattgctgtgtttgagaagatgtggacatacatgaagtcagcagagccatcagtttttgtgcggaccacagaggaggggatgattcgagtgaggaaatccaaaggcaaatatgcctacctcctggagtccaccatgaatgagtacattgagcagcggaaaccctgtgacaccatgaaggtgggaggtaacttggattccaaaggctatggcattgcaacacccaaggggtctgccctgagaaatccagtaaacctggcagtgttaaaactgaacgagcaggggcttttggacaaattgaaaaacaaatggtggtacgacaagggcgagtgcggcagcgggggaggtgattccaaggacaagacaagcgctctgagcctcagcaatgtggcaggcgtgttctacatcctgatcggaggacttggactagccatgctggttgccttaatcgagttctgctacaaatcccgtagtgaatccaagcggatgaagggtttttgtttgatcccacagcaatccatcaacgaagccatacggacatcgaccctcccccgcaacagcggggcaggagccagcagcggcggcagtggagagaatggtcgggtggtcagccatgacttccccaagtccatgcaatcgattccttgcatgagccacagttcagggatgcccttgggagccacgggattgtaactggagcagatggagaccccttggggagcaggctcgggctccccag

SEQ ID NO: 12271 - DNA, 5233 bp, Homo sapiens
  source 1..5233: mol_type = unassigned DNA
gtgcaattgatattttgtcgggcatacatgtgctgcagtacccatctctttcagcctctccagctagctggcggcttggagtggccatggagtaacttgctttgtttcctgacacctgttaagctacatcctgaagtgtggggattatttccaaaccagcagtcacaggaacatgctgcttttagatttgctttgtcgcaactcacagagcccccgaagctgctcccccagattgatattgtgaacatcagcgacagctttgagatgacctatagattctgttcccagttctccaaaggagtctatgccatctttgggttttatgaacgtaggactgtcaacatgctgacctccttttgtggggccctccacgtctgcttcattacgccgagctttcccgttgatacatccaatcagtttgtccttcagctgcgccctgaactgcaggatgccctcatcagcatcattgaccattacaagtggcagaaatttgtctacatttatgatgccgaccggggcttatccgtcctgcagaaagtcctggatacagctgctgagaagaactggcaggtgacagcagtcaacattttgacaaccacagaggagggataccggatgctctttcaggacctggagaagaaaaaggagcggctggtggtggtggactgtgaatcagaacgcctcaatgctatcttgggccagattataaagctagagaagaatggcatcggctaccactacattcttgcaaatctgggcttcatggacattgacttaaacaaattcaaggagagtggcgccaatgtgacaggtttccagctggtgaactacacagacactattccggccaagatcatgcagcagtggaagaatagtgatgctcgagaccacacacgggtggactggaagagacccaagtacacctctgcgctcacctacgatggggtgaaggtgatggctgaggctttccagagcctgcggaggcagagaattgatatatctcgccgggggaatgctggggattgtctggctaacccagctgttccctggggccaagggatcgacatccagagagctctgcagcaggtgcgatttgaaggtttaacaggaaacgtgcagtttaatgagaaaggacgccggaccaactacacgctccacgtgattgaaatgaaacatgacggcatccgaaagattggttactggaatgaagatgataagtttgtccctgcagccaccgatgcccaagctgggggcgataattcaagtgttcagaacagaacatacatcgtcacaacaatcctagaagatccttatgtgatgctcaagaagaacgccaatcagtttgagggcaatgaccgttacgagggctactgtgtagagctggcggcagagattgccaagcacgtgggctactcctaccgtctggagattgtcagtgatggaaaatacggagcccgagaccctgacacgaaggcctggaatggcatggtgggagagctggtctatggaagagcagatgtggctgtggctcccttaactatcactttggtccgggaagaagttatagatttctccaaaccatttatgagtttggggatctccatcatgattaaaaaaccacagaaatccaagccgggtgtcttctccttccttgatcctttggcttatgagatttggatgtgcattgtttttgcctacattggagtgagtgttgtcctcttcctggtcagccgcttcagtccctatgaatggcacagtgaagagtttgaggaaggacgggaccagacaaccagtgaccagtccaatgagtttgggatattcaacagtttgtggttctccctgggagccttcatgcagcaaggatgtgacatttctcccaggtccctgtctggtcgcatcgttggtggcgtctggtggttcttcaccttaatcatcatctcctcatatacagccaatctggccgccttcctgaccgtggagaggatggtgtctcccattgagagtgcagaggacctagcgaagcagacagaaattgcctacgggacgctggaagcaggatctactaaggagttcttcaggaggtctaaaattgctgtgtttgagaagatgtggacatacatgaagtcagcagagccatcagtttttgtgcggaccacagaggaggggatgattcgagtgaggaaatccaaaggcaaatatgcctacctcctggagtccaccatgaatgagtacattgagcagcggaaaccctgtgacaccatgaaggtgggaggtaacttggattccaaaggctatggcattgcaacacccaaggggtctgccctgagaaatccagtaaacctggcagtgttaaaactgaacgagcaggggcttttggacaaattgaaaaacaaatggtggtacgacaagggcgagtgcggcagcgggggaggtgattccaaggacaagacaagcgctctgagcctcagcaatgtggcaggcgtgttctacatcctgatcggaggacttggactagccatgctggttgccttaatcgagttctgctacaaatcccgtagtgaatccaagcggatgaagggtttttgtttgatcccacagcaatccatcaacgaagccatacggacatcgaccctcccccgcaacagcggggcaggagccagcagcggcggcagtggagagaatggtcgggtggtcagccatgacttccccaagtccatgcaatcgattccttgcatgagccacagttcagggatgcccttgggagccacgggattgtaactggagcagatggagaccccttggggagcaggctcgggctccccagccccatcccaaacccttcagtgccaaaaacaacaacaaaatgaaacgcaaccaccaccaaccactgcgaccacaagaaggatgattcaacaggttttcctgaagaattgaaaaaccattttgctgtcccttttccttttttgatgttctttcacccttttctgtttgctaagtgaggatgaaaaaataacactgtactgcaataaggggagagtaaccctgtctaatgaaacctgtgtctctgagagtagagtcactggaacactaatgaggaaactgcactgttttattttaattcagttgttagtgtgtcttagtgtgtgcaattttttttcttactaatatccatggtttgcaggttctgttaggccctttccttctccttacttcttatccccaactccctacccacccctcttcagttttcagattggagattcaagatttgttccactttacaagcaagaggaaaaaaaagcaaccttcaaactaattctccatgggggctctccatgttaccctccactccttggcccaaacctctgatggagatagacattgttggagaagtgggctgccttccccaagtggggcactgcttaagcacttattcagtggagaacacaggtgaaaagcaactcaggatgagggtggtggagagggcaggggcagatgtgcagtcagagaaggactcctgaagttactgctgctcagaaaaacagttcctttaatgtggaagagccatttcataggtcataggtggtatggtatatttcttcagagtcaaccttggccctgagaagtatgtcctcctggtgtgctcaggctcaacggcagtctggtggctgaaggcacttggcctcctaaaccaagcagaattttgggaagagataacagccagggagatattgcccatgattctcactttttctttgcctggcatctaagcaggaacccattgtggagtagactctcttcttctatggagcctctgacatggggagcaatgctaagcaagctaagtgtaaaagaaaagtgacagaataattttggaagaggaagcctcatcaaaagctcacacaaaatagagcttcccatggtgtgccctatcctaggtttaagaaaacacgtatgaagtttatgctgatgcaaagaacttgggtttttatgttaatataaagtgttgttttagcatgtggccagatgatgctctgtcatctttagaaagtgagataaccaaggaaataattgaaggagtatagggagatggattaagttgataatgacatttagggcaacttaagacctttgatcccaggttctaactcaaagaggctgaccttcccccagctaagatagcatgaggacgttgtattccaatatacgtatgattggggctacaaagctgaactaaagcaagattggtgaagtggcagggtttatagagagaagcccaggctgagttcagcttttgttggaagtgagaatccctgacatatagctttcttggagatcccaactctcattcttggtgcaactggcttccagctctccagcagtcactctcctaggtgcatgattcagtgcgtgccatgtgtcattagcttttactgataaccatattctggcttgttcccttaccccctacttctatccaattttctctgctaggggttatcattagcaattgacatgctaaaggttttggagcccacctaggggtaggtgcagctttattggcttttctgtggattctctcagtggacccacaccatctctatgtctctccactctcctgccttcagccatagcaaagaatccttccaaaatcaaactcttcacttttttgactcaagtgttgttgttcagtctctcgcgtgtcaatgtggtcatggttcatgaaaccggaccctcaagatggatgattgcttttaactactgccagctgatgtctctcagcccctgccctcatacaagatttttctcagccttcagcctaccactgcagaatccgatgtgacccaccattagggagtctgcatcttggaagagttggaaataaccctttaacatcaacatgcttcaaagactttttgcctttggcctagtaagatgcctctccagctactgagcccacaagtaacatgagcggataaaaagagacttgtttgtgctagaaatgagggtctatgctatgagggggtccaagactctggcgaaatgtgctttttcatcaatggagaaatgaaaggaaaacacaagcaagaaaaaagttaacttgtattatgtatttttactacacttttcttaaaaatagagcattgggaaaactctgaaagagactgacatttttctcaacaggaatccatacttaacagttctggctttcattaaattttgctctttggta

SEQ ID NO: 12272 - DNA, 2643 bp, Homo sapiens
  source 1..2643: mol_type = unassigned DNA
agttaatctggctgtcagttggtgttaacgctgcagtttaagtgttcggattccaagggaaacagacaaacctcacgaaaggaaggaagcaagcaagcaaggaaggaactgcaggaggaaaagaacaggcagaacagcgagaagaataaagggaaagggggggaaacaccaaatctatgattggacctgggcttctttttcgccaatgcaaaaaggaatatgcagcacatttttgccttcttctgcaccggtttcctaggcgcggtagtaggtgccaatttccccaacaatatccagatcgtctgttcccagttctccaaaggagtctatgccatctttgggttttatgaacgtaggactgtcaacatgctgacctccttttgtggggccctccacgtctgcttcattacgccgagctttcccgttgatacatccaatcagtttgtccttcagctgcgccctgaactgcaggatgccctcatcagcatcattgaccattacaagtggcagaaatttgtctacatttatgatgccgaccggggcttatccgtcctgcagaaagtcctggatacagctgctgagaagaactggcaggtgacagcagtcaacattttgacaaccacagaggagggataccggatgctctttcaggacctggagaagaaaaaggagcggctggtggtggtggactgtgaatcagaacgcctcaatgctatcttgggccagattataaagctagagaagaatggcatcggctaccactacattcttgcaaatctgggcttcatggacattgacttaaacaaattcaaggagagtggcgccaatgtgacaggtttccagctggtgaactacacagacactattccggccaagatcatgcagcagtggaagaatagtgatgctcgagaccacacacgggtggactggaagagacccaagtacacctctgcgctcacctacgatggggtgaaggtgatggctgaggctttccagagcctgcggaggcagagaattgatatatctcgccgggggaatgctggggattgtctggctaacccagctgttccctggggccaagggatcgacatccagagagctctgcagcaggtgcgatttgaaggtttaacaggaaacgtgcagtttaatgagaaaggacgccggaccaactacacgctccacgtgattgaaatgaaacatgacggcatccgaaagattggttactggaatgaagatgataagtttgtccctgcagccaccgatgcccaagctgggggcgataattcaagtgttcagaacagaacatacatcgtcacaacaatcctagaagatccttatgtgatgctcaagaagaacgccaatcagtttgagggcaatgaccgttacgagggctactgtgtagagctggcggcagagattgccaagcacgtgggctactcctaccgtctggagattgtcagtgatggaaaatacggagcccgagaccctgacacgaaggcctggaatggcatggtgggagagctggtctatggaagagcagatgtggctgtggctcccttaactatcactttggtccgggaagaagttatagatttctccaaaccatttatgagtttggggatctccatcatgattaaaaaaccacagaaatccaagccgggtgtcttctccttccttgatcctttggcttatgagatttggatgtgcattgtttttgcctacattggagtgagtgttgtcctcttcctggtcagccgcttcagtccctatgaatggcacagtgaagagtttgaggaaggacgggaccagacaaccagtgaccagtccaatgagtttgggatattcaacagtttgtggttctccctgggagccttcatgcagcaaggatgtgacatttctcccaggtccctgtctggtcgcatcgttggtggcgtctggtggttcttcaccttaatcatcatctcctcatatacagccaatctggccgccttcctgaccgtggagaggatggtgtctcccattgagagtgcagaggacctagcgaagcagacagaaattgcctacgggacgctggaagcaggatctactaaggagttcttcaggaggtctaaaattgctgtgtttgagaagatgtggacatacatgaagtcagcagagccatcagtttttgtgcggaccacagaggaggggatgattcgagtgaggaaatccaaaggcaaatatgcctacctcctggagtccaccatgaatgagtacattgagcagcggaaaccctgtgacaccatgaaggtgggaggtaacttggattccaaaggctatggcattgcaacacccaaggggtctgccctgaggacaagacaagcgctctgagcctcagcaatgtggcaggcgtgttctacatcctgatcggaggacttggactagccatgctggttgccttaatcgagttctgctacaaatcccgtagtgaatccaagcggatgaagggtttttgtttgatcccacagcaatccatcaacgaagccatacggacatcgaccctcccccgcaacagcggggcaggagccagcagcggcggcagtggagagaatggtcgggtggtcagccatgacttccccaagtccatgcaatcgattccttgca

SEQ ID NO: 12273 - DNA, 3262 bp, Homo sapiens
  source 1..3262: mol_type = unassigned DNA
gagtgggggagccagcgctccagctagcatgaggacgggcttcttttcccgtgctcagttaatctggctgtcagttggtgttaacgctgcagtttaagtgttcggattccaagggaaacagacaaacctcacgaaaggaaggaagcaagcaagcaaggaaggaactgcaggaggaaaaggaatatgcagcacatttttgccttcttctgcaccggtttcctaggcgcggtagtaggtgccaatttccccaacaatatccagatcgggggattatttccaaaccagcagtcacaggaacatgctgcttttagatttgctttgtcgcaactcacagagcccccgaagctgctcccccagattgatattgtgaacatcagcgacagctttgagatgacctatagattctgttcccagttctccaaaggagtctatgccatctttgggttttatgaacgtaggactgtcaacatgctgacctccttttgtggggccctccacgtctgcttcattacgccgagctttcccgttgatacatccaatcagtttgtccttcagctgcgccctgaactgcaggatgccctcatcagcatcattgaccattacaagtggcagaaatttgtctacatttatgatgccgaccggggcttatccgtcctgcagaaagtcctggatacagctgctgagaagaactggcaggtgacagcagtcaacattttgacaaccacagaggagggataccggatgctctttcaggacctggagaagaaaaaggagcggctggtggtggtggactgtgaatcagaacgcctcaatgctatcttgggccagattataaagctagagaagaatggcatcggctaccactacattcttgcaaatctgggcttcatggacattgacttaaacaaattcaaggagagtggcgccaatgtgacaggtttccagctggtgaactacacagacactattccggccaagatcatgcagcagtggaagaatagtgatgctcgagaccacacacgggtggactggaagagacccaagtacacctctgcgctcacctacgatggggtgaaggtgatggctgaggctttccagagcctgcggaggcagagaattgatatatctcgccgggggaatgctggggattgtctggctaacccagctgttccctggggccaagggatcgacatccagagagctctgcagcaggtgcgatttgaaggtttaacaggaaacgtgcagtttaatgagaaaggacgccggaccaactacacgctccacgtgattgaaatgaaacatgacggcatccgaaagattggttactggaatgaagatgataagtttgtccctgcagccaccgatgcccaagctgggggcgataattcaagtgttcagaacagaacatacatcgtcacaacaatcctagaagatccttatgtgatgctcaagaagaacgccaatcagtttgagggcaatgaccgttacgagggctactgtgtagagctggcggcagagattgccaagcacgtgggctactcctaccgtctggagattgtcagtgatggaaaatacggagcccgagaccctgacacgaaggcctggaatggcatggtgggagagctggtctatggaagagcagatgtggctgtggctcccttaactatcactttggtccgggaagaagttatagatttctccaaaccatttatgagtttggggatctccatcatgattaaaaaaccacagaaatccaagccgggtgtcttctccttccttgatcctttggcttatgagatttggatgtgcattgtttttgcctacattggagtgagtgttgtcctcttcctggtcagccgcttcagtccctatgaatggcacagtgaagagtttgaggaaggacgggaccagacaaccagtgaccagtccaatgagtttgggatattcaacagtttgtggttctccctgggagccttcatgcagcaaggatgtgacatttctcccaggtccctgtctggtcgcatcgttggtggcgtctggtggttcttcaccttaatcatcatctcctcatatacagccaatctggccgccttcctgaccgtggagaggatggtgtctcccattgagagtgcagaggacctagcgaagcagacagaaattgcctacgggacgctggaagcaggatctactaaggagttcttcaggaggtctaaaattgctgtgtttgagaagatgtggacatacatgaagtcagcagagccatcagtttttgtgcggaccacagaggaggggatgattcgagtgaggaaatccaaaggcaaatatgcctacctcctggagtccaccatgaatgagtacattgagcagcggaaaccctgtgacaccatgaaggtgggaggtaacttggattccaaaggctatggcattgcaacacccaaggggtctgccctgagaggtcccgtaaacctagcggttttgaaactcagtgagcaaggcgtcttagacaagctgaaaagcaaatggtggtacgataaaggggaatgtggaagcaaggactccggaagtaaggacaagacaagcgctctgagcctcagcaatgtggcaggcgtgttctacatcctgatcggaggacttggactagccatgctggttgccttaatcgagttctgctacaaatcccgtagtgaatccaagcggatgaagggtttttgtttgatcccacagcaatccatcaacgaagccatacggacatcgaccctcccccgcaacagcggggcaggagccagcagcggcggcagtggagagaatggtcgggtggtcagccatgacttccccaagtccatgcaatcgattccttgcatgagccacagttcagggatgcccttgggagccacgggattgtaactggagcagatggagaccccttggggagcaggctcgggctccccagccccatcccaaacccttcagtgccaaaaacaacaacaaaatgaaacgcaaccaccaccaaccactgcgaccacaagaaggatgattcaacaggttttcctgaagaattgaaaaaccattttgctgtcccttttccttttttgatgttctttcacccttttctgtttgctaagtgaggatgaaaaaataacactgtactgcaataaggggagagtaaccctgtctaatgaaacctgtgtctctgagagtagagtcactggaacactaatgaggaaactgcactgttttattttaattcagttgttagtgtgtc

SEQ ID NO: 12274 - DNA, 3069 bp, Homo sapiens
  source 1..3069: mol_type = unassigned DNA
attgcttggtagatggtgcttgattccatttttaatggggattatttccaaaccagcagtcacaggaacatgctgcttttagatttgctttgtcgcaactcacagagcccccgaagctgctcccccagattgatattgtgaacatcagcgacagctttgagatgacctatagattctgttcccagttctccaaaggagtctatgccatctttgggttttatgaacgtaggactgtcaacatgctgacctccttttgtggggccctccacgtctgcttcattacgccgagctttcccgttgatacatccaatcagtttgtccttcagctgcgccctgaactgcaggatgccctcatcagcatcattgaccattacaagtggcagaaatttgtctacatttatgatgccgaccggggcttatccgtcctgcagaaagtcctggatacagctgctgagaagaactggcaggtgacagcagtcaacattttgacaaccacagaggagggataccggatgctctttcaggacctggagaagaaaaaggagcggctggtggtggtggactgtgaatcagaacgcctcaatgctatcttgggccagattataaagctagagaagaatggcatcggctaccactacattcttgcaaatctgggcttcatggacattgacttaaacaaattcaaggagagtggcgccaatgtgacaggtttccagctggtgaactacacagacactattccggccaagatcatgcagcagtggaagaatagtgatgctcgagaccacacacgggtggactggaagagacccaagtacacctctgcgctcacctacgatggggtgaaggtgatggctgaggctttccagagcctgcggaggcagagaattgatatatctcgccgggggaatgctggggattgtctggctaacccagctgttccctggggccaagggatcgacatccagagagctctgcagcaggtgcgatttgaaggtttaacaggaaacgtgcagtttaatgagaaaggacgccggaccaactacacgctccacgtgattgaaatgaaacatgacggcatccgaaagattggttactggaatgaagatgataagtttgtccctgcagccaccgatgcccaagctgggggcgataattcaagtgttcagaacagaacatacatcgtcacaacaatcctagaagatccttatgtgatgctcaagaagaacgccaatcagtttgagggcaatgaccgttacgagggctactgtgtagagctggcggcagagattgccaagcacgtgggctactcctaccgtctggagattgtcagtgatggaaaatacggagcccgagaccctgacacgaaggcctggaatggcatggtgggagagctggtctatggaagagcagatgtggctgtggctcccttaactatcactttggtccgggaagaagttatagatttctccaaaccatttatgagtttggggatctccatcatgattaaaaaaccacagaaatccaagccgggtgtcttctccttccttgatcctttggcttatgagatttggatgtgcattgtttttgcctacattggagtgagtgttgtcctcttcctggtcagccgcttcagtccctatgaatggcacagtgaagagtttgaggaaggacgggaccagacaaccagtgaccagtccaatgagtttgggatattcaacagtttgtggttctccctgggagccttcatgcagcaaggatgtgacatttctcccaggtccctgtctggtcgcatcgttggtggcgtctggtggttcttcaccttaatcatcatctcctcatatacagccaatctggccgccttcctgaccgtggagaggatggtgtctcccattgagagtgcagaggacctagcgaagcagacagaaattgcctacgggacgctggaagcaggatctactaaggagttcttcaggaggtctaaaattgctgtgtttgagaagatgtggacatacatgaagtcagcagagccatcagtttttgtgcggaccacagaggaggggatgattcgagtgaggaaatccaaaggcaaatatgcctacctcctggagtccaccatgaatgagtacattgagcagcggaaaccctgtgacaccatgaaggtgggaggtaacttggattccaaaggctatggcattgcaacacccaaggggtctgccctgagaaatccagtaaacctggcagtgttaaaactgaacgagcaggggcttttggacaaattgaaaaacaaatggtggtacgacaagggcgagtgcggcagcgggggaggtgattccaaggacaagacaagcgctctgagcctcagcaatgtggcaggcgtgttctacatcctgatcggaggacttggactagccatgctggttgccttaatcgagttctgctacaaatcccgtagtgaatccaagcggatgaagggtttttgtttgatcccacagcaatccatcaacgaagccatacggacatcgaccctcccccgcaacagcggggcaggagccagcagcggcggcagtggagagaatggtcgggtggtcagccatgacttccccaagtccatgcaatcgattccttgcatgagccacagttcagggatgcccttgggagccacgggattgtaactggagcagatggagaccccttggggagcaggctcgggctccccagccccatcccaaacccttcagtgccaaaaacaacaacaaaatgaaacgcaaccaccaccaaccactgcgaccacaagaaggatgattcaacaggttttcctgaagaattgaaaaaccattttgctgtcccttttccttttttgatgttctttcacccttttctgtttgctaagtgaggatgaaaaaataacactgtactgcaataaggggagagtaaccctgtctaatgaaacctgtgtctctgagagtagagtcactggaacactaatgaggaaactgcactgttttattttaattcagttgttagtgtgtcttagtgtgtgcaattttttttcttactaatatccat

SEQ ID NO: 12275 - DNA, 3445 bp, Homo sapiens
  source 1..3445: mol_type = unassigned DNA
ccgagacactgggaccacagcggcagctccgctgaaaactgcattcagccagtcctccggacttctggagcggggacagggcgcagggcatcagcagccaccagcaggacctgggaaatagggattcttctgcctccacttcaggttttagcagcttggtgctaaattgctgtctcaaaatgcagaggatctaatttgcagaggaaaacagccaaagaaggaagaggaggaaaaggaaaaaaaaaggggtatattgtggatgctctacttttcttggaaatgcaaaagattatgcatatttctgtcctcctttctcctgttttatggggactgatttttggtgtctcttctaacagcatacagataggggggctatttcctaggggcgccgatcaagaatacagtgcatttcgagtagggatggttcagttttccacttcggagttcagactgacaccccacatcgacaatttggaggtggcaaacagcttcgcagtcactaatgctttctgctcccagttttcgagaggagtctatgctatttttggattttatgacaagaagtctgtaaataccatcacatcattttgcggaacactccacgtctccttcatcactcccagcttcccaacagatggcacacatccatttgtcattcagatgagacccgacctcaaaggagctctccttagcttgattgaatactatcaatgggacaagtttgcatacctctatgacagtgacagaggcttatcaacactgcaagctgtgctggattctgctgctgaaaagaaatggcaagtgactgctatcaatgtgggaaacattaacaatgacaagaaagatgagatgtaccgatcactttttcaagatctggagttaaaaaaggaacggcgtgtaattctggactgtgaaagggataaagtaaacgacattgtagaccaggttattaccattggaaaacatgttaaagggtaccactacatcattgcaaatctgggatttactgatggagacctattaaaaatccagtttggaggtgcaaatgtctctggatttcagatagtggactatgatgattcgttggtatctaaatttatagaaagatggtcaacactggaagaaaaagaataccctggagctcacacaacaacaattaagtatacttctgctctgacctatgatgccgttcaagtgatgactgaagccttccgcaacctaaggaagcaaagaattgaaatctcccgaagggggaatgcaggagactgtctggcaaacccagcagtgccctggggacaaggtgtagaaatagaaagggccctcaaacaggttcaggttgaaggtctctcaggaaatataaagtttgaccagaatggaaaaagaataaactatacaattaacatcatggagctcaaaactaatgggccccggaagattggctactggagtgaagtggacaaaatggttgttacccttactgagctcccttctggaaatgacacctctgggcttgagaataagactgttgttgtcaccacaattttggaatctccgtatgttatgatgaagaaaaatcatgaaatgcttgaaggcaatgagcgctatgagggctactgtgttgacctggctgcagaaatcgccaaacattgtgggttcaagtacaagttgacaattgttggtgatggcaagtatggggccagggatgcagacacgaaaatttggaatgggatggttggagaacttgtatatgggaaagctgatattgcaattgctccattaactattacccttgtgagagaagaggtgattgacttctcaaagcccttcatgagcctcgggatatctatcatgatcaagaagcctcagaagtccaaaccaggagtgttttcctttcttgatcctttagcctatgagatctggatgtgcattgtttttgcctacattggggtcagtgtagttttattcctggtcagcagatttagcccctacgagtggcacactgaggagtttgaagatggaagagaaacacaaagtagtgaatcaactaatgaatttgggatttttaatagtctctggttttccttgggtgcctttatgcagcaaggatgcgatatttcgccaagatccctctctgggcgcattgttggaggtgtgtggtggttctttaccctgatcataatctcctcctacacggctaacttagctgccttcctgactgtagagaggatggtgtctcccatcgaaagtgctgaggatctttctaagcaaacagaaattgcttatggaacattagactctggctccactaaagagtttttcaggagatctaaaattgcagtgtttgataaaatgtggacctacatgcggagtgcggagccctctgtgtttgtgaggactacggccgaaggggtggctagagtgcggaagtccaaagggaaatatgcctacttgttggagtccacgatgaacgagtacattgagcaaaggaagccttgcgacaccatgaaagttggtggaaacctggattccaaaggctatggcatcgcaacacctaaaggatcctcattaagaaatgcggttaacctcgcagtactaaaactgaatgaacaaggcctgttggacaaattgaaaaacaaatggtggtacgacaaaggagagtgcggcagcgggggaggtgattccaaggaaaagaccagtgccctcagtctgagcaacgttgctggagtattctacatccttgtcgggggccttggtttggcaatgctggtggctttgattgagttctgttacaagtcaagggccgaggcgaaacgaatgaaggtggcaaagaatgcacagaatattaacccatcttcctcgcagaattcacagaattttgcaacttataaggaaggttacaacgtatatggcatcgaaagtgttaaaatttaggggatgaccttgaatgatgccatgaggaacaaggcaaggctgtcaattacaggaagtactggagaaaatggacgtgttatgactccagaatttcccaaagcagtgcatgctgtcccttacgtgagtcctggcatgggaatgaatgtcagtgtgactgatctctcgtgattgataagaaccttttgagtgccttacacaatggttttcttgtgtgtttattgtcaaagtggtgagaggcatccagtatcttgaagacttttctttcagccaagaattcttaaatatgtggagttcatcttgaattgtaaggaatgattaattaaaacacaacatctttttctactcgagttacagacaaagcgtggtggacatgcacagctaacatggaagtactataatttacctgaagtctttgtacagacaacaaacctgtttctgcagccactattgttagtctcttgattcataatgacttaagcacacttgacatcaactgcatcaagatgtgacatgt

SEQ ID NO: 12276 - DNA, 5621 bp, Homo sapiens
  source 1..5621: mol_type = unassigned DNA
gagagagggtgagtgtgtgtgagtgcatgggagggtgctgaatattccgagacactgggaccacagcggcagctccgctgaaaactgcattcagccagtcctccggacttctggagcggggacagggcgcagggcatcagcagccaccagcaggacctgggaaatagggattcttctgcctccacttcaggttttagcagcttggtgctaaattgctgtctcaaaatgcagaggatctaatttgcagaggaaaacagccaaagaaggaagaggaggaaaaggaaaaaaaaaggggtatattgtggatgctctacttttcttggaaatgcaaaagattatgcatatttctgtcctcctttctcctgttttatggggactgatttttggtgtctcttctaacagcatacagataggggggctatttcctaggggcgccgatcaagaatacagtgcatttcgagtagggatggttcagttttccacttcggagttcagactgacaccccacatcgacaatttggaggtggcaaacagcttcgcagtcactaatgctttctgctcccagttttcgagaggagtctatgctatttttggattttatgacaagaagtctgtaaataccatcacatcattttgcggaacactccacgtctccttcatcactcccagcttcccaacagatggcacacatccatttgtcattcagatgagacccgacctcaaaggagctctccttagcttgattgaatactatcaatgggacaagtttgcatacctctatgacagtgacagaggcttatcaacactgcaagctgtgctggattctgctgctgaaaagaaatggcaagtgactgctatcaatgtgggaaacattaacaatgacaagaaagatgagatgtaccgatcactttttcaagatctggagttaaaaaaggaacggcgtgtaattctggactgtgaaagggataaagtaaacgacattgtagaccaggttattaccattggaaaacatgttaaagggtaccactacatcattgcaaatctgggatttactgatggagacctattaaaaatccagtttggaggtgcaaatgtctctggatttcagatagtggactatgatgattcgttggtatctaaatttatagaaagatggtcaacactggaagaaaaagaataccctggagctcacacaacaacaattaagtatacttctgctctgacctatgatgccgttcaagtgatgactgaagccttccgcaacctaaggaagcaaagaattgaaatctcccgaagggggaatgcaggagactgtctggcaaacccagcagtgccctggggacaaggtgtagaaatagaaagggccctcaaacaggttcaggttgaaggtctctcaggaaatataaagtttgaccagaatggaaaaagaataaactatacaattaacatcatggagctcaaaactaatgggccccggaagattggctactggagtgaagtggacaaaatggttgttacccttactgagctcccttctggaaatgacacctctgggcttgagaataagactgttgttgtcaccacaattttggaatctccgtatgttatgatgaagaaaaatcatgaaatgcttgaaggcaatgagcgctatgagggctactgtgttgacctggctgcagaaatcgccaaacattgtgggttcaagtacaagttgacaattgttggtgatggcaagtatggggccagggatgcagacacgaaaatttggaatgggatggttggagaacttgtatatgggaaagctgatattgcaattgctccattaactattacccttgtgagagaagaggtgattgacttctcaaagcccttcatgagcctcgggatatctatcatgatcaagaagcctcagaagtccaaaccaggagtgttttcctttcttgatcctttagcctatgagatctggatgtgcattgtttttgcctacattggggtcagtgtagttttattcctggtcagcagatttagcccctacgagtggcacactgaggagtttgaagatggaagagaaacacaaagtagtgaatcaactaatgaatttgggatttttaatagtctctggttttccttgggtgcctttatgcagcaaggatgcgatatttcgccaagatccctctctgggcgcattgttggaggtgtgtggtggttctttaccctgatcataatctcctcctacacggctaacttagctgccttcctgactgtagagaggatggtgtctcccatcgaaagtgctgaggatctttctaagcaaacagaaattgcttatggaacattagactctggctccactaaagagtttttcaggagatctaaaattgcagtgtttgataaaatgtggacctacatgcggagtgcggagccctctgtgtttgtgaggactacggccgaaggggtggctagagtgcggaagtccaaagggaaatatgcctacttgttggagtccacgatgaacgagtacattgagcaaaggaagccttgcgacaccatgaaagttggtggaaacctggattccaaaggctatggcatcgcaacacctaaaggatcctcattaagaaccccagtaaatcttgcagtattgaaactcagtgagcaaggcgtcttagacaagctgaaaaacaaatggtggtacgataaaggtgaatgtggagccaaggactctggaagtaaggaaaagaccagtgccctcagtctgagcaacgttgctggagtattctacatccttgtcgggggccttggtttggcaatgctggtggctttgattgagttctgttacaagtcaagggccgaggcgaaacgaatgaaggtggcaaagaatgcacagaatattaacccatcttcctcgcagaattcacagaattttgcaacttataaggaaggttacaacgtatatggcatcgaaagtgttaaaatttaggggatgaccttgaatgatgccatgaggaacaaggcaaggctgtcaattacaggaagtactggagaaaatggacgtgttatgactccagaatttcccaaagcagtgcatgctgtcccttacgtgagtcctggcatgggaatgaatgtcagtgtgactgatctctcgtgattgataagaaccttttgagtgccttacacaatggttttcttgtgtgtttattgtcaaagtggtgagaggcatccagtatcttgaagacttttctttcagccaagaattcttaaatatgtggagttcatcttgaattgtaaggaatgattaattaaaacacaacatctttttctactcgagttacagacaaagcgtggtggacatgcacagctaacatggaagtactataatttacctgaagtctttgtacagacaacaaacctgtttctgcagccactattgttagtctcttgattcataatgacttaagcacacttgacatcaactgcatcaagatgtgacatgttttataaaaaaaggaaaaaaaacatttaaaactaaaaaatatttttaggtattttcacaaacaaactggcttttaaataaatttgcttccatattggttgaataagacaaaaacaattaaactgagtgggaagtgaataaaaaaaggctttaggtatcgattccatatttttcaaagccaaatatgtaaatgctaaggaaagtaaacaaagaggagattccaatcttgtaatttaatattgttattaaaactttaatgtatcctattctttaacatttggtgttaatataaaattacttggcaatgcttgacatttgaaataaacatttttctattgttttattgcaagtggtccaattaattttgcttagctacagtttggtcataaatcaagtgagtttaaagacactaccaagttgttaggtgcccagagaaaatttctcccttttaaaaaggccaggtgatttttcaaatgtaatcttgcccccaaagtaatatctgaatatctttttgacatgtctaaatatatatatatataaagaaatatttgttaacacaaaagcatttgatctatgtagataaatgctaatagatttaaaaagctaatattaacaaataccagaatacgtgaagttccatttttaaagtgtttgagcttacagaagagaaacattcattttaaatgaagtaaaaaatgccttgaaagtaattctttagatagttgcccattgattaaattccaaaaactaaatatgtttttagctttaaaattataaaagctgtcataaactttatatattatgaattttaaaatatgtttgagtctcctgcaatatagtttcatcccattgacatcaattaaaaataaccctaatatattatttttatatttattcctcaggtggaatggctattttaatatgcccagtgtggataaaatgtcacatttctgtaacttttgactaaagagcctatatttatctagttaatgaatttaaaggatctatctttcccttcataaaatacctcttatttccattaaagccccccaagtttaattaatttaggattttgaatgattattgacatccaatagttatttttaatatttgtattcttgttatttctggaagaaagcctttgtgtagcacttggtattttgcaaagtgcttttaaaacattcttacttaccgtatttcatagaagggaaggaaaaatgtaaggtttaacagtaagcacttgcattgaacatggaggcatgtggtatcatgatattcttcactaaatttagctgtccctaatcacagatcctaaggtaatataatataattttagtgcatttctcctcatcaggaatgctggaggtgcattttaagttttaataataagtgctagaatgaccaaattgcagactaattgtttccatattgtacttaaaatgagtttttaaaagtgaaaaagaaatgactatatacaatcaatgctatttattgtacctctgggcctactcttctaaaaattgtagcttatcgatttttctctgtcaagcttgaactaatgtaaataattgaaataatgtaaagttatattttcatgtttttatagatacaacatgacaagaatacataatgtaagagtatttcaactatggataatgttgattggataatgcacatctcagttacaagcagtactcatagtttaatatccatgtaacggtgcatcaatatattgctatataaatatgtctgtgtgcatataagtgaaaagtggtcaaacaagagtgatgacagctgtctaaaggtttttttattcattttatataaaaactgttatggaaagaccaaaatgtttatgaactattcttatgtaaatttacaattgtcctttactgtacttttttgtttacagtatagtaccttattttctgctgtgttaagtgggtgtcaaactccaagaagacatacactttctataacttctattgaagatattggaatttccaatttttcatgtgtactatgtcagaaaatgctttcgattttatttttaaatctaacatcggatggcttttccggagtgttgtaaaaacttcaatcatacataaaacatgttcttacaaaaggcaaa

SEQ ID NO: 12277 - DNA, 2798 bp, Homo sapiens
  source 1..2798: mol_type = unassigned DNA
attccagatttaaactacctagaatatacatgtttttcttaggatgaagcaaaaggaaaagactatgcctttgatacaatagaagaaaaggtcctctcatttcggatccccaaattttattaattctgccttagcgacattttccagtttgctcagattttcttggggtctgaatgcaaagcttgtgattacatggaaaggtgaaggtttctggccgcctacctcgccttcagactctcatctgggtcttgaccccttggctagcttttggatattccacccccgctgtccgagtccgtaggggggctatttcctaggggcgccgatcaagaatacagtgcatttcgagtagggatggttcagttttccacttcggagttcagactgacaccccacatcgacaatttggaggtggcaaacagcttcgcagtcactaatgctttctgctcccagttttcgagaggagtctatgctatttttggattttatgacaagaagtctgtaaataccatcacatcattttgcggaacactccacgtctccttcatcactcccagcttcccaacagatggcacacatccatttgtcattcagatgagacccgacctcaaaggagctctccttagcttgattgaatactatcaatgggacaagtttgcatacctctatgacagtgacagaggcttatcaacactgcaagctgtgctggattctgctgctgaaaagaaatggcaagtgactgctatcaatgtgggaaacattaacaatgacaagaaagatgagatgtaccgatcactttttcaagatctggagttaaaaaaggaacggcgtgtaattctggactgtgaaagggataaagtaaacgacattgtagaccaggttattaccattggaaaacatgttaaagggtaccactacatcattgcaaatctgggatttactgatggagacctattaaaaatccagtttggaggtgcaaatgtctctggatttcagatagtggactatgatgattcgttggtatctaaatttatagaaagatggtcaacactggaagaaaaagaataccctggagctcacacaacaacaattaagtatacttctgctctgacctatgatgccgttcaagtgatgactgaagccttccgcaacctaaggaagcaaagaattgaaatctcccgaagggggaatgcaggagactgtctggcaaacccagcagtgccctggggacaaggtgtagaaatagaaagggccctcaaacaggttcaggttgaaggtctctcaggaaatataaagtttgaccagaatggaaaaagaataaactatacaattaacatcatggagctcaaaactaatgggccccggaagattggctactggagtgaagtggacaaaatggttgttacccttactgagctcccttctggaaatgacacctctgggcttgagaataagactgttgttgtcaccacaattttggaatctccgtatgttatgatgaagaaaaatcatgaaatgcttgaaggcaatgagcgctatgagggctactgtgttgacctggctgcagaaatcgccaaacattgtgggttcaagtacaagttgacaattgttggtgatggcaagtatggggccagggatgcagacacgaaaatttggaatgggatggttggagaacttgtatatgggaaagctgatattgcaattgctccattaactattacccttgtgagagaagaggtgattgacttctcaaagcccttcatgagcctcgggatatctatcatgatcaagaagcctcagaagtccaaaccaggagtgttttcctttcttgatcctttagcctatgagatctggatgtgcattgtttttgcctacattggggtcagtgtagttttattcctggtcagcagatttagcccctacgagtggcacactgaggagtttgaagatggaagagaaacacaaagtagtgaatcaactaatgaatttgggatttttaatagtctctggttttccttgggtgcctttatgcagcaaggatgcgatatttcgccaagatccctctctgggcgcattgttggaggtgtgtggtggttctttaccctgatcataatctcctcctacacggctaacttagctgccttcctgactgtagagaggatggtgtctcccatcgaaagtgctgaggatctttctaagcaaacagaaattgcttatggaacattagactctggctccactaaagagtttttcaggagatctaaaattgcagtgtttgataaaatgtggacctacatgcggagtgcggagccctctgtgtttgtgaggactacggccgaaggggtggctagagtgcggaagtccaaagggaaatatgcctacttgttggagtccacgatgaacgagtacattgagcaaaggaagccttgcgacaccatgaaagttggtggaaacctggattccaaaggctatggcatcgcaacacctaaaggatcctcattaagtggagtcacattcaagacactgttatttgtttgttgtggataaatgcggttaacctcgcagtactaaaactgaatgaacaaggcctgttggacaaattgaaaaacaaatggtggtacgacaaaggagagtgcggcagcgggggaggtgattccaagaaccccagtaaatcttgcagtattgaaactcagtgagcaaggcgtcttagacaagctgaaaaacaaatggtggtacgataaaggtgaatgtggagccaaggactctggaagtaaggaaaagaccagtgccctcagtct

SEQ ID NO: 12278 - DNA, 2757 bp, Homo sapiens
  source 1..2757: mol_type = unassigned DNA
attccagatttaaactacctagaatatacatgtttttcttaggatgaagcaaaaggaaaagactatgcctttgatacaatagaagaaaaggtcctctcatttcggatccccaaattttattaattctgccttagcgacattttccagtttgctcagattttcttggggtctgaatgcaaagcttgtgattacatggaaaggtgaaggtttctggccgcctacctcgccttcagactctcatctgggtcttgaccccttggctagcttttggatattccacccccgctgtccgagtccgtaggggggctatttcctaggggcgccgatcaagaatacagtgcatttcgagtagggatggttcagttttccacttcggagttcagactgacaccccacatcgacaatttggaggtggcaaacagcttcgcagtcactaatgctttctgctcccagttttcgagaggagtctatgctatttttggattttatgacaagaagtctgtaaataccatcacatcattttgcggaacactccacgtctccttcatcactcccagcttcccaacagatggcacacatccatttgtcattcagatgagacccgacctcaaaggagctctccttagcttgattgaatactatcaatgggacaagtttgcatacctctatgacagtgacagaggcttatcaacactgcaagctgtgctggattctgctgctgaaaagaaatggcaagtgactgctatcaatgtgggaaacattaacaatgacaagaaagatgagatgtaccgatcactttttcaagatctggagttaaaaaaggaacggcgtgtaattctggactgtgaaagggataaagtaaacgacattgtagaccaggttattaccattggaaaacatgttaaagggtaccactacatcattgcaaatctgggatttactgatggagacctattaaaaatccagtttggaggtgcaaatgtctctggatttcagatagtggactatgatgattcgttggtatctaaatttatagaaagatggtcaacactggaagaaaaagaataccctggagctcacacaacaacaattaagtatacttctgctctgacctatgatgccgttcaagtgatgactgaagccttccgcaacctaaggaagcaaagaattgaaatctcccgaagggggaatgcaggagactgtctggcaaacccagcagtgccctggggacaaggtgtagaaatagaaagggccctcaaacaggttcaggttgaaggtctctcaggaaatataaagtttgaccagaatggaaaaagaataaactatacaattaacatcatggagctcaaaactaatgggccccggaagattggctactggagtgaagtggacaaaatggttgttacccttactgagctcccttctggaaatgacacctctgggcttgagaataagactgttgttgtcaccacaattttggaatctccgtatgttatgatgaagaaaaatcatgaaatgcttgaaggcaatgagcgctatgagggctactgtgttgacctggctgcagaaatcgccaaacattgtgggttcaagtacaagttgacaattgttggtgatggcaagtatggggccagggatgcagacacgaaaatttggaatgggatggttggagaacttgtatatgggaaagctgatattgcaattgctccattaactattacccttgtgagagaagaggtgattgacttctcaaagcccttcatgagcctcgggatatctatcatgatcaagaagcctcagaagtccaaaccaggagtgttttcctttcttgatcctttagcctatgagatctggatgtgcattgtttttgcctacattggggtcagtgtagttttattcctggtcagcagatttagcccctacgagtggcacactgaggagtttgaagatggaagagaaacacaaagtagtgaatcaactaatgaatttgggatttttaatagtctctggttttccttgggtgcctttatgcagcaaggatgcgatatttcgccaagatccctctctgggcgcattgttggaggtgtgtggtggttctttaccctgatcataatctcctcctacacggctaacttagctgccttcctgactgtagagaggatggtgtctcccatcgaaagtgctgaggatctttctaagcaaacagaaattgcttatggaacattagactctggctccactaaagagtttttcaggagatctaaaattgcagtgtttgataaaatgtggacctacatgcggagtgcggagccctctgtgtttgtgaggactacggccgaaggggtggctagagtgcggaagtccaaagggaaatatgcctacttgttggagtccacgatgaacgagtacattgagcaaaggaagccttgcgacaccatgaaagttggtggaaacctggattccaaaggctatggcatcgcaacacctaaaggatcctcattaagtggagtcacattcaagacactgatttgtttgttgtggataaatgcggttaacctcgcagtactaaaactgaatgaacaaggcctgttggacaaattgaaaaacaaatggtggtacgacaaaggagagtgcggcagcgggggaggtgattccaagaaccccagtaaatcttgcagtattgaaactcagtgagcaaggcgtcttagacaagctgaaaaacaaatggtggtacgataaaggtgaatgtggagccaa

SEQ ID NO: 12279 - DNA, 5209 bp, Homo sapiens
  source 1..5209: mol_type = unassigned DNA
ggggggctatttcctaggggcgccgatcaagaatacagtgcatttcgagtagggatggttcagttttccacttcggagttcagactgacaccccacatcgacaatttggaggtggcaaacagcttcgcagtcactaatgctttctgctcccagttttcgagaggagtctatgctatttttggattttatgacaagaagtctgtaaataccatcacatcattttgcggaacactccacgtctccttcatcactcccagcttcccaacagatggcacacatccatttgtcattcagatgagacccgacctcaaaggagctctccttagcttgattgaatactatcaatgggacaagtttgcatacctctatgacagtgacagaggcttatcaacactgcaagctgtgctggattctgctgctgaaaagaaatggcaagtgactgctatcaatgtgggaaacattaacaatgacaagaaagatgagatgtaccgatcactttttcaagatctggagttaaaaaaggaacggcgtgtaattctggactgtgaaagggataaagtaaacgacattgtagaccaggttattaccattggaaaacatgttaaagggtaccactacatcattgcaaatctgggatttactgatggagacctattaaaaatccagtttggaggtgcaaatgtctctggatttcagatagtggactatgatgattcgttggtatctaaatttatagaaagatggtcaacactggaagaaaaagaataccctggagctcacacaacaacaattaagtatacttctgctctgacctatgatgccgttcaagtgatgactgaagccttccgcaacctaaggaagcaaagaattgaaatctcccgaagggggaatgcaggagactgtctggcaaacccagcagtgccctggggacaaggtgtagaaatagaaagggccctcaaacaggttcaggttgaaggtctctcaggaaatataaagtttgaccagaatggaaaaagaataaactatacaattaacatcatggagctcaaaactaatgggccccggaagattggctactggagtgaagtggacaaaatggttgttacccttactgagctcccttctggaaatgacacctctgggcttgagaataagactgttgttgtcaccacaattttggaatctccgtatgttatgatgaagaaaaatcatgaaatgcttgaaggcaatgagcgctatgagggctactgtgttgacctggctgcagaaatcgccaaacattgtgggttcaagtacaagttgacaattgttggtgatggcaagtatggggccagggatgcagacacgaaaatttggaatgggatggttggagaacttgtatatgggaaagctgatattgcaattgctccattaactattacccttgtgagagaagaggtgattgacttctcaaagcccttcatgagcctcgggatatctatcatgatcaagaagcctcagaagtccaaaccaggagtgttttcctttcttgatcctttagcctatgagatctggatgtgcattgtttttgcctacattggggtcagtgtagttttattcctggtcagcagatttagcccctacgagtggcacactgaggagtttgaagatggaagagaaacacaaagtagtgaatcaactaatgaatttgggatttttaatagtctctggttttccttgggtgcctttatgcagcaaggatgcgatatttcgccaagatccctctctgggcgcattgttggaggtgtgtggtggttctttaccctgatcataatctcctcctacacggctaacttagctgccttcctgactgtagagaggatggtgtctcccatcgaaagtgctgaggatctttctaagcaaacagaaattgcttatggaacattagactctggctccactaaagagtttttcaggagatctaaaattgcagtgtttgataaaatgtggacctacatgcggagtgcggagccctctgtgtttgtgaggactacggccgaaggggtggctagagtgcggaagtccaaagggaaatatgcctacttgttggagtccacgatgaacgagtacattgagcaaaggaagccttgcgacaccatgaaagttggtggaaacctggattccaaaggctatggcatcgcaacacctaaaggatcctcattaagaaccccagtaaatcttgcagtattgaaactcagtgagcaaggcgtcttagacaagctgaaaaacaaatggtggtacgataaaggtgaatgtggagccaaggactctggaagtaaggaaaagaccagtgccctcagtctgagcaacgttgctggagtattctacatccttgtcgggggccttggtttggcaatgctggtggctttgattgagttctgttacaagtcaagggccgaggcgaaacgaatgaaggtggcaaagaatgcacagaatattaacccatcttcctcgcagaattcacagaattttgcaacttataaggaaggttacaacgtatatggcatcgaaagtgttaaaatttaggggatgaccttgaatgatgccatgaggaacaaggcaaggctgtcaattacaggaagtactggagaaaatggacgtgttatgactccagaatttcccaaagcagtgcatgctgtcccttacgtgagtcctggcatgggaatgaatgtcagtgtgactgatctctcgtgattgataagaaccttttgagtgccttacacaatggttttcttgtgtgtttattgtcaaagtggtgagaggcatccagtatcttgaagacttttctttcagccaagaattcttaaatatgtggagttcatcttgaattgtaaggaatgattaattaaaacacaacatctttttctactcgagttacagacaaagcgtggtggacatgcacagctaacatggaagtactataatttacctgaagtctttgtacagacaacaaacctgtttctgcagccactattgttagtctcttgattcataatgacttaagcacacttgacatcaactgcatcaagatgtgacatgttttataaaaaaaggaaaaaaaacatttaaaactaaaaaatatttttaggtattttcacaaacaaactggcttttaaataaatttgcttccatattggttgaataagacaaaaacaattaaactgagtgggaagtgaataaaaaaaggctttaggtatcgattccatatttttcaaagccaaatatgtaaatgctaaggaaagtaaacaaagaggagattccaatcttgtaatttaatattgttattaaaactttaatgtatcctattctttaacatttggtgttaatataaaattacttggcaatgcttgacatttgaaataaacatttttctattgttttattgcaagtggtccaattaattttgcttagctacagtttggtcataaatcaagtgagtttaaagacactaccaagttgttaggtgcccagagaaaatttctcccttttaaaaaggccaggtgatttttcaaatgtaatcttgcccccaaagtaatatctgaatatctttttgacatgtctaaatatatatatatataaagaaatatttgttaacacaaaagcatttgatctatgtagataaatgctaatagatttaaaaagctaatattaacaaataccagaatacgtgaagttccatttttaaagtgtttgagcttacagaagagaaacattcattttaaatgaagtaaaaaatgccttgaaagtaattctttagatagttgcccattgattaaattccaaaaactaaatatgtttttagctttaaaattataaaagctgtcataaactttatatattatgaattttaaaatatgtttgagtctcctgcaatatagtttcatcccattgacatcaattaaaaataaccctaatatattatttttatatttattcctcaggtggaatggctattttaatatgcccagtgtggataaaatgtcacatttctgtaacttttgactaaagagcctatatttatctagttaatgaatttaaaggatctatctttcccttcataaaatacctcttatttccattaaagccccccaagtttaattaatttaggattttgaatgattattgacatccaatagttatttttaatatttgtattcttgttatttctggaagaaagcctttgtgtagcacttggtattttgcaaagtgcttttaaaacattcttacttaccgtatttcatagaagggaaggaaaaatgtaaggtttaacagtaagcacttgcattgaacatggaggcatgtggtatcatgatattcttcactaaatttagctgtccctaatcacagatcctaaggtaatataatataattttagtgcatttctcctcatcaggaatgctggaggtgcattttaagttttaataataagtgctagaatgaccaaattgcagactaattgtttccatattgtacttaaaatgagtttttaaaagtgaaaaagaaatgactatatacaatcaatgctatttattgtacctctgggcctactcttctaaaaattgtagcttatcgatttttctctgtcaagcttgaactaatgtaaataattgaaataatgtaaagttatattttcatgtttttatagatacaacatgacaagaatacataatgtaagagtatttcaactatggataatgttgattggataatgcacatctcagttacaagcagtactcatagtttaatatccatgtaacggtgcatcaatatattgctatataaatatgtctgtgtgcatataagtgaaaagtggtcaaacaagagtgatgacagctgtctaaaggtttttttattcattttatataaaaactgttatggaaagaccaaaatgtttatgaactattcttatgtaaatttacaattgtcctttactgtacttttttgtttacagtatagtaccttattttctgctgtgttaagtgggtgtcaaactccaagaagacatacactttctataacttctattgaagatattggaatttccaatttttcatgtgtactatgtcagaaaatgctttcgattttatttttaaatctaacatcggatggcttttccggagtgttgtaaaaacttcaatcatacataaaacatgttcttacaaaaggcaaa

SEQ ID NO: 12280 - DNA, 558 bp, Homo sapiens
  source 1..558: mol_type = unassigned DNA
agcgcgcgcccctcctttccctcccggggcactgacactgttctcttgcttgctgtttgttctttgcaggggggctatttcctaggggcgccgatcaagaatacagtgcatttcgagtagggatggttcagttttccacttcggagttcagactgacaccccacatcgacaatttggaggtggcaaacagcttcgcagtcactaatgctttctgctcccagttttcgagaggagtctatgctatttttggattttatgacaagaagtctgtaaataccatcacatcattttgcggaacactccacgtctccttcatcactcccagcttcccaacagatggcacacatccatttgtcattcagatgagacccgacctcaaaggagctctccttagcttgattgaatactatcaatgggacaagtttgcatacctctatgacagtgacagaggcttatcaacactgcaagctgtgctggattctgctgctgaaaagaaatggcaagtgactgctatcaatgtgggaaacattaacaatgacaagaaagatgagatgtacc

SEQ ID NO: 12281 - DNA, 429 bp, Homo sapiens
  source 1..429: mol_type = unassigned DNA
ttcagccagtcctccggacttctggagcggggacagggcgcagggcatcagcagccaccagcaggacctgggaaatagggattcttctgcctccacttcaggttttagcagcttggtgctaaattgctgtctcaaaatgcagaggatctaatttgcagaggaaaacagccaaagaaggaagaggaggaaaaggaaaaaaaaaggggggggctatttcctaggggcgccgatcaagaatacagtgcatttcgagtagggatggttcagttttccacttcggagttcagactgacaccccacatcgacaatttggaggtggcaaacagcttcgcagtcactaatgctttctgctcccagttttcgagaggagtctatgctatttttggattttatgacaagaagtctgtaaataccatcacatcattttgc

SEQ ID NO: 12282 - DNA, 3041 bp, Homo sapiens
  source 1..3041: mol_type = unassigned DNA
aggtgaggaggatgacagggcttctgtattgctaaatgggttttcacaggagatggaagataaaaatcaaaattatttgtaacgtaagacagcagggcctggtgagaggacgcttcgccgccaacaattagcaattcggcttctacacagcagccggagatcagctttgctgcatttggtccaggttggagcatctccgcagcagctgcaacagccgcacgaaggggggctatttcctaggggcgccgatcaagaatacagtgcatttcgagtagggatggttcagttttccacttcggagttcagactgacaccccacatcgacaatttggaggtggcaaacagcttcgcagtcactaatgctttctgctcccagttttcgagaggagtctatgctatttttggattttatgacaagaagtctgtaaataccatcacatcattttgcggaacactccacgtctccttcatcactcccagcttcccaacagatggcacacatccatttgtcattcagatgagacccgacctcaaaggagctctccttagcttgattgaatactatcaatgggacaagtttgcatacctctatgacagtgacagaggcttatcaacactgcaagctgtgctggattctgctgctgaaaagaaatggcaagtgactgctatcaatgtgggaaacattaacaatgacaagaaagatgagatgtaccgatcactttttcaagatctggagttaaaaaaggaacggcgtgtaattctggactgtgaaagggataaagtaaacgacattgtagaccaggttattaccattggaaaacatgttaaagggtaccactacatcattgcaaatctgggatttactgatggagacctattaaaaatccagtttggaggtgcaaatgtctctggatttcagatagtggactatgatgattcgttggtatctaaatttatagaaagatggtcaacactggaagaaaaagaataccctggagctcacacaacaacaattaagtatacttctgctctgacctatgatgccgttcaagtgatgactgaagccttccgcaacctaaggaagcaaagaattgaaatctcccgaagggggaatgcaggagactgtctggcaaacccagcagtgccctggggacaaggtgtagaaatagaaagggccctcaaacaggttcaggttgaaggtctctcaggaaatataaagtttgaccagaatggaaaaagaataaactatacaattaacatcatggagctcaaaactaatgggccccggaagattggctactggagtgaagtggacaaaatggttgttacccttactgagctcccttctggaaatgacacctctgggcttgagaataagactgttgttgtcaccacaattttggaatctccgtatgttatgatgaagaaaaatcatgaaatgcttgaaggcaatgagcgctatgagggctactgtgttgacctggctgcagaaatcgccaaacattgtgggttcaagtacaagttgacaattgttggtgatggcaagtatggggccagggatgcagacacgaaaatttggaatgggatggttggagaacttgtatatgggaaagctgatattgcaattgctccattaactattacccttgtgagagaagaggtgattgacttctcaaagcccttcatgagcctcgggatatctatcatgatcaagaagcctcagaagtccaaaccaggagtgttttcctttcttgatcctttagcctatgagatctggatgtgcattgtttttgcctacattggggtcagtgtagttttattcctggtcagcagatttagcccctacgagtggcacactgaggagtttgaagatggaagagaaacacaaagtagtgaatcaactaatgaatttgggatttttaatagtctctggttttccttgggtgcctttatgcagcaaggatgcgatatttcgccaagatccctctctgggcgcattgttggaggtgtgtggtggttctttaccctgatcataatctcctcctacacggctaacttagctgccttcctgactgtagagaggatggtgtctcccatcgaaagtgctgaggatctttctaagcaaacagaaattgcttatggaacattagactctggctccactaaagagtttttcaggagatctaaaattgcagtgtttgataaaatgtggacctacatgcggagtgcggagccctctgtgtttgtgaggactacggccgaaggggtggctagagtgcggaagtccaaagggaaatatgcctacttgttggagtccacgatgaacgagtacattgagcaaaggaagccttgcgacaccatgaaagttggtggaaacctggattccaaaggctatggcatcgcaacacctaaaggatcctcattaagaaccccagtaaatcttgcagtattgaaactcagtgagcaaggcgtcttagacaagctgaaaaacaaatggtggtacgataaaggtgaatgtggagccaaggactctggaagtaaggaaaagaccagtgccctcagtctgagcaacgttgctggagtattctacatccttgtcgggggccttggtttggcaatgctggtggctttgattgagttctgttacaagtcaagggccgaggcgaaacgaatgaaggtggcaaagaatgcacagaatattaacccatcttcctcgcagaattcacagaattttgcaacttataaggaaggttacaacgtatatggcatcgaaagtgttaaaatttaggggatgaccttgaatgatgccatgaggaacaaggcaaggctgtcaattacaggaagtactggagaaaatggacgtgttatgactccagaatttcccaaagcagtgcatgctgtcccttacgtgagtcctggcatgggaatgaatgtcagtgtgactgatctctcgtgattgataagaaccttttgagtgccttacacaatggttttcttgtgtgtttattgtcaaagtggtgagaggcatccagtatcttgaa

SEQ ID NO: 12283 - DNA, 544 bp, Homo sapiens
  source 1..544: mol_type = unassigned DNA
agagaggagagagggagaagagagcgcgagagagggttttagcagcttggtgctaaattgctgtctcaaaatgcagaggatctaatttgcagaggaaaacagccaaagaaggaagaggaggaaaaggaaaaaaaaaggggtatattgtggatgctctacttttcttggaaatgcaaaagattatgcatatttctgtcctcctttctcctgttttatggggactgatttttggtgtctcttctaacagcatacagataggggggctatttcctaggggcgccgatcaagaatacagtgcatttcgagtagggatggttcagttttccacttcggagttcagactgacaccccacatcgacaatttggaggtggcaaacagcttcgcagtcactaatgctttctgctcccagttttcgagaggagtctatgctatttttggattttatgacaagaagtctgtaaataccatcacatcattttgcggaacactccacgtctccttcatcactcccagcttcccaacagatggcacacatccatttgt

SEQ ID NO: 12284 - DNA, 522 bp, Homo sapiens
  source 1..522: mol_type = unassigned DNA
cccgtgcgctctgtaactaggcgagtcagcatcacagcccaatggaatatactctaaagatgggattttcatgcaaaatatttaaaagattccatcttgatctcttgtgcggcttaagcatttaaagatataacttggggttctccctggatcctggctacatcccatgaagcccaagtgcacaattttggaatatttcctccacggtgctttgcttgcttgtttgctttcggctgggtcaggttttagcagcttggtgctaaattgctgtctcaaaatgcagaggatctaatttgcagaggaaaacagccaaagaaggaagaggaggaaaaggaaaaaaaaaggggtatattgtggatgctctacttttcttggaaatgcaaaagattatgcatatttctgtcctcctttctcctgttttatggggactgatttttggtgtctcttctaacagcatacagataggggggctatttcctaggggcgccgatcaagaatacagtgcatttcgagtagggatgg

SEQ ID NO: 12285 - DNA, 5834 bp, Homo sapiens
  source 1..5834: mol_type = unassigned DNA
actgcaccgggaccagcgcctccccgcttcgcgctgccctcggcctcgccccgggcccgggtggatgagccgcgcgcccgggggacatggaagcgctgacgctgtggcttctcccctggatatgccagtgcgtgtcggtgcgggccgactccatcatccacatcggtgccatcttcgaggagaacgcggccaaggacgacagggtgttccagttggcggtatccgacctgagcctcaacgatgacatcctgcagagcgagaagatcacctactccatcaaggtcatcgaggccaacaacccattccaggctgtgcaggaagcctgtgacctcatgacccaggggattttggccttggtcacgtccactggctgtgcatctgccaatgccctgcagtccctcacggatgccatgcacatcccacacctctttgtccagcgcaacccgggagggtcgccacgcaccgcatgccacctgaaccccagccccgatggtgaggcctacacactggcttcgagaccacccgtccgcctcaatgatgtcatgctcaggctggtgacggagctgcgctggcagaagttcgtcatgttctacgacagcgagtatgatatccgtgggcttcaaagctttctggaccaggcctcgcggctgggccttgacgtctctttacaaaaggtggacaagaacattagccacgtattcaccagcctcttcaccacgatgaagacagaggagctgaatcgctaccgggacacgcttcgccgcgccatcctgctgctcagcccacagggagcccactccttcatcaacgaggccgtggagaccaacctggcttccaaggacagccactgggtctttgtgaatgaggaaatcagtgacccggagatcctggatctggtccatagtgcccttggaaggatgaccgtggtccggcaaatctttccgtctgcaaaggacaatcagaaatgcacgaggaacaaccaccgcatctcctccctgctctgcgacccccaggaaggctacctccagatgctgcagatctccaacctctatctgtatgacagtgttctgatgctggccaacgcctttcacaggaagctggaggaccggaagtggcatagcatggcgagcctcaactgcatacggaaatccactaagccatggaatggtgggaggtccatgctggataccatcaaaaagggccacatcactggcctcactggggtgatggagtttcgggaggacagttcgaatccctatgtccagtttgaaatccttggcactacctatagtgagacttttggcaaagacatgcgcaagttggcgacatgggactcagagaagggcttgaatggcagcttgcaagagaggcccatgggcagccgcctccaaggattgactcttaaagtggtgactgtcttggaagagcctttcgtgatggtggctgagaacatcctaggacagcccaagcgctacaaagggttctccatagatgtcctggatgcactggccaaggctctgggctttaaatatgagatttaccaagcccctgatggcaggtacggtcaccagctccataacacctcctggaacgggatgatcggggagctcatcagcaagagagcagacttggccatctctgccatcaccatcaccccagagagggagagcgttgtggacttcagcaagcggtacatggactattcagtggggattctaattaagaagcccgaggagaaaatcagcatcttctccctctttgctccatttgatttcgctgtgtgggcctgcattgcagcagccatccctgtggttggtgtgctgatatttgtgttgaacaggatacaggctgtgagggctcagagtgctgcccagcccaggccgtcagcttctgccactctgcacagcgccatctggattgtctatggagccttcgtacagcaaggtggcgaatcttccgtgaactccatggccatgcgcatcgtgatgggcagctggtggctcttcacgctcattgtgtgctcctcctacacagccaaccttgctgccttcctcacagtgtccaggatggacaaccccataaggactttccaggacctgtccaaacaagtggaaatgtcttatggcactgtccgggattctgctgtatatgagtacttccgagccaagggcaccaaccccctggagcaggacagcacgtttgctgaactctggcggaccatcagcaagaacggaggggctgacaactgcgtgtccagtccttcagaaggcatcaggaaggcaaagaaggggaactacgccttcctgtgggatgtggccgtggtggaatacgcagccctgacggatgacgactgctcggtgactgtcatcggcaacagcatcagcagcaagggttacgggattgccctgcagcatggcagcccctacagggacctcttctcccagaggatcctggagctgcaggacacaggggacctggatgtgctgaagcagaagtggtggccgcacatgggccgctgtgacctcaccagccatgccagcgcccaggccgacggcaaatccctcaagctgcacagcttcgccggggtcttctgcatcctggccattggcctgctcctggcctgcctggtggctgccctggagttgtggtggaacagcaaccggtgccaccaggagacccccaaggaggacaaagaagtgaacttggagcaggtccaccggcgcatgaacagcctcatggatgaagacattgctcacaagcagatttccccagcgtcgattgagctctcggccctggagatggggggcctggctcccacccagaccttggagccgacacgggagtaccagaacacccagctctcggtcagcacctttctgccagagcagagcagccatggcaccagccggacactctcatcagggcccagcagcaacctgccgctgccgctgagcagctcggcgaccatgccctccatgcagtgcaaacacaggtcacccaacggggggctgttccggcagagcccggtgaagacccccatccccatgtccttccagcccgtgcctggaggcgtccttccagaggctctggacacctcccacgggacctccatctgactgcgccgcctgccctcctgcccaccctcccacccacccgaccagcagagctttttaatacaagaaaacaacaacacaaaccacacacactcgcacacacacacatacacagagactctttcatttttcttgtacatatgtgtaaataatgacagaatggagtggggtaaaagtgtattttgaatattcccaattttcgaagtcagtaaaaaaacacaaaaactgtatgaatgactttgtaaattttgttctatatgaataaaaaggcaaattacttgtgatcattctgaagtgccaaaggagcccccccattcctgggcctttctgagggcaggaggggcgaccagataaggagcccctctctgctgggggagaagggaagacgaggaaccccacatgccactcgctgccttgtcccacagcttgctgccccatttctttgctcctggcacctcgtcccttttagtccctcagcttgataaagagtgagtttggagcccgcattgggctggcccactgggttgctgtgctgtagggtgatcggctgttctgggtagcctggggctgaggaggtgccctggactcagggctatcctgtcctgtcttggatcttgcgggacgagttagtcaccgctgtgtgtgttgcagtgtgcctctgccccatgggcccgagagaagctgacaattacccatagtgaggtaattgagggctttgatactgagctgttctcatatcatactgttggccttgtttttcattttcttttcaaaattagaagaatcaaaaagtgatagaatattgggggaaggagggcagactccatcgtttcctcagggagactgggcggaggtggggttggtctggaagaaggtccatgggggcagggagttgcgaggtggggttagttgcatggaccaggtgaggtggtggaacaaaaggccaggtagaggaagaatattcccttgggtttggacccatggtcccaggtgagagaaggaagtgaggccatagatgcagggagtagaagctttgtggtgtcaggcaaacggactctgttagtaagagttgggggaggtgcccaggtgggtggaccagtactccaggtgatggggcatgctgagaaatagagaaaagagaccatgtttatttgggtaggaggaagccttgccttgcgccttaggtgagaagcataagtgtaactcccatccaccagggaagttgcttgtagccccaaaagtaaaggcctatctctgggtcataaatcctgcaggcagtccaacaaacagggctggctccagcacaaactctcccttccacctttacgaccctctccagaccagacctggagtcctcttcaagcagcaatccaacccagagcaggggccctccccactcaggcatctgataacctctgagatttccaggcctatccctgtgcaggtacagctgcagggaagcccagttttctaagcctaggaccacctaacagcgccccctccttcagttgccctttctgaggcaactaaactacagaatcagggaaagaaccattaggagtggaactgggggaatctgagttgtgtcacttcagttcctctcctaaagacaaaggttagtctgatctccagacccgtcagaatggaatacacagcccacatctgtcactgaaggaggtggagctcccacagccagcagtaatcagggagctgagagcctggttctgtgatcatggagaaatacaaagtcctattgattgcttcttctatagccttgtagagtttctagagagatgtatttatgagggtgataactagcccaggattgatttctttcctaaagtccctagtgacatgattgagcagtaaagaacggccaaatcacacagtcagctaaaagcactgtggggaagagagtgtttataattatgttatttattgctggatgctgagaatggtctgatattcgtgctacctaggcaatccattgacatttctccaatcagagcatgtggaccttggagccaggcatgctcagagaagcctaggtgggctaccatgaccccgaggaagagcaggctttgttttccatcagcacgttgggggccctgccctgaatggtcaatttttcacatatatatctctctatttttttaatcaaactctggtctcactgccttatctcacaccaactctgtttcctcattgccccctgagatggcctgtcttctggggtatagcttggatgtcttcttggatggttctgcttagaatgagtgtcaaggaggaaagagagggagatggaggatgtgtttgtgcgcctgtgtgtgtgtgtttgtgtgtgtgtgtgtgtgtgagagagagagagagagagagagagaccagcatcttcaagagaagtattctgcttatacaaaatccttaacacctcatggtgttattcttcaccatgtttatatatatatatatatatttttttttttttttagaattttctacccttggcatgaggggaaatgattgatattcaagcaagttctctaggaaaaaaaaaaacttcccaactcagatttctgtgtcagctcagaatgtatctttttttcatgctttgctctttggatttataactctgtttagactattccatacattttaggtatattttgtgccttcagacactgcaaataataatcagcatttggattaaagttgtttaataat

SEQ ID NO: 12286 - DNA, 2199 bp, Homo sapiens
  source 1..2199: mol_type = unassigned DNA
attcaccttcaaagagagctggctccctgtttcagaaagtgtagggagggactggggaccagggtcaggagcttgctggggccgtccttggcttctgtgagaattgttggcgacatgggactcagagaagggcttgaatggcagcttgcaagagaggcccatgggcagccgcctccaaggattgactcttaaagtggtgactgtcttggaagagcctttcgtgatggtggctgagaacatcctaggacagcccaagcgctacaaagggttctccatagatgtcctggatgcactggccaaggctctgggctttaaatatgagatttaccaagcccctgatggcaggtacggtcaccagctccataacacctcctggaacgggatgatcggggagctcatcagcaagagagcagacttggccatctctgccatcaccatcaccccagagagggagagcgttgtggacttcagcaagcggtacatggactattcagtggggattctaattaagaagcccgaggagaaaatcagcatcttctccctctttgctccatttgatttcgctgtgtgggcctgcattgcagcagccatccctgtggttggtgtgctgatatttgtgttgaacaggatacaggctgtgagggctcagagtgctgcccagcccaggccgtcagcttctgccactctgcacagcgccatctggattgtctatggagccttcgtacagcaaggtggcgaatcttccgtgaactccatggccatgcgcatcgtgatgggcagctggtggctcttcacgctcattgtgtgctcctcctacacagccaaccttgctgccttcctcacagtgtccaggatggacaaccccataaggactttccaggacctgtccaaacaagtggaaatgtcttatggcactgtccgggattctgctgtatatgagtacttccgagccaagggcaccaaccccctggagcaggacagcacgtttgctgaactctggcggaccatcagcaagaacggaggggctgacaactgcgtgtccagtccttcagaaggcatcaggaaggcaaagaaggggaactacgccttcctgtgggatgtggccgtggtggaatacgcagccctgacggatgacgactgctcggtgactgtcatcggcaacagcatcagcagcaagggttacgggattgccctgcagcatggcagcccctacagggacctcttctcccagaggatcctggagctgcaggacacaggggacctggatgtgctgaagcagaagtggtggccgcacatgggccgctgtgacctcaccagccatgccagcgcccaggccgacggcaaatccctcaagctgcacagcttcgccggggtcttctgcatcctggccattggcctgctcctggcctgcctggtggctgccctggagttgtggtggaacagcaaccggtgccaccaggagacccccaaggaggacaaagaagtgaacttggagcaggtccaccggcgcatgaacagcctcatggatgaagacattgctcacaagcagatttccccagcgtcgattgagctctcggccctggagatggggggcctggctcccacccagaccttggagccgacacgggagtaccagaacacccagctctcggtcagcacctttctgccagagcagagcagccatggcaccagccggacactctcatcagggcccagcagcaacctgccgctgccgctgagcagctcggcgaccatgccctccatgcagtgcaaacacaggtcacccaacggggggctgttccggcagagcccggtgaagacccccatccccatgtccttccagcccgtgcctggaggcgtccttccagaggctctggacacctcccacgggacctccatctgactgcgccgcctgccctcctgcccaccctcccacccacccgaccagcagagctttttaatacaagaaaacaacaacacaaaccacacacactcgcacacacacacatacacagagactctttcatttttcttgtacatatgtgtaaataatgacagaatggagtggggtaaaagtgtattttgaatattcccaattttcgaagtcagtaaaaaaacacaaaaactgtatgaatgactttgtaaattttgttctatatgaataaaaaggcaaattacttgtgatcattctgaagtgcc

SEQ ID NO: 12287 - DNA, 5340 bp, Homo sapiens
  source 1..5340: mol_type = unassigned DNA
tgcaaacaactctggcgatgccaaaattcccctccaagtgacacggctttgcgaaggaggtttcctcaggctgggctctttctgtcattcccttctgcctttctcggcgacgataaaaggctttgctctggcaataggaatttagaaaaaaagaaaaagctgcgctaaactccaccgtgacctcaaactctttggactgtttgaaaaaaaaaaaattggaagaaaatccatcctccaagagaatcggcataggaggagatggaagttttcccctttctcttggttttgtccgtctggtggtctcgaacctgggactcggcgaatgcggattcgatcattcacatcggagcaatttttgatgaatctgccaaaaaggatgatgaggtatttcgcactgcggttggtgaccttaaccagaatgaggagatcttacagactgagaaaatcacattttcagtgacgtttgttgatggcaacaaccctttccaagcagttcaagaagcctgtgaacttatgaatcaaggcatcttggccctggtcagctccattggctgcacgtcagcaggatccctccagtctttggcagacgccatgcatatcccccacctcttcattcagcgctcaacagctgggaccccaaggagtggctgtggactcacccggagcaacaggaatgatgactacactctctcagttcgcccacctgtctacttgcatgatgttatcctaagagtggtcacagagtatgcctggcagaaattcattatattctatgatagtgaatacgatatccgtggaatacaggagttcttggacaaagtctctcagcagggaatggatgttgcacttcagaaggtagaaaacaacatcaataaaatgattaccactctctttgacaccatgagaatagaagaactgaatcgctatcgagacactcttaggcgagcgatccttgttatgaatcctgctacagccaaatccttcattactgaggttgtggagactaatttggttgcttttgactgtcactggatcattataaatgaggaaataaacgatgtggacgtacaggaacttgtaagaaggtcaattggaaggttaacgattattcggcagacatttccagttccccagaacataagtcagcggtgtttccgtggcaaccatcgaatatcttcaacattgtgtgatccaaaggatccatttgctcagaatatggagatttccaacctttacatatatgacacggtgcttctgcttgctaatgcttttcataagaagctggaggaccgaaagtggcacagcatggcaagtctgtcatgtatcagaaagaactcaaagccctggcagggtgggcgctccatgttggagaccatcaagaagggtggagttagtgggttgactggagagctagaatttggagaaaatggaggcaatcccaatgtccactttgaaatccttggaaccaactatggagaagagcttggcagaggtgttcgaaaacttggttgctggaatcctgtcacaggtctgaatgggtcactgactgacaagaaattggagaataacatgcgtggagtggttctacgtgtagtaactgttctggaagaaccttttgtgatggtctctgaaaatgtcttgggtaagccgaagaaataccagggcttctccattgatgttttggatgccttatctaactacctgggttttaactacgaaatttacgtagcaccggatcacaaatacggaagcccacaagaagatgggacatggaatggcttggtaggagaacttgtctttaagagagccgacatagggatttctgctttaaccatcactccagatcgtgaaaatgtggtggactttacgacacgttacatggactactcagtgggggtactacttcgaagggctgaaaagacagtggatatgtttgcctgtcttgcaccatttgatctctctctatgggcttgcattgctggcacagtccttctggtgggtctactggtctacctcttgaactggcttaatcccccacgattacaaatgggatcaatgacgtctactactctctacaactccatgtggtttgtgtatggatcttttgtacaacaaggcggggaagtcccgtacacgactctggctacccgaatgatgatgggggcttggtggctatttgctttgattgttatctcatcttacacggcaaacctcgctgctttcctcactattacacgcattgaaagttccatccagtctctccaggacctttccaagcaaacagaaatcccttatggcacagtcctagactctgcggtatatgagcatgtccgcatgaaaggactgaatccttttgagagggacagcatgtattcccaaatgtggcggatgatcaaccgaagcaatggatcggagaacaatgttctggagtcccaggcaggcattcaaaaggtaaaatatggaaattatgctttcgtatgggatgcagctgtattggaatatgtggctatcaatgacccagattgttccttttacaccattggaaatactgttgctgatcggggatatggaattgcattacaacatggcagtccttaccgagatgttttttcacaaaggatcctggagcttcagcagaatggtgacatggacatcctgaagcacaaatggtggcctaagaatggccagtgtgacctgtactcgtcagtggacacaaagcagaaaggaggcgccctggacataaagagctttgcaggggtcttttgtatcctggctgctggaattgtcctctcctgcttcatagccatgctggagacgtggtggaacaagaggaaaggctcccgggttccatcaaaagaggatgacaaggaaattgacctggagcacctccatagacgtgtaaatagcttgtgcacagatgacgacagcccccataaacagttttccacctcgtcaattgatttgacccctctggacattgacactttgccaacacgacaagcactggagcaaatcagtgatttcaggaacactcatattaccacaacaacctttatcccagagcagatccagactcttagccgcacactgtcagctaaagctgcttctggtttcacttttggcaacgtgcctgagcaccgaactggcccttttaggcacagggcacctaatgggggctttttcaggagtcctataaaaacaatgtcatctattccttatcaaccaactcctaccctggggctcaatctgggtaatgatccagaccgaggcacctccatatgagcatcaaacaaatctcttcactgtttcttttttaggactccctttgcaaggagcaactgtaatattgtgggactaacatggatgtaacgtttaaaaaaaagatcaggattattagtaacaattctagttttttcctcccaccttctccctctcctctctcctctatgattttctctctttccccctcccttcctgtacattttcctccactttttttcattactcaacttgttccccaagaaggtagtgtactaggatcctattagtctgcttttcatatactgtacatcaagtataggaaatgtgcactgagtatactaaaagtatatgcaggattaattttacataaaggcctcttctgtaacatttctctattttttgaaatacaattgcaataacttcagtctttttacattcttctgctgcatccatacaatgctccactgctgttgagtgtcctttaactgtggaccaaaggcaacccctgcagtgtttataaaacaattttaagaccattcaggccacataagatgagaatgcaattttgtaggattacaaaaaagccattaatatgccagtcaagactacagttaaaactactcttgcactgcaacagtgcatatgacctttatgtgattgtacagtattaaaagttttttcttatgtacagtaaactttatcatatggcagaagcctctattgtgttaaataaattagtatttcatatatatacatatatatgcacctatataatgtgtatatatataaaaaggcagccattgctattgcaattcatttaataaagctttagtttaaacaaaagtattgtatacaggaactatgtatagtgcaggggttcttttcagttagaaaaggcaggttgctttaatgttattctgactcgcattgtttgccaacagaaaatattttatacttttgttattaaagcatccagggcaatttaatatttgttcctagatgtaactcatttgaataggttttgcatttgttattcagcagtgtataaagctaaccttgataattttacttttaattaattatctaaatgaaaaatgctattagctgaaccacatccacaacagcacatagagctctagaagagttgaaacatagatcattgaaggttaaaaatcctcttccaaagcagcaagtcaatcaatacaataatgatatttggggaggggtgggagcccttaagaactattgatgtggccttaaattactgtcatttattatcctaaagaagaaaacataataaccataatgggctctcaactcaactcccttttttatttagttctatttggaggagttatgtattttttacattagtgccaagtatatagaaggatgacagcaaaaacagtgcctctttgtgcacaatccttttaaagtagcattcttacttgttagaaatgtagaatgaactttgtttgtaatccttaaattaaaatgtggtaagtaggaagcaagaacttattctgtgtttttacgcagccatacacttactttaatctaactcattctgtggctaggattgatataggaatcaacctatgtgatttgctttaggagaaattaaaaggtatattcttaagatatattatattttgatgctaattctgttctggggagcatcttgtattgtcactgttttgtactaaatcttcaaatattgtctactgtgtaaggcagaaaaatttcttatcatgcaaaaaccattttgtttccagggtaacaagtaactaagtgcatgcacaacttgttttcccttgtaacattcatgatctcatttacaactctgattttaaaacaaaaaaatctttacaacaagctatatagggacataccagatgttgcagtgattttagctatcaacaaactgttaaccatgtacaatatttaaaataggcttattttgatgtatcgcctattatacaaacacacaaaacatttttggaggcctcagttatgagtgacagagctttctgtgtataatttgtctaaataatttgtctaataaaaatgttttctaaa

SEQ ID NO: 12288 - DNA, 2739 bp, Homo sapiens
  source 1..2739: mol_type = unassigned DNA
atggaagttttcccctttctcttggttttgtccgtctggtggtctcgaacctgggactcggcgaatgcggattcgatcattcacatcggagcaatttttgatgaatctgccaaaaaggatgatgaggtatttcgcactgcggttggtgaccttaaccagaatgaggagatcttacagactgagaaaatcacattttcagtgacgtttgttgatggcaacaaccctttccaagcagttcaagaagatatccgtggaatacaggagttcttggacaaagtctctcagcagggaatggatgttgcacttcagaaggtagaaaacaacatcaataaaatgattaccactctctttgacaccatgagaatagaagaactgaatcgctatcgagacactcttaggcgagcgatccttgttatgaatcctgctacagccaaatccttcattactgaggttgtggagactaatttggttgcttttgactgtcactggatcattataaatgaggaaataaacgatgtggacgtacaggaacttgtaagaaggtcaattggaaggttaacgattattcggcagacatttccagttccccagaacataagtcagcggtgtttccgtggcaaccatcgaatatcttcaacattgtgtgatccaaaggatccatttgctcagaatatggagatttccaacctttacatatatgacacggtgcttctgcttgctaatgcttttcataagaagctggaggaccgaaagtggcacagcatggcaagtctgtcatgtatcagaaagaactcaaagccctggcagggtgggcgctccatgttggagaccatcaagaagggtggagttagtgggttgactggagagctagaatttggagaaaatggaggcaatcccaatgtccactttgaaatccttggaaccaactatggagaagagcttggcagaggtgttcgaaaacttggttgctggaatcctgtcacaggtctgaatgggtcactgactgacaagaaattggagaataacatgcgtggagtggttctacgtgtagtaactgttctggaagaaccttttgtgatggtctctgaaaatgtcttgggtaagccgaagaaataccagggcttctccattgatgttttggatgccttatctaactacctgggttttaactacgaaatttacgtagcaccggatcacaaatacggaagcccacaagaagatgggacatggaatggcttggtaggagaacttgtctttaagagagccgacatagggatttctgctttaaccatcactccagatcgtgaaaatgtggtggactttacgacacgttacatggactactcagtgggggtactacttcgaagggctgaaaagacagtggatatgtttgcctgtcttgcaccatttgatctctctctatgggcttgcattgctggcacagtccttctggtgggtctactggtctacctcttgaactggcttaatcccccacgattacaaatgggatcaatgacgtctactactctctacaactccatgtggtttgtgtatggatcttttgtacaacaaggcggggaagtcccgtacacgactctggctacccgaatgatgatgggggcttggtggctatttgctttgattgttatctcatcttacacggcaaacctcgctgctttcctcactattacacgcattgaaagttccatccagtctctccaggacctttccaagcaaacagaaatcccttatggcacagtcctagactctgcggtatatgagcatgtccgcatgaaaggactgaatccttttgagagggacagcatgtattcccaaatgtggcggatgatcaaccgaagcaatggatcggagaacaatgttctggagtcccaggcaggcattcaaaaggtaaaatatggaaattatgctttcgtatgggatgcagctgtattggaatatgtggctatcaatgacccagattgttccttttacaccattggaaatactgttgctgatcggggatatggaattgcattacaacatggcagtccttaccgagatgttttttcacaaaggatcctggagcttcagcagaatggtgacatggacatcctgaagcacaaatggtggcctaagaatggccagtgtgacctgtactcgtcagtggacacaaagcagaaaggaggcgccctggacataaagagctttgcaggggtcttttgtatcctggctgctggaattgtcctctcctgcttcatagccatgctggagacgtggtggaacaagaggaaaggctcccgggttccatcaaaagaggatgacaaggaaattgacctggagcacctccatagacgtgtaaatagcttgtgcacagatgacgacagcccccataaacagttttccacctcgtcaattgatttgacccctctggacattgacactttgccaacacgacaagcactggagcaaatcagtgatttcaggaacactcatattaccacaacaacctttatcccagagcagatccagactcttagccgcacactgtcagctaaagctgcttctggtttcacttttggcaacgtgcctgagcaccgaactggcccttttaggcacagggcacctaatgggggctttttcaggagtcctataaaaacaatgtcatctattccttatcaaccaactcctaccctggggctcaatctgggtaatgatccagaccgaggcacctccatatga

SEQ ID NO: 12289 - DNA, 2763 bp, Homo sapiens
  source 1..2763: mol_type = unassigned DNA
atggagcacggcacactcctcgcccagcccgggctctggaccagggacaccagctgggcactcctctatttcctctgctatatcctccctcagaccgccccgcaagtactcaggatcggagggatttttgaaacagtggaaaatgagcctgttaatgttgaagaattagctttcaagtttgcagtcaccagcattaacagaaaccgaaccctgatgcctaacaccacattaacctatgacatccagagaattaacctttttgatagttttgaagcctcgcggagagcatgtgaccagctggctcttggtgtggctgctctctttggcccttcccatagctcctccgtcagtgctgtgcagtctatttgcaatgctctcgaagttccacacatacagacccgctggaaacacccctcggtggacaacaaagatttgttttacatcaacctttacccagattatgcagctatcagcagggcgatcctggatctggtcctctattacaactggaaaacagtgacagtggtgtatgaagacagcacaggtctaattcgtctacaagagctcatcaaagctccctccagatataatattaaaatcaaaatccgccagctgccctctgggaataaagatgccaagcctttactcaaggagatgaagaaaggcaaggagttctatgtgatatttgattgttcacatgaaacagccgctgaaatccttaagcagattctgttcatgggcatgatgaccgagtactatcactactttttcacaaccctggacttatttgctttggatctggaactctataggtacagtggcgtaaacatgaccgggtttcggctgcttaacattgacaaccctcacgtgtcatccatcattgagaagtggtccatggagagactgcaggccccacccaggcccgagactggccttttggatggcatgatgacaactgaagcggctctgatgtacgatgctgtgtacatggtggccattgcctcgcaccgggcatcccagctgaccgtcagctccctgcagtgccatagacataagccatggcgcctcggacccagatttatgaacctgatcaaagaggcaactgcccggtgggatggcttgactgggcatatcacctttaataaaaccaatggcttgaggaaggattttgatctggacattattagtctcaaagaggaaggaactgaaaaggctgctggcgaagtgtctaaacacttgtataaagtgtggaagaagattgggatttggaattccaacagtgggcttaacatgacggacagcaacaaagacaagtccagcaatatcactgattcattggccaacagaacactcattgtcaccaccattctggaagaaccctatgttatgtacaggaaatctgataagcctctatatggaaatgacagatttgaaggatattgcctagacctgttgaaagaattgtcaaacatcctgggtttcatttatgatgttaaactagttcccgatggcaaatatggggcccagaatgacaaaggggagtggaacgggatggttaaagaactcatagatcacagggctgacctggcagtggctcctcttaccatcacctacgtgcgggagaaagtcattgacttctccaaacccttcatgaccctaggcatcagcattctctaccggaagcccaatggtaccaatccaggcgttttctccttcctcaaccccctgtctccagatatttggatgtatgtgctcttagcctgcttgggagtcagctgtgtactctttgtgattgcaaggtttacaccctacgagtggtataacccccacccatgcaaccctgactcagacgtggtggaaaacaattttactttactaaatagtttctggtttggagttggagctctcatgcagcaaggatcagagctgatgcccaaagctctatcgaccagaatagttggagggatatggtggtttttcaccctaatcatcatttcatcctacacggccaatctggctgccttcttgacagtagagagaatggaatcccccatagattcggcagatgatctggcaaagcaaaccaagatagaatatggggcggttagagatggatcaacaatgaccttcttcaagaaatcaaaaatctccacctatgagaagatgtgggctttcatgagcagcaggcagcagaccgccctggtaagaaacagtgatgaggggatccagagagtgctcaccacagactacgcgctgctgatggagtccaccagcattgagtatgtgacgcagagaaactgcaacctcactcagatcgggggcctcattgactccaaaggttacggagtgggaacacctattggttctccttaccgggataaaattactattgctattcttcaactccaagaagaagggaagctgcatatgatgaaagagaagtggtggcgtgggaatggctgccccgaggaagacaacaaagaagccagtgccctgggagtggaaaatattggaggcatcttcattgttctggctgccggactggtcctttctgtatttgtagctattggagaattcatatacaaatcacggaagaataatgatattgaacaggctttttgtttcttttatggactgcaatgtaagcaaacccatccaaccaactccacttctggaactactttatctacggatttagaatgtggtaaattaattcgagaggagagagggattcgaaaacagtcctcagttcatactgtgtaa

SEQ ID NO: 12290 - DNA, 3179 bp, Homo sapiens
  source 1..3179: mol_type = unassigned DNA
tgtatctcggcatgaattaagaagctaggaagatggagcacggcacactcctcgcccagcccgggctctggaccagggacaccagctgggcactcctctatttcctctgctatatcctccctcagaccgccccgcaagtactcaggatcggagggatttttgaaacagtggaaaatgagcctgttaatgttgaagaattagctttcaagtttgcagtcaccagcattaacagaaaccgaaccctgatgcctaacaccacattaacctatgacatccagagaattaacctttttgatagttttgaagcctcgcggagagcatgtgaccagctggctcttggtgtggctgctctctttggcccttcccatagctcctccgtcagtgctgtgcagtctatttgcaatgctctcgaagttccacacatacagacccgctggaaacacccctcggtggacaacaaagatttgttttacatcaacctttacccagattatgcagctatcagcagggcgatcctggatctggtcctctattacaactggaaaacagtgacagtggtgtatgaagacagcacaggtctaattcgtctacaagagctcatcaaagctccctccagatataatattaaaatcaaaatccgccagctgccctctgggaataaagatgccaagcctttactcaaggagatgaagaaaggcaaggagttctatgtgatatttgattgttcacatgaaacagccgctgaaatccttaagcagattctgttcatgggcatgatgaccgagtactatcactactttttcacaaccctggacttatttgctttggatctggaactctataggtacagtggcgtaaacatgaccgggtttcggctgcttaacattgacaaccctcacgtgtcatccatcattgagaagtggtccatggagagactgcaggccccacccaggcccgagactggccttttggatggcatgatgacaactgaagcggctctgatgtacgatgctgtgtacatggtggccattgcctcgcaccgggcatcccagctgaccgtcagctccctgcagtgccatagacataagccatggcgcctcggacccagatttatgaacctgatcaaagaggcccggtgggatggcttgactgggcatatcacctttaataaaaccaatggcttgaggaaggattttgatctggacattattagtctcaaagaggaaggaactgaaaaggctgctggcgaagtgtctaaacacttgtataaagtgtggaagaagattgggatttggaattccaacagtgggcttaacatgacggacagcaacaaagacaagtccagcaatatcactgattcattggccaacagaacactcattgtcaccaccattctggaagaaccctatgttatgtacaggaaatctgataagcctctatatggaaatgacagatttgaaggatattgcctagacctgttgaaagaattgtcaaacatcctgggtttcatttatgatgttaaactagttcccgatggcaaatatggggcccagaatgacaaaggggagtggaacgggatggttaaagaactcatagatcacagggctgacctggcagtggctcctcttaccatcacctacgtgcgggagaaagtcattgacttctccaaacccttcatgaccctaggcatcagcattctctaccggaagcccaatggtaccaatccaggcgttttctccttcctcaaccccctgtctccagatatttggatgtatgtgctcttagcctgcttgggagtcagctgtgtactctttgtgattgcaaggtttacaccctacgagtggtataacccccacccatgcaaccctgactcagacgtggtggaaaacaattttactttactaaatagtttctggtttggagttggagctctcatgcagcaaggatcagagctgatgcccaaagctctatcgaccagaatagttggagggatatggtggtttttcaccctaatcatcatttcatcctacacggccaatctggctgccttcttgacagtagagagaatggaatcccccatagattcggcagatgatctggcaaagcaaaccaagatagaatatggggcggttagagatggatcaacaatgaccttcttcaagaaatcaaaaatctccacctatgagaagatgtgggctttcatgagcagcaggcagcagaccgccctggtaagaaacagtgatgaggggatccagagagtgctcaccacagactacgcgctgctgatggagtccaccagcattgagtatgtgacgcagagaaactgcaacctcactcagatcgggggcctcattgactccaaaggttacggagtgggaacacctattggttctccttaccgggataaaattactattgctattcttcaactccaagaagaagggaagctgcatatgatgaaagagaagtggtggcgtgggaatggctgccccgaggaagacaacaaagaagccagtgccctgggagtggaaaatattggaggcatcttcattgttctggctgccggactggtcctttctgtatttgtagctattggagaattcatatacaaatcacggaagaataatgatattgaacagaaaggaaagtcatcaagaattagattttattttaggaacaaagtaaggtttcatgggagaaaaaaacaaagccttggtgtagagaagtgtctctctttcaacgctatcatggaagaactgggaatctcactgaagaatcagaaaaaaataaagaaaaagtcaagaactaaggggaaatcttccttcacaagtatccttacttgtcatcagagacgaactcagagaaaagagactgtggcgtgatccaaggaaacgcctgtaggaagaaaaaggatgcattccctacagatttttggagaaaggatttctgaggagtgtgtgatgtgtttccatatatctatatccataactctgattatgaatacagatataagaaatacaaaagtttaaaaagctcacatagatatgacttgggaagtgacaccagttcttttaaaataaatttgtatgctcaattattttgcattttttctttttccccaataaattgttgtgtgtgctttctaaataataataaaacaacagggtttttttccagaa

SEQ ID NO: 12291 - DNA, 2712 bp, Homo sapiens
  source 1..2712: mol_type = unassigned DNA
tgtatctcggcatgaattaagaagctaggaagatggagcacggcacactcctcgcccagcccgggctctggaccagggacaccagctgggcactcctctatttcctctgctatatcctccctcagaccgccccgcaagtactcaggatcggagggatttttgaaacagtggaaaatgagcctgttaatgttgaagaattagctttcaagtttgcagtcaccagcattaacagaaaccgaaccctgatgcctaacaccacattaacctatgacatccagagaattaacctttttgatagttttgaagcctcgcggagagcatgtgaccagctggctcttggtgtggctgctctctttggcccttcccatagctcctccgtcagtgctgtgcagtctatttgcaatgctctcgaagttccacacatacagacccgctggaaacacccctcggtggacaacaaagatttgttttacatcaacctttacccagattatgcagctatcagcagggcgatcctggatctggtcctctattacaactggaaaacagtgacagtggtgtatgaagacagcacaggtctaattcgtctacaagagctcatcaaagctccctccagatataatattaaaatcaaaatccgccagctgccctctgggaataaagatgccaagcctttactcaaggagatgaagaaaggcaaggagttctatgtgatatttgattgttcacatgaaacagccgctgaaatccttaagcagattctgttcatgggcatgatgaccgagtactatcactactttttcacaaccctggacttatttgctttggatctggaactctataggtacagtggcgtaaacatgaccgggtttcggctgcttaacattgacaaccctcacgtgtcatccatcattgagaagtggtccatggagagactgcaggccccacccaggcccgagactggccttttggatggcatgatgacaactgaagcggctctgatgtacgatgctgtgtacatggtggccattgcctcgcaccgggcatcccagctgaccgtcagctccctgcagtgccatagacataagccatggcgcctcggacccagatttatgaacctgatcaaagaggcccggtgggatggcttgactgggcatatcacctttaataaaaccaatggcttgaggaaggattttgatctggacattattagtctcaaagaggaaggaactgaaaaggctgctggcgaagtgtctaaacacttgtataaagtgtggaagaagattgggatttggaattccaacagtgggcttaacatgacggacagcaacaaagacaagtccagcaatatcactgattcattggccaacagaacactcattgtcaccaccattctggaagaaccctatgttatgtacaggaaatctgataagcctctatatggaaatgacagatttgaaggatattgcctagacctgttgaaagaattgtcaaacatcctgggtttcatttatgatgttaaactagttcccgatggcaaatatggggcccagaatgacaaaggggagtggaacgggatggttaaagaactcatagatcacagggctgacctggcagtggctcctcttaccatcacctacgtgcgggagaaagtcattgacttctccaaacccttcatgaccctaggcatcagcattctctaccggaagcccaatggtaccaatccaggcgttttctccttcctcaaccccctgtctccagatatttggatgtatgtgctcttagcctgcttgggagtcagctgtgtactctttgtgattgcaaggtttacaccctacgagtggtataacccccacccatgcaaccctgactcagacgtggtggaaaacaattttactttactaaatagtttctggtttggagttggagctctcatgcagcaaggatcagagctgatgcccaaagctctatcgaccagaatagttggagggatatggtggtttttcaccctaatcatcatttcatcctacacggccaatctggctgccttcttgacagtagagagaatggaatcccccatagattcggcagatgatctggcaaagcaaaccaagatagaatatggggcggttagagatggatcaacaatgaccttcttcaagaaatcaaaaatctccacctatgagaagatgtgggctttcatgagcagcaggcagcagaccgccctggtaagaaacagtgatgaggggatccagagagtgctcaccacagactacgcgctgctgatggagtccaccagcattgagtatgtgacgcagagaaactgcaacctcactcagatcgggggcctcattgactccaaaggttacggagtgggaacacctattggttctccttaccgggataaaattactattgctattcttcaactccaagaagaagggaagctgcatatgatgaaagagaagtggtggcgtgggaatggctgccccgaggaagacaacaaagaagccagtgccctgggagtggaaaatattggaggcatcttcattgttctggctgccggactggtcctttctgtatttgtagctattggagaattcatatacaaatcacggaagaataatgatattgaacagcattactgaagtgtccgtatgccttgataatcctatcaatgtttggatcatctcagtgggggaaatgacttaa

SEQ ID NO: 12292 - DNA, 3140 bp, Homo sapiens
  source 1..3140: mol_type = unassigned DNA
agcgcgcagcgtgcttggaaccggagcatccagagaggatgaggcggggacccggcccaagttgggtgcatctctcgggcgtccggcagcggctgtatctcggcatgaattaagaagctaggaagatggagcacggcacactcctcgcccagcccgggctctggaccagggacaccagctgggcactcctctatttcctctgctatatcctccctcagaccgccccgcaagtactcaggatcggagggatttttgaaacagtggaaaatgagcctgttaatgttgaagaattagctttcaagtttgcagtcaccagcattaacagaaaccgaaccctgatgcctaacaccacattaacctatgacatccagagaattaacctttttgatagttttgaagcctcgcggagagcatgtgaccagctggctcttggtgtggctgctctctttggcccttcccatagctcctccgtcagtgctgtgcagtctatttgcaatgctctcgaagttccacacatacagacccgctggaaacacccctcggtggacaacaaagatttgttttacatcaacctttacccagattatgcagctatcagcagggcgatcctggatctggtcctctattacaactggaaaacagtgacagtggtgtatgaagacagcacaggtctaattcgtctacaagagctcatcaaagctccctccagatataatattaaaatcaaaatccgccagctgccctctgggaataaagatgccaagcctttactcaaggagatgaagaaaggcaaggagttctatgtgatatttgattgttcacatgaaacagccgctgaaatccttaagcagattctgttcatgggcatgatgaccgagtactatcactactttttcacaaccctggacttatttgctttggatctggaactctataggtacagtggcgtaaacatgaccgggtttcggctgcttaacattgacaaccctcacgtgtcatccatcattgagaagtggtccatggagagactgcaggccccacccaggcccgagactggccttttggatggcatgatgacaactgaagcggctctgatgtacgatgctgtgtacatggtggccattgcctcgcaccgggcatcccagctgaccgtcagctccctgcagtgccatagacataagccatggcgcctcggacccagatttatgaacctgatcaaagaggcccggtgggatggcttgactgggcatatcacctttaataaaaccaatggcttgaggaaggattttgatctggacattattagtctcaaagaggaaggaactgaaaagattgggatttggaattccaacagtgggcttaacatgacggacagcaacaaagacaagtccagcaatatcactgattcattggccaacagaacactcattgtcaccaccattctggaagaaccctatgttatgtacaggaaatctgataagcctctatatggaaatgacagatttgaaggatattgcctagacctgttgaaagaattgtcaaacatcctgggtttcatttatgatgttaaactagttcccgatggcaaatatggggcccagaatgacaaaggggagtggaacgggatggttaaagaactcatagatcacagggctgacctggcagtggctcctcttaccatcacctacgtgcgggagaaagtcattgacttctccaaacccttcatgaccctaggcatcagcattctctaccggaagcccaatggtaccaatccaggcgttttctccttcctcaaccccctgtctccagatatttggatgtatgtgctcttagcctgcttgggagtcagctgtgtactctttgtgattgcaaggtttacaccctacgagtggtataacccccacccatgcaaccctgactcagacgtggtggaaaacaattttactttactaaatagtttctggtttggagttggagctctcatgcagcaaggatcagagctgatgcccaaagctctatcgaccagaatagttggagggatatggtggtttttcaccctaatcatcatttcatcctacacggccaatctggctgccttcttgacagtagagagaatggaatcccccatagattcggcagatgatctggcaaagcaaaccaagatagaatatggggcggttagagatggatcaacaatgaccttcttcaagaaatcaaaaatctccacctatgagaagatgtgggctttcatgagcagcaggcagcagaccgccctggtaagaaacagtgatgaggggatccagagagtgctcaccacagactacgcgctgctgatggagtccaccagcattgagtatgtgacgcagagaaactgcaacctcactcagatcgggggcctcattgactccaaaggttacggagtgggaacacctattggttctccttaccgggataaaattactattgctattcttcaactccaagaagaagggaagctgcatatgatgaaagagaagtggtggcgtgggaatggctgccccgaggaagacaacaaagaagccagtgccctgggagtggaaaatattggaggcatcttcattgttctggctgccggactggtcctttctgtatttgtagctattggagaattcatatacaaatcacggaagaataatgatattgaacagtgtctctctttcaacgctatcatggaagaactgggaatctcactgaagaatcagaaaaaaataaagaaaaagtcaagaactaaggggaaatcttccttcacaagtatccttacttgtcatcagagacgaactcagagaaaagagactgtggcgtgatccaaggaaacgcctgtaggaagaaaaaggatgcattccctacagatttttggagaaaggatttctgaggagtgtgtgatgtgtttccatatatctatatccataactctgattatgaatacagatataagaaatacaaaagtttaaaaagctcacatagatatgacttgggaagtgacaccagttcttttaaaataaatttgtatgctcaattattttgcattttttctttttccccaataaattgttgtgtgtgctttctaaataataataaaacaacagggtttttttccagaa

SEQ ID NO: 12293 - DNA, 3472 bp, Homo sapiens
  source 1..3472: mol_type = unassigned DNA
ctttcccccttttccctcctctgtctgtgcctatcccccgacttttgcatctgaccaaaggacgaatgagggagacgttcctgcagatcggggcagcaactttcctcagctggtctctgggctccgggagccagagagcgctgatcctccgcggtctgcggcccatggaagaggaggaggaggagccgtgatgggctagcgacagcactgaggagccccgagagagctcagccttgccagccagctccgcggtcccacgcgggttccctcgagctcgctccgtggggagcgcgcagcgtgcttggaaccggagcatccagagaggatgaggcggggacccggcccaagttgggtgcatctctcgggcgtccggcagcggctgtatctcggcatgaattaagaagctaggaagatggagcacggcacactcctcgcccagcccgggctctggaccagggacaccagctgggcactcctctatttcctctgctatatcctccctcagaccgccccgcaagtactcaggatcggagggatttttgaaacagtggaaaatgagcctgttaatgttgaagaattagctttcaagtttgcagtcaccagcattaacagaaaccgaaccctgatgcctaacaccacattaacctatgacatccagagaattaacctttttgatagttttgaagcctcgcggagagcatgtgaccagctggctcttggtgtggctgctctctttggcccttcccatagctcctccgtcagtgctgtgcagtctatttgcaatgctctcgaagttccacacatacagacccgctggaaacacccctcggtggacaacaaagatttgttttacatcaacctttacccagattatgcagctatcagcagggcgatcctggatctggtcctctattacaactggaaaacagtgacagtggtgtatgaagacagcacaggtctaattcgtctacaagagctcatcaaagctccctccagatataatattaaaatcaaaatccgccagctgccctctgggaataaagatgccaagcctttactcaaggagatgaagaaaggcaaggagttctatgtgatatttgattgttcacatgaaacagccgctgaaatccttaagcagattctgttcatgggcatgatgaccgagtactatcactactttttcacaaccctggacttatttgctttggatctggaactctataggtacagtggcgtaaacatgaccgggtttcggctgcttaacattgacaaccctcacgtgtcatccatcattgagaagtggtccatggagagactgcaggccccacccaggcccgagactggccttttggatggcatgatgacaactgaagcggctctgatgtacgatgctgtgtacatggtggccattgcctcgcaccgggcatcccagctgaccgtcagctccctgcagtgccatagacataagccatggcgcctcggacccagatttatgaacctgatcaaagaggcccggtgggatggcttgactgggcatatcacctttaataaaaccaatggcttgaggaaggattttgatctggacattattagtctcaaagaggaaggaactgaaaaggctgctggcgaagtgtctaaacacttgtataaagtgtggaagaagattgggatttggaattccaacagtgggcttaacatgacggacagcaacaaagacaagtccagcaatatcactgattcattggccaacagaacactcattgtcaccaccattctggaagaaccctatgttatgtacaggaaatctgataagcctctatatggaaatgacagatttgaaggatattgcctagacctgttgaaagaattgtcaaacatcctgggtttcatttatgatgttaaactagttcccgatggcaaatatggggcccagaatgacaaaggggagtggaacgggatggttaaagaactcatagatcacagggctgacctggcagtggctcctcttaccatcacctacgtgcgggagaaagtcattgacttctccaaacccttcatgaccctaggcatcagcattctctaccggaagcccaatggtaccaatccaggcgttttctccttcctcaaccccctgtctccagatatttggatgtatgtgctcttagcctgcttgggagtcagctgtgtactctttgtgattgcaaggtttacaccctacgagtggtataacccccacccatgcaaccctgactcagacgtggtggaaaacaattttactttactaaatagtttctggtttggagttggagctctcatgcagcaaggatcagagctgatgcccaaagctctatcgaccagaatagttggagggatatggtggtttttcaccctaatcatcatttcatcctacacggccaatctggctgccttcttgacagtagagagaatggaatcccccatagattcggcagatgatctggcaaagcaaaccaagatagaatatggggcggttagagatggatcaacaatgaccttcttcaagaaatcaaaaatctccacctatgagaagatgtgggctttcatgagcagcaggcagcagaccgccctggtaagaaacagtgatgaggggatccagagagtgctcaccacagactacgcgctgctgatggagtccaccagcattgagtatgtgacgcagagaaactgcaacctcactcagatcgggggcctcattgactccaaaggttacggagtgggaacacctattggttctccttaccgggataaaattactattgctattcttcaactccaagaagaagggaagctgcatatgatgaaagagaagtggtggcgtgggaatggctgccccgaggaagacaacaaagaagccagtgccctgggagtggaaaatattggaggcatcttcattgttctggctgccggactggtcctttctgtatttgtagctattggagaattcatatacaaatcacggaagaataatgatattgaacaggctttttgtttcttttatggactgcaatgtaagcaaacccatccaaccaactccacttctggaactactttatctacggatttagaatgtggtaaattaattcgagaggagagagggattcgaaaacagtcctcagttcatactgtgtaatcagtttaaaaaaaaaaaaaaagatgtgcccagtagaaaatgtttttgctaattggtgttgttgatatttgtatttgctaagcataaatagccacaattctctattcctttaggatagcaaaactcatgtattctagacattgaaatgaatacactggaaagatacttgcactgtatgttgaagcaggggcatattaggggtataaagacttctagaaatgtgtatttacaggaatcttctctgtcccactcatcatcttagttctatcttcatgcattaaaaataagtaactcttccttcat

SEQ ID NO: 12294 - DNA, 3427 bp, Homo sapiens
  source 1..3427: mol_type = unassigned DNA
ctttcccccttttccctcctctgtctgtgcctatcccccgacttttgcatctgaccaaaggacgaatgagggagacgttcctgcagatcggggcagcaactttcctcagctggtctctgggctccgggagccagagagcgctgatcctccgcggtctgcggcccatggaagaggaggaggaggagccgtgatgggctagcgacagcactgaggagccccgagagagctcagccttgccagccagctccgcggtcccacgcgggttccctcgagctcgctccgtggggagcgcgcagcgtgcttggaaccggagcatccagagaggatgaggcggggacccggcccaagttgggtgcatctctcgggcgtccggcagcggctgtatctcggcatgaattaagaagctaggaagatggagcacggcacactcctcgcccagcccgggctctggaccagggacaccagctgggcactcctctatttcctctgctatatcctccctcagaccgccccgcaagtactcaggatcggagggatttttgaaacagtggaaaatgagcctgttaatgttgaagaattagctttcaagtttgcagtcaccagcattaacagaaaccgaaccctgatgcctaacaccacattaacctatgacatccagagaattaacctttttgatagttttgaagcctcgcggagagcatgtgaccagctggctcttggtgtggctgctctctttggcccttcccatagctcctccgtcagtgctgtgcagtctatttgcaatgctctcgaagttccacacatacagacccgctggaaacacccctcggtggacaacaaagatttgttttacatcaacctttacccagattatgcagctatcagcagggcgatcctggatctggtcctctattacaactggaaaacagtgacagtggtgtatgaagacagcacaggtctaattcgtctacaagagctcatcaaagctccctccagatataatattaaaatcaaaatccgccagctgccctctgggaataaagatgccaagcctttactcaaggagatgaagaaaggcaaggagttctatgtgatatttgattgttcacatgaaacagccgctgaaatccttaagcagattctgttcatgggcatgatgaccgagtactatcactactttttcacaaccctggacttatttgctttggatctggaactctataggtacagtggcgtaaacatgaccgggtttcggctgcttaacattgacaaccctcacgtgtcatccatcattgagaagtggtccatggagagactgcaggccccacccaggcccgagactggccttttggatggcatgatgacaactgaagcggctctgatgtacgatgctgtgtacatggtggccattgcctcgcaccgggcatcccagctgaccgtcagctccctgcagtgccatagacataagccatggcgcctcggacccagatttatgaacctgatcaaagaggcccggtgggatggcttgactgggcatatcacctttaataaaaccaatggcttgaggaaggattttgatctggacattattagtctcaaagaggaaggaactgaaaagattgggatttggaattccaacagtgggcttaacatgacggacagcaacaaagacaagtccagcaatatcactgattcattggccaacagaacactcattgtcaccaccattctggaagaaccctatgttatgtacaggaaatctgataagcctctatatggaaatgacagatttgaaggatattgcctagacctgttgaaagaattgtcaaacatcctgggtttcatttatgatgttaaactagttcccgatggcaaatatggggcccagaatgacaaaggggagtggaacgggatggttaaagaactcatagatcacagggctgacctggcagtggctcctcttaccatcacctacgtgcgggagaaagtcattgacttctccaaacccttcatgaccctaggcatcagcattctctaccggaagcccaatggtaccaatccaggcgttttctccttcctcaaccccctgtctccagatatttggatgtatgtgctcttagcctgcttgggagtcagctgtgtactctttgtgattgcaaggtttacaccctacgagtggtataacccccacccatgcaaccctgactcagacgtggtggaaaacaattttactttactaaatagtttctggtttggagttggagctctcatgcagcaaggatcagagctgatgcccaaagctctatcgaccagaatagttggagggatatggtggtttttcaccctaatcatcatttcatcctacacggccaatctggctgccttcttgacagtagagagaatggaatcccccatagattcggcagatgatctggcaaagcaaaccaagatagaatatggggcggttagagatggatcaacaatgaccttcttcaagaaatcaaaaatctccacctatgagaagatgtgggctttcatgagcagcaggcagcagaccgccctggtaagaaacagtgatgaggggatccagagagtgctcaccacagactacgcgctgctgatggagtccaccagcattgagtatgtgacgcagagaaactgcaacctcactcagatcgggggcctcattgactccaaaggttacggagtgggaacacctattggttctccttaccgggataaaattactattgctattcttcaactccaagaagaagggaagctgcatatgatgaaagagaagtggtggcgtgggaatggctgccccgaggaagacaacaaagaagccagtgccctgggagtggaaaatattggaggcatcttcattgttctggctgccggactggtcctttctgtatttgtagctattggagaattcatatacaaatcacggaagaataatgatattgaacaggctttttgtttcttttatggactgcaatgtaagcaaacccatccaaccaactccacttctggaactactttatctacggatttagaatgtggtaaattaattcgagaggagagagggattcgaaaacagtcctcagttcatactgtgtaatcagtttaaaaaaaaaaaaaaagatgtgcccagtagaaaatgtttttgctaattggtgttgttgatatttgtatttgctaagcataaatagccacaattctctattcctttaggatagcaaaactcatgtattctagacattgaaatgaatacactggaaagatacttgcactgtatgttgaagcaggggcatattaggggtataaagacttctagaaatgtgtatttacaggaatcttctctgtcccactcatcatcttagttctatcttcatgcattaaaaataagtaactcttccttcat

SEQ ID NO: 12295 - DNA, 3234 bp, Homo sapiens
  source 1..3234: mol_type = unassigned DNA
agccagctccgcggtcccacgcgggttccctcgagctcgctccgtggggagcgcgcagcgtgcttggaaccggagcatccagagaggatgaggcggggacccggcccaagttgggtgcatctctcgggcgtccggcagcggctgtatctcggcatgaattaagaagctaggaagatggagcacggcacactcctcgcccagcccgggctctggaccagggacaccagctgggcactcctctatttcctctgctatatcctccctcagaccgccccgcaagtactcaggatcggagggatttttgaaacagtggaaaatgagcctgttaatgttgaagaattagctttcaagtttgcagtcaccagcattaacagaaaccgaaccctgatgcctaacaccacattaacctatgacatccagagaattaacctttttgatagttttgaagcctcgcggagagcatgtgaccagctggctcttggtgtggctgctctctttggcccttcccatagctcctccgtcagtgctgtgcagtctatttgcaatgctctcgaagttccacacatacagacccgctggaaacacccctcggtggacaacaaagatttgttttacatcaacctttacccagattatgcagctatcagcagggcgatcctggatctggtcctctattacaactggaaaacagtgacagtggtgtatgaagacagcacaggtctaattcgtctacaagagctcatcaaagctccctccagatataatattaaaatcaaaatccgccagctgccctctgggaataaagatgccaagcctttactcaaggagatgaagaaaggcaaggagttctatgtgatatttgattgttcacatgaaacagccgctgaaatccttaagcagattctgttcatgggcatgatgaccgagtactatcactactttttcacaaccctggacttatttgctttggatctggaactctataggtacagtggcgtaaacatgaccgggtttcggctgcttaacattgacaaccctcacgtgtcatccatcattgagaagtggtccatggagagactgcaggccccacccaggcccgagactggccttttggatggcatgatgacaactgaagcggctctgatgtacgatgctgtgtacatggtggccattgcctcgcaccgggcatcccagctgaccgtcagctccctgcagtgccatagacataagccatggcgcctcggacccagatttatgaacctgatcaaagaggcccggtgggatggcttgactgggcatatcacctttaataaaaccaatggcttgaggaaggattttgatctggacattattagtctcaaagaggaaggaactgaaaaggctgctggcgaagtgtctaaacacttgtataaagtgtggaagaagattgggatttggaattccaacagtgggcttaacatgacggacagcaacaaagacaagtccagcaatatcactgattcattggccaacagaacactcattgtcaccaccattctggaagaaccctatgttatgtacaggaaatctgataagcctctatatggaaatgacagatttgaaggatattgcctagacctgttgaaagaattgtcaaacatcctgggtttcatttatgatgttaaactagttcccgatggcaaatatggggcccagaatgacaaaggggagtggaacgggatggttaaagaactcatagatcacagggctgacctggcagtggctcctcttaccatcacctacgtgcgggagaaagtcattgacttctccaaacccttcatgaccctaggcatcagcattctctaccggaagcccaatggtaccaatccaggcgttttctccttcctcaaccccctgtctccagatatttggatgtatgtgctcttagcctgcttgggagtcagctgtgtactctttgtgattgcaaggtttacaccctacgagtggtataacccccacccatgcaaccctgactcagacgtggtggaaaacaattttactttactaaatagtttctggtttggagttggagctctcatgcagcaaggatcagagctgatgcccaaagctctatcgaccagaatagttggagggatatggtggtttttcaccctaatcatcatttcatcctacacggccaatctggctgccttcttgacagtagagagaatggaatcccccatagattcggcagatgatctggcaaagcaaaccaagatagaatatggggcggttagagatggatcaacaatgaccttcttcaagaaatcaaaaatctccacctatgagaagatgtgggctttcatgagcagcaggcagcagaccgccctggtaagaaacagtgatgaggggatccagagagtgctcaccacagactacgcgctgctgatggagtccaccagcattgagtatgtgacgcagagaaactgcaacctcactcagatcgggggcctcattgactccaaaggttacggagtgggaacacctattggttctccttaccgggataaaattactattgctattcttcaactccaagaagaagggaagctgcatatgatgaaagagaagtggtggcgtgggaatggctgccccgaggaagacaacaaagaagccagtgccctgggagtggaaaatattggaggcatcttcattgttctggctgccggactggtcctttctgtatttgtagctattggagaattcatatacaaatcacggaagaataatgatattgaacagtgtctctctttcaacgctatcatggaagaactgggaatctcactgaagaatcagaaaaaaataaagaaaaagtcaagaactaaggggaaatcttccttcacaagtatccttacttgtcatcagagacgaactcagagaaaagagactgtggcgtgatccaaggaaacgcctgtaggaagaaaaaggatgcattccctacagatttttggagaaaggatttctgaggagtgtgtgatgtgtttccatatatctatatccataactctgattatgaatacagatataagaaatacaaaagtttaaaaagctcacatagatatgacttgggaagtgacaccagttcttttaaaataaatttgtatgctcaattattttgcattttttctttttccccaataaattgttgtgtgtgctttctaaataataataaaacaacagggtttttttccagaa

SEQ ID NO: 12296 - DNA, 3624 bp, Homo sapiens
  source 1..3624: mol_type = unassigned DNA
agaagccggaacgtggctccgctcccagttaacctgctggagctcatcaggcttgctcagagcccctgcaccaactcaccctgtaccctctctccttcttcgttagtcttctttcccccttttccctcctctgtctgtgcctatcccccgacttttgcatctgaccaaaggacgaatgagggagacgttcctgcagatcggggcagcaactttcctcagctggtctctgggctccgggagccagagagcgctgatcctccgcggtctgcggcccatggaagaggaggaggaggagccgtgatgggctagcgacagcactgaggagccccgagagagctcagccttgccagccagctccgcggtcccacgcgggttccctcgagctcgctccgtggggagcgcgcagcgtgcttggaaccggagcatccagagaggatgaggcggggacccggcccaagttgggtgcatctctcgggcgtccggcagcggctgtatctcggcatgaattaagaagctaggaagatggagcacggcacactcctcgcccagcccgggctctggaccagggacaccagctgggcactcctctatttcctctgctatatcctccctcagaccgccccgcaagtactcaggatcggagggatttttgaaacagtggaaaatgagcctgttaatgttgaagaattagctttcaagtttgcagtcaccagcattaacagaaaccgaaccctgatgcctaacaccacattaacctatgacatccagagaattaacctttttgatagttttgaagcctcgcggagagcatgtgaccagctggctcttggtgtggctgctctctttggcccttcccatagctcctccgtcagtgctgtgcagtctatttgcaatgctctcgaagttccacacatacagacccgctggaaacacccctcggtggacaacaaagatttgttttacatcaacctttacccagattatgcagctatcagcagggcgatcctggatctggtcctctattacaactggaaaacagtgacagtggtgtatgaagacagcacaggtctaattcgtctacaagagctcatcaaagctccctccagatataatattaaaatcaaaatccgccagctgccctctgggaataaagatgccaagcctttactcaaggagatgaagaaaggcaaggagttctatgtgatatttgattgttcacatgaaacagccgctgaaatccttaagcagattctgttcatgggcatgatgaccgagtactatcactactttttcacaaccctggacttatttgctttggatctggaactctataggtacagtggcgtaaacatgaccgggtttcggctgcttaacattgacaaccctcacgtgtcatccatcattgagaagtggtccatggagagactgcaggccccacccaggcccgagactggccttttggatggcatgatgacaactgaagcggctctgatgtacgatgctgtgtacatggtggccattgcctcgcaccgggcatcccagctgaccgtcagctccctgcagtgccatagacataagccatggcgcctcggacccagatttatgaacctgatcaaagaggcccggtgggatggcttgactgggcatatcacctttaataaaaccaatggcttgaggaaggattttgatctggacattattagtctcaaagaggaaggaactgaaaagattgggatttggaattccaacagtgggcttaacatgacggacagcaacaaagacaagtccagcaatatcactgattcattggccaacagaacactcattgtcaccaccattctggaagaaccctatgttatgtacaggaaatctgataagcctctatatggaaatgacagatttgaaggatattgcctagacctgttgaaagaattgtcaaacatcctgggtttcatttatgatgttaaactagttcccgatggcaaatatggggcccagaatgacaaaggggagtggaacgggatggttaaagaactcatagatcacagggctgacctggcagtggctcctcttaccatcacctacgtgcgggagaaagtcattgacttctccaaacccttcatgaccctaggcatcagcattctctaccggaagcccaatggtaccaatccaggcgttttctccttcctcaaccccctgtctccagatatttggatgtatgtgctcttagcctgcttgggagtcagctgtgtactctttgtgattgcaaggtttacaccctacgagtggtataacccccacccatgcaaccctgactcagacgtggtggaaaacaattttactttactaaatagtttctggtttggagttggagctctcatgcagcaaggatcagagctgatgcccaaagctctatcgaccagaatagttggagggatatggtggtttttcaccctaatcatcatttcatcctacacggccaatctggctgccttcttgacagtagagagaatggaatcccccatagattcggcagatgatctggcaaagcaaaccaagatagaatatggggcggttagagatggatcaacaatgaccttcttcaagaaatcaaaaatctccacctatgagaagatgtgggctttcatgagcagcaggcagcagaccgccctggtaagaaacagtgatgaggggatccagagagtgctcaccacagactacgcgctgctgatggagtccaccagcattgagtatgtgacgcagagaaactgcaacctcactcagatcgggggcctcattgactccaaaggttacggagtgggaacacctattggttctccttaccgggataaaattactattgctattcttcaactccaagaagaagggaagctgcatatgatgaaagagaagtggtggcgtgggaatggctgccccgaggaagacaacaaagaagccagtgccctgggagtggaaaatattggaggcatcttcattgttctggctgccggactggtcctttctgtatttgtagctattggagaattcatatacaaatcacggaagaataatgatattgaacagaaaggaaagtcatcaagaattagattttattttaggaacaaagtaaggtttcatgggagaaaaaaacaaagccttggtgtagagaagtgtctctctttcaacgctatcatggaagaactgggaatctcactgaagaatcagaaaaaaataaagaaaaagtcaagaactaaggggaaatcttccttcacaagtatccttacttgtcatcagagacgaactcagagaaaagagactgtggcgtgatccaaggaaacgcctgtaggaagaaaaaggatgcattccctacagatttttggagaaaggatttctgaggagtgtgtgatgtgtttccatatatctatatccataactctgattatgaatacagatataagaaatacaaaagtttaaaaagctcacatagatatgacttgggaagtgacaccagttcttttaaaataaatttgtatgctcaattattttgcattttttctttttccccaataaattgttgtgtgtgctttctaaataataataaaacaacagggtttttttccagaa

SEQ ID NO: 12297 - DNA, 2769 bp, Homo sapiens
  source 1..2769: mol_type = unassigned DNA
atggagcacggcacactcctcgcccagcccgggctctggaccagggacaccagctgggcactcctctatttcctctgctatatcctccctcagaccgccccgcaagtactcaggatcggagggatttttgaaacagtggaaaatgagcctgttaatgttgaagaattagctttcaagtttgcagtcaccagcattaacagaaaccgaaccctgatgcctaacaccacattaacctatgacatccagagaattaacctttttgatagttttgaagcctcgcggagagcatgtgaccagctggctcttggtgtggctgctctctttggcccttcccatagctcctccgtcagtgctgtgcagtctatttgcaatgctctcgaagttccacacatacagacccgctggaaacacccctcggtggacaacaaagatttgttttacatcaacctttacccagattatgcagctatcagcagggcgatcctggatctggtcctctattacaactggaaaacagtgacagtggtgtatgaagacagcacaggtctaattcgtctacaagagctcatcaaagctccctccagatataatattaaaatcaaaatccgccagctgccctctgggaataaagatgccaagcctttactcaaggagatgaagaaaggcaaggagttctatgtgatatttgattgttcacatgaaacagccgctgaaatccttaagcagattctgttcatgggcatgatgaccgagtactatcactactttttcacaaccctggacttatttgctttggatctggaactctataggtacagtggcgtaaacatgaccgggtttcggctgcttaacattgacaaccctcacgtgtcatccatcattgagaagtggtccatggagagactgcaggccccacccaggcccgagactggccttttggatggcatgatgacaactgaagcggctctgatgtacgatgctgtgtacatggtggccattgcctcgcaccgggcatcccagctgaccgtcagctccctgcagtgccatagacataagccatggcgcctcggacccagatttatgaacctgatcaaagaggcaactgcccggtgggatggcttgactgggcatatcacctttaataaaaccaatggcttgaggaaggattttgatctggacattattagtctcaaagaggaaggaactgaaaaggctgctggcgaagtgtctaaacacttgtataaagtgtggaagaagattgggatttggaattccaacagtgggcttaacatgacggacagcaacaaagacaagtccagcaatatcactgattcattggccaacagaacactcattgtcaccaccattctggaagaaccctatgttatgtacaggaaatctgataagcctctatatggaaatgacagatttgaaggatattgcctagacctgttgaaagaattgtcaaacatcctgggtttcatttatgatgttaaactagttcccgatggcaaatatggggcccagaatgacaaaggggagtggaacgggatggttaaagaactcatagatcacagggctgacctggcagtggctcctcttaccatcacctacgtgcgggagaaagtcattgacttctccaaacccttcatgaccctaggcatcagcattctctaccggaagcccaatggtaccaatccaggcgttttctccttcctcaaccccctgtctccagatatttggatgtatgtgctcttagcctgcttgggagtcagctgtgtactctttgtgattgcaaggtttacaccctacgagtggtataacccccacccatgcaaccctgactcagacgtggtggaaaacaattttactttactaaatagtttctggtttggagttggagctctcatgcagcaaggatcagagctgatgcccaaagctctatcgaccagaatagttggagggatatggtggtttttcaccctaatcatcatttcatcctacacggccaatctggctgccttcttgacagtagagagaatggaatcccccatagattcggcagatgatctggcaaagcaaaccaagatagaatatggggcggttagagatggatcaacaatgaccttcttcaagaaatcaaaaatctccacctatgagaagatgtgggctttcatgagcagcaggcagcagaccgccctggtaagaaacagtgatgaggggatccagagagtgctcaccacagactacgcgctgctgatggagtccaccagcattgagtatgtgacgcagagaaactgcaacctcactcagatcgggggcctcattgactccaaaggttacggagtgggaacacctattggttctccttaccgggataaaattactattgctattcttcaactccaagaagaagggaagctgcatatgatgaaagagaagtggtggcgtgggaatggctgccccgaggaagacaacaaagaagccagtgccctgggagtggaaaatattggaggcatcttcattgttctggctgccggactggtcctttctgtatttgtagctattggagaattcatatacaaatcacggaagaataatgatattgaacagtgtctctctttcaacgctatcatggaagaactgggaatctcactgaagaatcagaaaaaaataaagaaaaagtcaagaactaaggggaaatcttccttcacaagtatccttacttgtcatcagagacgaactcagagaaaagagactgtggcgtga

SEQ ID NO: 12298 - DNA, 2244 bp, Homo sapiens
  source 1..2244: mol_type = unassigned DNA
atggagcacggcacactcctcgcccagcccgggctctggaccagggacaccagctgggcactcctctatttcctctgctatatcctccctcagaccgccccgcaagtactcaggatcgcatgtgaccagctggctcttggtgtggctgctctctttggcccttcccatagctcctccgtcagtgctgtgcagtctatttgcaatgctctcgaagttccacacatacagacccgctggaaacacccctcggtggacaacaaagatttgttttacatcaacctttacccagattatgcagctatcagcagggcgatcctggatctggtcctctattacaactggaaaacagtgacagtggtgtatgaagacagcacaggtctaattcgtctacaagagctcatcaaagctccctccagatataatattaaaatcaaaatccgccagctgccctctgggaataaagatgccaagcctttactcaaggagatgaagaaaggcaaggagttctatgtgatatttgattgttcacatgaaacagccgctgaaatccttaagcagattctgttcatgggcatgatgaccgagtactatcactactttttcacaaccctggacttatttgctttggatctggaactctataggtacagtggcgtaaacatgaccgggtttcggctgcttaacattgacaaccctcacgtgtcatccatcattgagaagtggtccatggagagactgcaggccccacccaggcccgagactggccttttggatggcatgatgacaactgaagcggctctgatgtacgatgctgtgtacatggtggccattgcctcgcaccgggcatcccagctgaccgtcagctccctgcagtgccatagacataagccatggcgcctcggacccagatttatgaacctgatcaaagaggcccggtgggatggcttgactgggcatatcacctttaataaaaccaatggcttgaggaaggattttgatctggacattattagtctcaaagaggaaggaactgaaaagattgggatttggaattccaacagtgggcttaacatgacggacagcaacaaagacaagtccagcaatatcactgattcattggccaacagaacactcattgtcaccaccattctgagggctgacctggcagtggctcctcttaccatcacctacgtgcgggagaaagtcattgacttctccaaacccttcatgaccctaggcatcagcattctctaccggaagcccaatggtaccaatccaggcgttttctccttcctcaaccccctgtctccagatatttggatgtatgtgctcttagcctgcttgggagtcagctgtgtactctttgtgattgcaaggtttacaccctacgagtggtataacccccacccatgcaaccctgactcagacgtggtggaaaacaattttactttactaaatagtttctggtttggagttggagctctcatgcagcaaggatcagagctgatgcccaaagctctatcgaccagaatagttggagggatatggtggtttttcaccctaatcatcatttcatcctacacggccaatctggctgccttcttgacagtagagagaatggaatcccccatagattcggcagatgatctggcaaagcaaaccaagatagaatatggggcggttagagatggatcaacaatgaccttcttcaagaaatcaaaaatctccacctatgagaagatgtgggctttcatgagcagcaggcagcagaccgccctggtaagaaacagtgatgaggggatccagagagtgctcaccacagactacgcgctgctgatggagtccaccagcattgagtatgtgacgcagagaaactgcaacctcactcagatcgggggcctcattgactccaaaggttacggagtgggaacacctattggttctccttaccgggataaaattactattgctattcttcaactccaagaagaagggaagctgcatatgatgaaagagaagtggtggcgtgggaatggctgccccgaggaagacaacaaagaagccagtgccctgggagtggaaaatattggaggcatcttcattgttctggctgccggactggtcctttctgtatttgtagctattggagaattcatatacaaatcacggaagaataatgatattgaacagtgtctctctttcaacgctatcatggaagaactgggaatctcactgaagaatcag

SEQ ID NO: 12299 - DNA, 2610 bp, Homo sapiens
  source 1..2610: mol_type = unassigned DNA
atgaagattattttcccgattctaagtaatccagtcttcaggcgcaccgttaaactcctgctctgtttactgtggattggatattctcaaggaaccacacatgtattaagatttggtggtatttttgaatatgtggaatctggcccaatgggagctgaggaacttgcattcagatttgctgtgaacacaattaacagaaacagaacattgctacccaatactacccttacctatgatacccagaagataaacctttatgatagttttgaagcatccaagaaagcctgtgatcagctgtctcttggggtggctgccatcttcgggccttcacacagctcatcagcaaacgcagtgcagtccatctgcaatgctctgggagttccccacatacagacccgctggaagcaccaggtgtcagacaacaaagattccttctatgtcagtctctacccagacttctcttcactcagccgtgccattttagacctggtgcagtttttcaagtggaaaaccgtcacggttgtgtatgatgacagcactggtctcattcgtttgcaagagctcatcaaagctccatcaaggtataatcttcgactcaaaattcgtcagttacctgctgatacaaaggatgcaaaacccttactaaaagaaatgaaaagaggcaaggagtttcatgtaatctttgattgtagccatgaaatggcagcaggcattttaaaacaggcattagctatgggaatgatgacagaatactatcattatatctttaccactctggacctctttgctcttgatgttgagccctaccgatacagtggtgttaacatgacagggttcagaatattaaatacagaaaatacccaagtctcctccatcattgaaaagtggtcgatggaacgattgcaggcacctccgaaacccgattcaggtttgctggatggatttatgacgactgatgctgctctaatgtatgatgctgtgcatgtggtgtctgtggccgttcaacagtttccccagatgacagtcagttccttgcagtgtaatcgacataaaccctggcgcttcgggacccgctttatgagtctaattaaagaggcacattgggaaggcctcacaggcagaataactttcaacaaaaccaatggcttgagaacagattttgatttggatgtgatcagtctgaaggaagaaggtctagaaaagattggaacgtgggatccagccagtggcctgaatatgacagaaagtcaaaagggaaagccagcgaacatcacagattccttatccaatcgttctttgattgttaccaccattttggaagagccttatgtcctttttaagaagtctgacaaacctctctatggtaatgatcgatttgaaggctattgcattgatctcctcagagagttatctacaatccttggctttacatatgaaattagacttgtggaagatgggaaatatggagcccaggatgatgccaatggacaatggaatggaatggttcgtgaactaattgatcataaagctgaccttgcagttgctccactggctattacctatgttcgagagaaggtcatcgacttttccaagccctttatgacacttggaataagtattttgtaccgcaagcccaatggtacaaacccaggcgtcttctccttcctgaatcctctctcccctgatatctggatgtatattctgctggcttacttgggtgtcagttgtgtgctctttgtcatagccaggtttagtccttatgagtggtataatccacacccttgcaaccctgactcagacgtggtggaaaacaattttaccttgctaaatagtttctggtttggagttggagctctcatgcagcaaggttctgagctcatgcccaaagcactgtccaccaggatagtgggaggcatttggtggtttttcacacttatcatcatttcttcgtatactgctaacttagccgcctttctgacagtggaacgcatggaatcccctattgactctgctgatgatttagctaaacaaaccaagatagaatatggagcagtagaggatggtgcaaccatgacttttttcaagaaatcaaaaatctccacgtatgacaaaatgtgggcctttatgagtagcagaaggcagtcagtgctggtcaaaagtaatgaagaaggaatccagcgagtcctcacctctgattatgctttcctaatggagtcaacaaccatcgagtttgttacccagcggaactgtaacctgacacagattggcggccttatagactctaaaggttatggcgttggcactcccatgggttctccatatcgagacaaaattaccatagcaattcttcagctgcaagaggaaggcaaactgcatatgatgaaggagaaatggtggaggggcaatggttgcccagaagaggagagcaaagaggccagtgccctgggggttcagaatattggtggcatcttcattgttctggcagccggcttggtgctttcagtttttgtggcagtgggagaatttttatacaaatccaaaaaaaacgctcaattggaaaaggaatcttctatttggttagtgccaccataccatccagacactgtttag

SEQ ID NO: 12300 - DNA, 2840 bp, Homo sapiens
  source 1..2840: mol_type = unassigned DNA
agcaattggcaaatccagaatgttaaacccggtctagctccaaataaatgttatatataagggtagagagtaaagaagaataccactgttcttctccacatacacagaaggaatctaggtggtatttttgaatatgtggaatctggcccaatgggagctgaggaacttgcattcagatttgctgtgaacacaattaacagaaacagaacattgctacccaatactacccttacctatgatacccagaagataaacctttatgatagttttgaagcatccaagaaagcctgtgatcagctgtctcttggggtggctgccatcttcgggccttcacacagctcatcagcaaacgcagtgcagtccatctgcaatgctctgggagttccccacatacagacccgctggaagcaccaggtgtcagacaacaaagattccttctatgtcagtctctacccagacttctcttcactcagccgtgccattttagacctggtgcagtttttcaagtggaaaaccgtcacggttgtgtatgatgacagcactggtctcattcgtttgcaagagctcatcaaagctccatcaaggtataatcttcgactcaaaattcgtcagttacctgctgatacaaaggatgcaaaacccttactaaaagaaatgaaaagaggcaaggagtttcatgtaatctttgattgtagccatgaaatggcagcaggcattttaaaacaggcattagctatgggaatgatgacagaatactatcattatatctttaccactctggacctctttgctcttgatgttgagccctaccgatacagtggtgttaacatgacagggttcagaatattaaatacagaaaatacccaagtctcctccatcattgaaaagtggtcgatggaacgattgcaggcacctccgaaacccgattcaggtttgctggatggatttatgacgactgatgctgctctaatgtatgatgctgtgcatgtggtgtctgtggccgttcaacagtttccccagatgacagtcagttccttgcagtgtaatcgacataaaccctggcgcttcgggacccgctttatgagtctaattaaagaggcacattgggaaggcctcacaggcagaataactttcaacaaaaccaatggcttgagaacagattttgatttggatgtgatcagtctgaaggaagaaggtctagaaaagattggaacgtgggatccagccagtggcctgaatatgacagaaagtcaaaagggaaagccagcgaacatcacagattccttatccaatcgttctttgattgttaccaccattttggaagagccttatgtcctttttaagaagtctgacaaacctctctatggtaatgatcgatttgaaggctattgcattgatctcctcagagagttatctacaatccttggctttacatatgaaattagacttgtggaagatgggaaatatggagcccaggatgatgccaatggacaatggaatggaatggttcgtgaactaattgatcataaagctgaccttgcagttgctccactggctattacctatgttcgagagaaggtcatcgacttttccaagccctttatgacacttggaataagtattttgtaccgcaagcccaatggtacaaacccaggcgtcttctccttcctgaatcctctctcccctgatatctggatgtatattctgctggcttacttgggtgtcagttgtgtgctctttgtcatagccaggtttagtccttatgagtggtataatccacacccttgcaaccctgactcagacgtggtggaaaacaattttaccttgctaaatagtttctggtttggagttggagctctcatgcagcaaggttctgagctcatgcccaaagcactgtccaccaggatagtgggaggcatttggtggtttttcacacttatcatcatttcttcgtatactgctaacttagccgcctttctgacagtggaacgcatggaatcccctattgactctgctgatgatttagctaaacaaaccaagatagaatatggagcagtagaggatggtgcaaccatgacttttttcaagaaatcaaaaatctccacgtatgacaaaatgtgggcctttatgagtagcagaaggcagtcagtgctggtcaaaagtaatgaagaaggaatccagcgagtcctcacctctgattatgctttcctaatggagtcaacaaccatcgagtttgttacccagcggaactgtaacctgacacagattggcggccttatagactctaaaggttatggcgttggcactcccatgggttctccatatcgagacaaaattaccatagcaattcttcagctgcaagaggaaggcaaactgcatatgatgaaggagaaatggtggaggggcaatggttgcccagaagaggagagcaaagaggccagtgccctgggggttcagaatattggtggcatcttcattgttctggcagccggcttggtgctttcagtttttgtggcagtgggagaatttttatacaaatccaaaaaaaacgctcaattggaaaagaggtccttctgtagtgccatggtagaagaattgaggatgtccctgaagtgccagcgtcggttaaaacataagccacaggccccagttattgtgaaaacagaagaagttatcaacatgcacacatttaacgacagaaggttgccaggtaaagaaaccatggcataaagctgggaggccaaacacccaagcacaaactgtcgtctttttccaaacaatttagccagaatgtttcctgtggaaatatgcaacctgtgcaaaataaaatgagttacctc

SEQ ID NO: 12301 - DNA, 2499 bp, Homo sapiens
  source 1..2499: mol_type = unassigned DNA
atgaagattattttcccgattctaagtaatccagtcttcaggcgcaccgttaaactcctgctctgtttactgtggattggatattctcaaggaaccacacatgtattaagatttggtggtatttttgaatatgtggaatctggcccaatgggagctgaggaacttgcattcagatttgctgtgaacacaattaacagaaacagaacattgctacccaatactacccttacctatgatacccagaagataaacctttatgatagttttgaagcatccaagaaagcctgtgatcagctgtctcttggggtggctgccatcttcgggccttcacacagctcatcagcaaacgcagtgcagtccatctgcaatgctctgggagttccccacatacagacccgctggaagcaccaggtgtcagacaacaaagattccttctatgtcagtctctacccagacttctcttcactcagccgtgccattttagacctggtgcagtttttcaagtggaaaaccgtcacggttgtgtatgatgacagcactggtctcattcgtttgcaagagctcatcaaagctccatcaaggtataatcttcgactcaaaattcgtcagttacctgctgatacaaaggatgcaaaacccttactaaaagaaatgaaaagaggcaaggagtttcatgtaatctttgattgtagccatgaaatggcagcaggcattttaaaacaggcattagctatgggaatgatgacagaatactatcattatatctttaccactctggacctctttgctcttgatgttgagccctaccgatacagtggtgttaacatgacagggttcagaatattaaatacagaaaatacccaagtctcctccatcattgaaaagtggtcgatggaacgattgcaggcacctccgaaacccgattcaggtttgctggatggatttatgacgactgatgctgctctaatgtatgatgctgtgcatgtggtgtctgtggccgttcaacagtttccccagatgacagtcagttccttgcagtgtaatcgacataaaccctggcgcttcgggacccgctttatgagtctaattaaagaggcacattgggaaggcctcacaggcagaataactttcaacaaaaccaatggcttgagaacagattttgatttggatgtgatcagtctgaaggaagaaggtctagaaaagattggaacgtgggatccagccagtggcctgaatatgacagaaagtcaaaagggaaagccagcgaacatcacagattccttatccaatcgttctttgattgttaccaccattttggaagagccttatgtcctttttaagaagtctgacaaacctctctatggtaatgatcgatttgaaggctattgcattgatctcctcagagagttatctacaatccttggctttacatatgaaattagacttgtggaagatgggaaatatggagcccaggatgatgccaatggacaatggaatggaatggttcgtgaactaattgatcataaagctgaccttgcagttgctccactggctattacctatgttcgagagaaggtcatcgacttttccaagccctttatgacacttggaataagtattttgtaccgcaagcccaatggttctgagctcatgcccaaagcactgtccaccaggatagtgggaggcatttggtggtttttcacacttatcatcatttcttcgtatactgctaacttagccgcctttctgacagtggaacgcatggaatcccctattgactctgctgatgatttagctaaacaaaccaagatagaatatggagcagtagaggatggtgcaaccatgacttttttcaagaaatcaaaaatctccacgtatgacaaaatgtgggcctttatgagtagcagaaggcagtcagtgctggtcaaaagtaatgaagaaggaatccagcgagtcctcacctctgattatgctttcctaatggagtcaacaaccatcgagtttgttacccagcggaactgtaacctgacacagattggcggccttatagactctaaaggttatggcgttggcactcccatgggttctccatatcgagacaaaattaccatagcaattcttcagctgcaagaggaaggcaaactgcatatgatgaaggagaaatggtggaggggcaatggttgcccagaagaggagagcaaagaggccagtgccctgggggttcagaatattggtggcatcttcattgttctggcagccggcttggtgctttcagtttttgtggcagtgggagaatttttatacaaatccaaaaaaaacgctcaattggaaaagaggtccttctgtagtgccatggtagaagaattgaggatgtccctgaagtgccagcgtcggttaaaacataagccacaggccccagttattgtgaaaacagaagaagttatcaacatgcacacatttaacgacagaaggttgccaggtaaagaaaccatggcataa

SEQ ID NO: 12302 - DNA, 4921 bp, Homo sapiens
  source 1..4921: mol_type = unassigned DNA
ggagagcagctatctcagtctttctcacttaatcttggcttcacgtcagaagctgtgcagcagtgcagtagaatagggcctggcaaaacctttgctagcaaagcgccttttgtgccgggctgtggctcgctatcgacatctcgtccgttaccaaggctgggtttcctactgatttccctcctcctctgctttcacaggctcgcgcggccggacattgtgggtgtgcgtgctggatttctcccggatgctctccgactaacatggatgtcccaccattccttgcagtggaaggttgttccttggcgcagtgagtgaagaacatgcagcgattgctaatgggtttgggaagcggagactccttcctctctctatgaccatgccgtgatcgtgtctgcggtcaccactcgacgcatcctcatttctacccgaacccaggagccgaacgctagatcggggaagtgggtgccgtgcgtgtgggcacagaaacaccatgaagattattttcccgattctaagtaatccagtcttcaggcgcaccgttaaactcctgctctgtttactgtggattggatattctcaaggaaccacacatgtattaagatttggtggtatttttgaatatgtggaatctggcccaatgggagctgaggaacttgcattcagatttgctgtgaacacaattaacagaaacagaacattgctacccaatactacccttacctatgatacccagaagataaacctttatgatagttttgaagcatccaagaaagcctgtgatcagctgtctcttggggtggctgccatcttcgggccttcacacagctcatcagcaaacgcagtgcagtccatctgcaatgctctgggagttccccacatacagacccgctggaagcaccaggtgtcagacaacaaagattccttctatgtcagtctctacccagacttctcttcactcagccgtgccattttagacctggtgcagtttttcaagtggaaaaccgtcacggttgtgtatgatgacagcactggtctcattcgtttgcaagagctcatcaaagctccatcaaggtataatcttcgactcaaaattcgtcagttacctgctgatacaaaggatgcaaaacccttactaaaagaaatgaaaagaggcaaggagtttcatgtaatctttgattgtagccatgaaatggcagcaggcattttaaaacaggcattagctatgggaatgatgacagaatactatcattatatctttaccactctggacctctttgctcttgatgttgagccctaccgatacagtggtgttaacatgacagggttcagaatattaaatacagaaaatacccaagtctcctccatcattgaaaagtggtcgatggaacgattgcaggcacctccgaaacccgattcaggtttgctggatggatttatgacgactgatgctgctctaatgtatgatgctgtgcatgtggtgtctgtggccgttcaacagtttccccagatgacagtcagttccttgcagtgtaatcgacataaaccctggcgcttcgggacccgctttatgagtctaattaaagaggcacattgggaaggcctcacaggcagaataactttcaacaaaaccaatggcttgagaacagattttgatttggatgtgatcagtctgaaggaagaaggtctagaaaagattggaacgtgggatccagccagtggcctgaatatgacagaaagtcaaaagggaaagccagcgaacatcacagattccttatccaatcgttctttgattgttaccaccattttggaagagccttatgtcctttttaagaagtctgacaaacctctctatggtaatgatcgatttgaaggctattgcattgatctcctcagagagttatctacaatccttggctttacatatgaaattagacttgtggaagatgggaaatatggagcccaggatgatgccaatggacaatggaatggaatggttcgtgaactaattgatcataaagctgaccttgcagttgctccactggctattacctatgttcgagagaaggtcatcgacttttccaagccctttatgacacttggaataagtattttgtaccgcaagcccaatggtacaaacccaggcgtcttctccttcctgaatcctctctcccctgatatctggatgtatattctgctggcttacttgggtgtcagttgtgtgctctttgtcatagccaggtttagtccttatgagtggtataatccacacccttgcaaccctgactcagacgtggtggaaaacaattttaccttgctaaatagtttctggtttggagttggagctctcatgcagcaaggttctgagctcatgcccaaagcactgtccaccaggatagtgggaggcatttggtggtttttcacacttatcatcatttcttcgtatactgctaacttagccgcctttctgacagtggaacgcatggaatcccctattgactctgctgatgatttagctaaacaaaccaagatagaatatggagcagtagaggatggtgcaaccatgacttttttcaagaaatcaaaaatctccacgtatgacaaaatgtgggcctttatgagtagcagaaggcagtcagtgctggtcaaaagtaatgaagaaggaatccagcgagtcctcacctctgattatgctttcctaatggagtcaacaaccatcgagtttgttacccagcggaactgtaacctgacacagattggcggccttatagactctaaaggttatggcgttggcactcccatgggttctccatatcgagacaaaattaccatagcaattcttcagctgcaagaggaaggcaaactgcatatgatgaaggagaaatggtggaggggcaatggttgcccagaagaggagagcaaagaggccagtgccctgggggttcagaatattggtggcatcttcattgttctggcagccggcttggtgctttcagtttttgtggcagtgggagaatttttatacaaatccaaaaaaaacgctcaattggaaaagagagccaagactaagttacctcaagactatgtattcctccctattttggagtcagtttccatttctacagtgttgtcatcatcaccatcttcatcatcattatcatcatgttcttaataagtacatctaataaggtccttctgtagtgccatggtagaagaattgaggatgtccctgaagtgccagcgtcggttaaaacataagccacaggccccagttattgtgaaaacagaagaagttatcaacatgcacacatttaacgacagaaggttgccaggtaaagaaaccatggcataaagctgggaggccaaacacccaagcacaaactgtcgtctttttccaaacaatttagccagaatgtttcctgtggaaatatgcaacctgtgcaaaataaaatgagttacctcatgccgctgtgtctatgaactagagactctgtgatctaagcagttgcaatgatcagacttgatttacaagcatcatggatcaaccaagttacacggggttacactgttaatcatgggttcctcccttcttctgagtgaatgttaacatgcgcattttgtggctgatttcaaatgcagtccagtgagaaattacaggttccttttgaagctcaactgttgccaggagatggaatatcaatgcccaacagggcaaccaataaaagtgtcactaagaatataaatatttggaatcagcaaaaactgtagtgttacaggaaacagtacagtcttctgaacacccagatcatagaggtgatgatgttactagcccccaactactcagtataattattgtctgaatgcaaagtatgtgtttataggatgtgaaaaaatgtaatgcaaaacaaatttgaatcccatggcagttggaatataaagcagatgttcatcacttattttccttttttcttttcttatttttttttttgacagtctgtgtcactgattgagatagaaatgccaattatcaaggaaataatgttttcttaagttccctaaggcagaagatttaacatgcaattctaccagatcccttcctattcccccaacaccttttctctaacccccatatcccaaataataataataataataataataataataataataataataaaagcagttggttcagtgattctgaattaaaaggataatgttttgcaatgttcaagttgtaaaaactggccgagtattggctgtgtggaagactaaagctttcattctaacattcagacatagcaatccaaacccttgttcctgctgtaaatgaacttgatggagcatgggcagatttcagtgatacgagaaaggggactggtcatctatagaaaaatctgtgagagaacttggaagtggactgcgtttatcaatacagtcacaatgttaaatgaacaaaattcttgaacagttttttttcaaaaaatgttcaggtttatttgtggaaatgcaagatttctatgaaaatagtttttgtatggaaatttttgtaatactttttatcaacaaaacaagaacatgtgttcctgtcaggggtgtgatgtcaagcatgaatggtagtgcgtgtgcaccaccaacgtttggtgaaaactatttttatcaagaaaaaaggaatcatagaagagaaatattttcaagttagataatataaaagctaggtgcactaccaccactgcttaccatgccacacccctggtttccacgaggctgacaacatactgtaatgaacaattgtgtgtaaaatggtaaaagacacagacctcttgacaacattgtgataacagttgagtgcacacagtttgctgtttgaatccaatgcacaaaattaaaaaaaatcattaaaactatgttcattttactttca

SEQ ID NO: 12303 - DNA, 1752 bp, Homo sapiens
  source 1..1752: mol_type = unassigned DNA
atgaagattattttcccgattctaagtaatccagtcttcaggcgcaccgttaaactcctgctctgtttactgtggattggatattctcaaggaaccacacatgtattaagatttggtggtatttttgaatatgtggaatctggcccaatgggagctgaggaacttgcattcagatttgctgtgaacacaattaacagaaacagaacattgctacccaatactacccttacctatgatacccagaagataaacctttatgatagttttgaagcatccaagaaagcctgtgatcagctgtctcttggggtggctgccatcttcgggccttcacacagctcatcagcaaacgcagtgcagtccatctgcaatgctctgggagttccccacatacagacccgctggaagcaccaggtgtcagacaacaaagattccttctatgtcagtctctacccagacttctcttcactcagccgtgccattttagacctggtgcagtttttcaagtggaaaaccgtcacggttgtgtatgatgacagcactggtctcattcgtttgcaagagctcatcaaagctccatcaaggtataatcttcgactcaaaattcgtcagttacctgctgatacaaaggatgcaaaacccttactaaaagaaatgaaaagaggcaaggagtttcatgtaatctttgattgtagccatgaaatggcagcaggcattttaaaacaggcattagctatgggaatgatgacagaatactatcattatatctttaccactctggacctctttgctcttgatgttgagccctaccgatacagtggtgttaacatgacagggttcagaatattaaatacagaaaatacccaagtctcctccatcattgaaaagtggtcgatggaacgattgcaggcacctccgaaacccgattcaggtttgctggatggatttatgacgactgatgctgctctaatgtatgatgctgtgcatgtggtgtctgtggccgttcaacagtttccccagatgacagtcagttccttgcagtgtaatcgacataaaccctggcgcttcgggacccgctttatgagtctaattaaagaggcacattgggaaggcctcacaggcagaataactttcaacaaaaccaatggcttgagaacagattttgatttggatgtgatcagtctgaaggaagaaggtctagaaaagattggaacgtgggatccagccagtggcctgaatatgacagaaagtcaaaagggaaagccagcgaacatcacagattccttatccaatcgttctttgattgttaccaccattttggaagagccttatgtcctttttaagaagtctgacaaacctctctatggtaatgatcgatttgaaggctattgcattgatctcctcagagagttatctacaatccttggctttacatatgaaattagacttgtggaagatgggaaatatggagcccaggatgatgccaatggacaatggaatggaatggttcgtgaactaattgatcataaagctgaccttgcagttgctccactggctattacctatgttcgagagaaggtcatcgacttttccaagccctttatgacacttggaataagtattttgtaccgcaagcccaatggtacaaacccaggcgtcttctccttcctgaatcctctctcccctgatatctggatgtatattctgctggcttacttgggtgtcagttgtgtgctctttgtcatagccagattt

SEQ ID NO: 12304 - DNA, 4876 bp, Homo sapiens
  source 1..4876: mol_type = unassigned DNA
ggagagcagctatctcagtctttctcacttaatcttggcttcacgtcagaagctgtgcagcagtgcagtagaatagggcctggcaaaacctttgctagcaaagcgccttttgtgccgggctgtggctcgctatcgacatctcgtccgttaccaaggctgggtttcctactgatttccctcctcctctgctttcacaggctcgcgcggccggacattgtgggtgtgcgtgctggatttctcccggatgctctccgactaacatggatgtcccaccattccttgcagtggaaggttgttccttggcgcagtgagtgaagaacatgcagcgattgctaatgggtttgggaagcggagactccttcctctctctatgaccatgccgtgatcgtgtctgcggtcaccactcgacgcatcctcatttctacccgaacccaggagccgaacgctagatcggggaagtgggtgccgtgcgtgtgggcacagaaacaccatgaagattattttcccgattctaagtaatccagtcttcaggcgcaccgttaaactcctgctctgtttactgtggattggatattctcaaggaaccacacatgtattaagatttggtggtatttttgaatatgtggaatctggcccaatgggagctgaggaacttgcattcagatttgctgtgaacacaattaacagaaacagaacattgctacccaatactacccttacctatgatacccagaagataaacctttatgatagttttgaagcatccaagaaagcctgtgatcagctgtctcttggggtggctgccatcttcgggccttcacacagctcatcagcaaacgcagtgcagtccatctgcaatgctctgggagttccccacatacagacccgctggaagcaccaggtgtcagacaacaaagattccttctatgtcagtctctacccagacttctcttcactcagccgtgccattttagacctggtgcagtttttcaagtggaaaaccgtcacggttgtgtatgatgacagcactggtctcattcgtttgcaagagctcatcaaagctccatcaaggtataatcttcgactcaaaattcgtcagttacctgctgatacaaaggatgcaaaacccttactaaaagaaatgaaaagaggcaaggagtttcatgtaatctttgattgtagccatgaaatggcagcaggcattttaaaacaggcattagctatgggaatgatgacagaatactatcattatatctttaccactctggacctctttgctcttgatgttgagccctaccgatacagtggtgttaacatgacagggttcagaatattaaatacagaaaatacccaagtctcctccatcattgaaaagtggtcgatggaacgattgcaggcacctccgaaacccgattcaggtttgctggatggatttatgacgactgatgctgctctaatgtatgatgctgtgcatgtggtgtctgtggccgttcaacagtttccccagatgacagtcagttccttgcagtgtaatcgacataaaccctggcgcttcgggacccgctttatgagtctaattaaagaggcacattgggaaggcctcacaggcagaataactttcaacaaaaccaatggcttgagaacagattttgatttggatgtgatcagtctgaaggaagaaggtctagaaaagattggaacgtgggatccagccagtggcctgaatatgacagaaagtcaaaagggaaagccagcgaacatcacagattccttatccaatcgttctttgattgttaccaccattttggaagagccttatgtcctttttaagaagtctgacaaacctctctatggtaatgatcgatttgaaggctattgcattgatctcctcagagagttatctacaatccttggctttacatatgaaattagacttgtggaagatgggaaatatggagcccaggatgatgccaatggacaatggaatggaatggttcgtgaactaattgatcataaagctgaccttgcagttgctccactggctattacctatgttcgagagaaggtcatcgacttttccaagccctttatgacacttggaataagtattttgtaccgcaagcccaatggtacaaacccaggcgtcttctccttcctgaatcctctctcccctgatatctggatgtatattctgctggcttacttgggtgtcagttgtgtgctctttgtcatagccaggtttagtccttatgagtggtataatccacacccttgcaaccctgactcagacgtggtggaaaacaattttaccttgctaaatagtttctggtttggagttggagctctcatgcagcaaggttctgagctcatgcccaaagcactgtccaccaggatagtgggaggcatttggtggtttttcacacttatcatcatttcttcgtatactgctaacttagccgcctttctgacagtggaacgcatggaatcccctattgactctgctgatgatttagctaaacaaaccaagatagaatatggagcagtagaggatggtgcaaccatgacttttttcaagaaatcaaaaatctccacgtatgacaaaatgtgggcctttatgagtagcagaaggcagtcagtgctggtcaaaagtaatgaagaaggaatccagcgagtcctcacctctgattatgctttcctaatggagtcaacaaccatcgagtttgttacccagcggaactgtaacctgacacagattggcggccttatagactctaaaggttatggcgttggcactcccatgggttctccatatcgagacaaaattaccatagcaattcttcagctgcaagaggaaggcaaactgcatatgatgaaggagaaatggtggaggggcaatggttgcccagaagaggagagcaaagaggccagtgccctgggggttcagaatattggtggcatcttcattgttctggcagccggcttggtgctttcagtttttgtggcagtgggagaatttttatacaaatccaaaaaaaacgctcaattggaaaaggaatcttctatttggttagtgccaccataccatccagacactgtttagtaatcttttgaaacttactaaaagaggtttttaataatgaggtccttctgtagtgccatggtagaagaattgaggatgtccctgaagtgccagcgtcggttaaaacataagccacaggccccagttattgtgaaaacagaagaagttatcaacatgcacacatttaacgacagaaggttgccaggtaaagaaaccatggcataaagctgggaggccaaacacccaagcacaaactgtcgtctttttccaaacaatttagccagaatgtttcctgtggaaatatgcaacctgtgcaaaataaaatgagttacctcatgccgctgtgtctatgaactagagactctgtgatctaagcagttgcaatgatcagacttgatttacaagcatcatggatcaaccaagttacacggggttacactgttaatcatgggttcctcccttcttctgagtgaatgttaacatgcgcattttgtggctgatttcaaatgcagtccagtgagaaattacaggttccttttgaagctcaactgttgccaggagatggaatatcaatgcccaacagggcaaccaataaaagtgtcactaagaatataaatatttggaatcagcaaaaactgtagtgttacaggaaacagtacagtcttctgaacacccagatcatagaggtgatgatgttactagcccccaactactcagtataattattgtctgaatgcaaagtatgtgtttataggatgtgaaaaaatgtaatgcaaaacaaatttgaatcccatggcagttggaatataaagcagatgttcatcacttattttccttttttcttttcttatttttttttttgacagtctgtgtcactgattgagatagaaatgccaattatcaaggaaataatgttttcttaagttccctaaggcagaagatttaacatgcaattctaccagatcccttcctattcccccaacaccttttctctaacccccatatcccaaataataataataataataataataataataataataataataaaagcagttggttcagtgattctgaattaaaaggataatgttttgcaatgttcaagttgtaaaaactggccgagtattggctgtgtggaagactaaagctttcattctaacattcagacatagcaatccaaacccttgttcctgctgtaaatgaacttgatggagcatgggcagatttcagtgatacgagaaaggggactggtcatctatagaaaaatctgtgagagaacttggaagtggactgcgtttatcaatacagtcacaatgttaaatgaacaaaattcttgaacagttttttttcaaaaaatgttcaggtttatttgtggaaatgcaagatttctatgaaaatagtttttgtatggaaatttttgtaatactttttatcaacaaaacaagaacatgtgttcctgtcaggggtgtgatgtcaagcatgaatggtagtgcgtgtgcaccaccaacgtttggtgaaaactatttttatcaagaaaaaaggaatcatagaagagaaatattttcaagttagataatataaaagctaggtgcactaccaccactgcttaccatgccacacccctggtttccacgaggctgacaacatactgtaatgaacaattgtgtgtaaaatggtaaaagacacagacctcttgacaacattgtgataacagttgagtgcacacagtttgctgtttgaatccaatgcacaaaattaaaaaaaatcattaaaactatgttcattttactttca

SEQ ID NO: 12305 - DNA, 4789 bp, Homo sapiens
  source 1..4789: mol_type = unassigned DNA
ggagagcagctatctcagtctttctcacttaatcttggcttcacgtcagaagctgtgcagcagtgcagtagaatagggcctggcaaaacctttgctagcaaagcgccttttgtgccgggctgtggctcgctatcgacatctcgtccgttaccaaggctgggtttcctactgatttccctcctcctctgctttcacaggctcgcgcggccggacattgtgggtgtgcgtgctggatttctcccggatgctctccgactaacatggatgtcccaccattccttgcagtggaaggttgttccttggcgcagtgagtgaagaacatgcagcgattgctaatgggtttgggaagcggagactccttcctctctctatgaccatgccgtgatcgtgtctgcggtcaccactcgacgcatcctcatttctacccgaacccaggagccgaacgctagatcggggaagtgggtgccgtgcgtgtgggcacagaaacaccatgaagattattttcccgattctaagtaatccagtcttcaggcgcaccgttaaactcctgctctgtttactgtggattggatattctcaaggaaccacacatgtattaagatttggtggtatttttgaatatgtggaatctggcccaatgggagctgaggaacttgcattcagatttgctgtgaacacaattaacagaaacagaacattgctacccaatactacccttacctatgatacccagaagataaacctttatgatagttttgaagcatccaagaaagcctgtgatcagctgtctcttggggtggctgccatcttcgggccttcacacagctcatcagcaaacgcagtgcagtccatctgcaatgctctgggagttccccacatacagacccgctggaagcaccaggtgtcagacaacaaagattccttctatgtcagtctctacccagacttctcttcactcagccgtgccattttagacctggtgcagtttttcaagtggaaaaccgtcacggttgtgtatgatgacagcactggtctcattcgtttgcaagagctcatcaaagctccatcaaggtataatcttcgactcaaaattcgtcagttacctgctgatacaaaggatgcaaaacccttactaaaagaaatgaaaagaggcaaggagtttcatgtaatctttgattgtagccatgaaatggcagcaggcattttaaaacaggcattagctatgggaatgatgacagaatactatcattatatctttaccactctggacctctttgctcttgatgttgagccctaccgatacagtggtgttaacatgacagggttcagaatattaaatacagaaaatacccaagtctcctccatcattgaaaagtggtcgatggaacgattgcaggcacctccgaaacccgattcaggtttgctggatggatttatgacgactgatgctgctctaatgtatgatgctgtgcatgtggtgtctgtggccgttcaacagtttccccagatgacagtcagttccttgcagtgtaatcgacataaaccctggcgcttcgggacccgctttatgagtctaattaaagaggcacattgggaaggcctcacaggcagaataactttcaacaaaaccaatggcttgagaacagattttgatttggatgtgatcagtctgaaggaagaaggtctagaaaagattggaacgtgggatccagccagtggcctgaatatgacagaaagtcaaaagggaaagccagcgaacatcacagattccttatccaatcgttctttgattgttaccaccattttggaagagccttatgtcctttttaagaagtctgacaaacctctctatggtaatgatcgatttgaaggctattgcattgatctcctcagagagttatctacaatccttggctttacatatgaaattagacttgtggaagatgggaaatatggagcccaggatgatgccaatggacaatggaatggaatggttcgtgaactaattgatcataaagctgaccttgcagttgctccactggctattacctatgttcgagagaaggtcatcgacttttccaagccctttatgacacttggaataagtattttgtaccgcaagcccaatggtacaaacccaggcgtcttctccttcctgaatcctctctcccctgatatctggatgtatattctgctggcttacttgggtgtcagttgtgtgctctttgtcatagccaggtttagtccttatgagtggtataatccacacccttgcaaccctgactcagacgtggtggaaaacaattttaccttgctaaatagtttctggtttggagttggagctctcatgcagcaaggttctgagctcatgcccaaagcactgtccaccaggatagtgggaggcatttggtggtttttcacacttatcatcatttcttcgtatactgctaacttagccgcctttctgacagtggaacgcatggaatcccctattgactctgctgatgatttagctaaacaaaccaagatagaatatggagcagtagaggatggtgcaaccatgacttttttcaagaaatcaaaaatctccacgtatgacaaaatgtgggcctttatgagtagcagaaggcagtcagtgctggtcaaaagtaatgaagaaggaatccagcgagtcctcacctctgattatgctttcctaatggagtcaacaaccatcgagtttgttacccagcggaactgtaacctgacacagattggcggccttatagactctaaaggttatggcgttggcactcccatgggttctccatatcgagacaaaattaccatagcaattcttcagctgcaagaggaaggcaaactgcatatgatgaaggagaaatggtggaggggcaatggttgcccagaagaggagagcaaagaggccagtgccctgggggttcagaatattggtggcatcttcattgttctggcagccggcttggtgctttcagtttttgtggcagtgggagaatttttatacaaatccaaaaaaaacgctcaattggaaaagaggtccttctgtagtgccatggtagaagaattgaggatgtccctgaagtgccagcgtcggttaaaacataagccacaggccccagttattgtgaaaacagaagaagttatcaacatgcacacatttaacgacagaaggttgccaggtaaagaaaccatggcataaagctgggaggccaaacacccaagcacaaactgtcgtctttttccaaacaatttagccagaatgtttcctgtggaaatatgcaacctgtgcaaaataaaatgagttacctcatgccgctgtgtctatgaactagagactctgtgatctaagcagttgcaatgatcagacttgatttacaagcatcatggatcaaccaagttacacggggttacactgttaatcatgggttcctcccttcttctgagtgaatgttaacatgcgcattttgtggctgatttcaaatgcagtccagtgagaaattacaggttccttttgaagctcaactgttgccaggagatggaatatcaatgcccaacagggcaaccaataaaagtgtcactaagaatataaatatttggaatcagcaaaaactgtagtgttacaggaaacagtacagtcttctgaacacccagatcatagaggtgatgatgttactagcccccaactactcagtataattattgtctgaatgcaaagtatgtgtttataggatgtgaaaaaatgtaatgcaaaacaaatttgaatcccatggcagttggaatataaagcagatgttcatcacttattttccttttttcttttcttatttttttttttgacagtctgtgtcactgattgagatagaaatgccaattatcaaggaaataatgttttcttaagttccctaaggcagaagatttaacatgcaattctaccagatcccttcctattcccccaacaccttttctctaacccccatatcccaaataataataataataataataataataataataataataataaaagcagttggttcagtgattctgaattaaaaggataatgttttgcaatgttcaagttgtaaaaactggccgagtattggctgtgtggaagactaaagctttcattctaacattcagacatagcaatccaaacccttgttcctgctgtaaatgaacttgatggagcatgggcagatttcagtgatacgagaaaggggactggtcatctatagaaaaatctgtgagagaacttggaagtggactgcgtttatcaatacagtcacaatgttaaatgaacaaaattcttgaacagttttttttcaaaaaatgttcaggtttatttgtggaaatgcaagatttctatgaaaatagtttttgtatggaaatttttgtaatactttttatcaacaaaacaagaacatgtgttcctgtcaggggtgtgatgtcaagcatgaatggtagtgcgtgtgcaccaccaacgtttggtgaaaactatttttatcaagaaaaaaggaatcatagaagagaaatattttcaagttagataatataaaagctaggtgcactaccaccactgcttaccatgccacacccctggtttccacgaggctgacaacatactgtaatgaacaattgtgtgtaaaatggtaaaagacacagacctcttgacaacattgtgataacagttgagtgcacacagtttgctgtttgaatccaatgcacaaaattaaaaaaaatcattaaaactatgttcattttactttca

SEQ ID NO: 12306 - DNA, 2139 bp, Homo sapiens
  source 1..2139: mol_type = unassigned DNA
ggtggtatttttgaatatgtggaatctggcccaatgggagctgaggaacttgcattcagatttgctgtgaacacaattaacagaaacagaacattgctacccaatactacccttacctatgatacccagaagataaacctttatgatagttttgaagcatccaagaaagcctgtgatcagctgtctcttggggtggctgccatcttcgggccttcacacagctcatcagcaaacgcagtgcagtccatctgcaatgctctgggagttccccacatacagacccgctggaagcaccaggtgtcagacaacaaagattccttctatgtcagtctctacccagacttctcttcactcagccgtgccattttagacctggtgcagtttttcaagtggaaaaccgtcacggttgtgtatgatgacagcactggtctcattcgtttgcaagagctcatcaaagctccatcaaggtataatcttcgactcaaaattcgtcagttacctgctgatacaaaggatgcaaaacccttactaaaagaaatgaaaagaggcaaggagtttcatgtaatctttgattgtagccatgaaatggcagcaggcattttaaaacaggcattagctatgggaatgatgacagaatactatcattatatctttaccactctggacctctttgctcttgatgttgagccctaccgatacagtggtgttaacatgacagggttcagaatattaaatacagaaaatacccaagtctcctccatcattgaaaagtggtcgatggaacgattgcaggcacctccgaaacccgattcaggtttgctggatggatttatgacgactgatgctgctctaatgtatgatgctgtgcatgtggtgtctgtggccgttcaacagtttccccagatgacagtcagttccttgcagtgtaatcgacataaaccctggcgcttcgggacccgctttatgagtctaattaaagaggcacattgggaaggcctcacaggcagaataactttcaacaaaaccaatggcttgagaacagattttgatttggatgtgatcagtctgaaggaagaaggtctagaaaagattggaacgtgggatccagccagtggcctgaatatgacagaaagtcaaaagggaaagccagcgaacatcacagattccttatccaatcgttctttgattgttaccaccattttggaagagccttatgtcctttttaagaagtctgacaaacctctctatggtaatgatcgatttgaaggctattgcattgatctcctcagagagttatctacaatccttggctttacatatgaaattagacttgtggaagatgggaaatatggagcccaggatgatgccaatggacaatggaatggaatggttcgtgaactaattgatcataaatcaaaaatctccacgtatgacaaaatgtgggcctttatgagtagcagaaggcagtcagtgctggtcaaaagtaatgaagaaggaatccagcgagtcctcacctctgattatgctttcctaatggagtcaacaaccatcgagtttgttacccagcggaactgtaacctgacacagattggcggccttatagactctaaaggttatggcgttggcactcccatgggttctccatatcgagacaaaattaccatagcaattcttcagctgcaagaggaaggcaaactgcatatgatgaaggagaaatggtggaggggcaatggttgcccagaagaggagagcaaagaggccagtgccctgggggttcagaatattggtggcatcttcattgttctggcagccggcttggtgctttcagtttttgtggcagtgggagaatttttatacaaatccaaaaaaaacgctcaattggaaaaggaatcttctatttggttagtgccaccataccatccagacactgtttagtaatcttttgaaacttactaaaagaggtttttaataatgaggtccttctgtagtgccatggtagaagaattgaggatgtccctgaagtgccagcgtcggttaaaacataagccacaggccccagttattgtgaaaacagaagaagttatcaacatgcacacatttaacgacagaaggttgccaggtaaagaaaccatggcataa

SEQ ID NO: 12307 - DNA, 9101 bp, Homo sapiens
  source 1..9101: mol_type = unassigned DNA
ctcggcggcgcccaacgatgaccgctccctggcggcgcctccggagtctggtttgggaatactgggccgggctcctcgtgtgcgccttctggatcccggactcgcgcgggatgccccacgtcatccggatcggaggaatcttcgagtatgcggacggccccaacgcccaggtcatgaatgccgaggagcatgcctttcgattttctgccaacatcatcaacaggaacaggactctgctgcccaacacaaccttgacctatgacatacagaggattcacttccatgacagcttcgaggcgaccaaaaaggcctgtgaccagctggcactgggcgtggtggcgatcttcggcccatcacagggctcctgcaccaatgccgtccagtccatctgcaatgccctggaggtgccccacatccagctgcgttggaagcaccacccgctggacaacaaggacaccttctacgtgaacctctaccccgactacgcctcgctcagccatgccatcctcgacctggtccagtacctcaagtggcggtcagccaccgtggtctatgacgacagtacagggctcatccgactgcaggagctcatcatggccccatcaagatacaacatccgcctgaagatccgtcagctccccatcgactctgacgactcgcgccccttgctcaaggagatgaagcgaggccgggaattccgcattatcttcgactgcagccacactatggcggcccagatcctcaagcaggccatggccatgggcatgatgactgagtactaccacttcatcttcaccactctggatctctacgctttagacctggagccctaccgctactcaggcgtgaacctgacaggattccggattctcaatgtggacaacccacacgtctcggccattgtggagaagtggtccatggagcggctgcaggcagctccccggtccgagtctggcctgctggatggagtgatgatgactgatgcagccttactgtacgacgccgtccatatcgtgtccgtgtgctaccagcgggcaccacagatgaccgtgaactccctgcagtgccatcggcacaaggcctggcgctttggcggccgcttcatgaacttcatcaaggaggctcaatgggaaggattaactggacgaattgttttcaacaaaactagtggcttgcggacggattttgatctggacatcatcagcctgaaagaggatggcctggagaaggttggggtgtggagtcctgccgacgggctcaacatcactgaggttgccaaaggccgaggccctaatgtcaccgactctctgacaaacagatcactcattgtcaccacagtgctggaggagcccttcgtcatgtttcggaaatcagacaggacgctatacgggaatgaccggttcgagggctactgcatcgacctgctaaaggagctggcccacatccttggtttctcctatgagatccggctggtggaggacggcaagtacggggcacaggatgacaagggccagtggaacggcatggtcaaggagctcatcgaccacaaggcagatctggccgtggcccccctgaccatcacccatgttcgagagaaggccatcgacttctccaagcccttcatgacacttggtgtgagcatcctgtatcgaaagcccaatggcaccaaccccagcgtcttctccttcctcaatcccctgtccccagacatctggatgtatgttctcctcgcctacctgggggtcagctgtgtcctcttcgtcatcgccaggttcagcccttatgagtggtacgatgctcacccctgcaaccctggctccgaggtggtggaaaataacttcactctgcttaacagcttctggtttggaatgggatccctgatgcagcaagggtctgagctgatgcccaaagccctgtccacacgcatcattggtggcatctggtggttcttcacgctcatcatcatctcttcctacacggccaacctggctgcctttctgaccgtggagcgcatggaatcacccattgactctgctgatgacctggccaagcaaaccaaaatcgagtatggggctgtcaaggatggggccaccatgaccttcttcaagaaatccaagatctccaccttcgagaagatgtgggccttcatgagcagcaagccatcggcgctggtgaagaacaacgaggagggcatccagagggccctgacggccgactacgcgctgctcatggagtccaccaccatcgagtacgtcacgcagaggaactgcaacctcacccagatcgggggcctcattgactccaagggctacggcatcggcacgcccatgggctccccataccgggacaagatcaccatcgccatcctgcagcttcaggaggaggacaagctgcatatcatgaaggagaagtggtggcggggcagcgggtgtcctgaggaggaaaacaaagaggccagtgccctggggatccagaagatcgggggcatcttcattgtcctggccgccgggctggtcctctctgtgctggtggccgtgggcgagtttgtgtacaagctccgcaaaacagcagagagagagcagcgttccttctgcagcaccgtggccgatgagatccgtttctcccttacctgccagcgtcgagtcaagcacaagcctcagcctcccatgatggtcaagactgacgccgtcatcaacatgcacacattcaatgaccgccggcttcccggcaaggacagcatggcctgcagcacatccttagcccctgtgttcccctaggcacagctggggtggggacctcaggcctgggggctgggcagaggaaagcaaaggagattggaaggaacgtcccctgtccccgcactgggcttggggaccagagctgccacctgcctgttgggccaggagcctcctgcccttacctgccaggaagccagcaggctctcaggccagctgcttgggcttcatcctcctcagatcttctgtgggtttctaaagctgccagccgagatagccaaggccaaaggaagcacatgcctctctcaggccaaactcacctgcccctcaactctcctccagagtcagaagtttctgccgcagccctgcagagggcacagaaaatggaagacagctcttatattgccatttcttccacaagagcccaggcctcctacagcttgaccgtgaggccagagacacaagccttcggcgccttaaggatgttctagcatggctgccaatgggagctcatggtgagggatacccatcccatatgcctgggcagaaggaagacttcatccctctggggctgttcacgtggtcctaatcttctgaacttggcgctgcccctggcagcccctgttctggcagagttgaagacagagctacacaggggaaaagaggagtttggggtatgggagagaagagaatgcacaaacagaggccgccattttggattcttatggacaatgacccagtggttcctaatcctctaggaggtctctaagaatataagtgggggagtggccacagaaaattcttctccactttctagccagaggagagaggaccccctgaatttctcacaaaggatgcccaaagatgcagccggtatttgaagcccagcagaggaaaagcagattccatggaagtcccaccggctcttgtgccaatggatctcactttcctggttagcaagctgttgtctaaaccctgttcacatttggaaacctgggctctttgccatcttctcatcaacaactccccattcctggctggttgaccttggcctcactctgtctttttgaaagaagagttggttgaagtgaaagtcaagttgtccctcctcaaaaaaggagttagtgtcctactacacagactaactttgggctaggtgagggaaaccagaagagaccaaaagaacttctggtctcctggacttaccaaacctagagatgctccccaggaaaagaaagtttccagggacataatatcatagctggcagaggccccaagggtggggaggaagaagctgcctcctggagaattaaccaaagaccccacacagagacatgaggccatcctggccccttgtctgttgtccagagcagctatggcattgtggggcttggggaagacagcagagaagtagcagcaggttgggtaccagccagggggtggacctatgagttccagcttgctgtgatgaatgctctagaggtctgtgactttaagagtcttggaaaagaatgagacatgaaggattaggaacaaagtgtccttaaagagaacatgatgggccagcagggttaccatggccaaggatggaggggcaggttttgaacaggggagggaggttctggggattctggatgagaactggggcataccagccactcccctcccacctctgtcccatgctgcttgggaagcccggttagggaagagcttcatttggatctcaagggctttctcatctgggtgaagggcaatctctagcaaagcaggagaccacagtgggctcatgtgataaacactgtccctcctccagactgtgagctgcaggaccaaaccagcaggttcccagaatcctagcagctctgactggctatgtacattggacgagggagaggagggctagacatacaccaaagccccatgcatgtaatgttaggaaaagccatgctgtcataagcttcagggtacagagggcgtgtgcatgtgtgtctgtgtctttgtgtttgtatgtgtgagcttcgggggctggggcacaggacagatctggacatataacatagtccagggcatgcaataataggtgaatccttggggatctgatgtgtgcatatgcgtgcgtatgtgtatctgagtgaattggggacgagggagacaaatatgtgaagcagcaaggccccatatatgtaaaaacaggagaagccatgtcataatggggccctggtgggtatgcatatgtaagcatgcatgcatgcataggtgtgtgcatgctggtgtgtgtgtgtgcacatgtacactgaatggcataggatggagatcaggatcttacctgcagctagccaaatatgcgtaaaaggagaagccatgtcaccaaggggtccatgtctgagtgcatgtgaacacatgtgtacaggcatgtgtgcacagtggggagcggggggaaggccaggaccagagagtcgtgtgacatgggtcaatgcatgctgtagacaagaagccacgtggagttgaagtttccgagtgtgtgggacacacacatatgttccaggtcacagtggaagcaaagacagacaatcaggaaggccgggcaccagggtctgtttgcacttctgtcatgggagagatcatttgtcacagagaggttccaaggttgcatgggcacacttgccaggagacgggggcacaacccttcaggggctcatgctgctgatgcctttgctgtggacatcatgtcctgtttgaagggaaaactcttttttgtaattcccaggtaacaggattctaatgaaggtatttgccaatttgctgtcagcaaacacaatcattaagcgccgtcttactttgtccagtatagtttcagagcacgtgcctcattcttgctcttgtctcacacatgtgttgtgtgtgtgatgctacatgagcatgttcttcagaggctatgcatatatgtggattgtgacaggaggaagaagaagtggtgagaatttttataaaacgaacaaagaatagtggataaatagaggcagaattcaattcgagaaaccccccaaaatgtaccgactggtctttagactcctgtgtggaagcaggagggcatgctgcctcatctcctctcccaggcaaaccttgcgtcctgatgttcaggtgttgtcggtgtggctgatatttggcttctggccaatatcctgcatttgtcctagagaccagcctagtgttcaaagtgcagtggggaccacagctgcccaagcatgagctctgtctctcccggggcactgaaaatgatgctacatctgtgaggtgggacggagtggggaggtgttttcagtgaggcagatcttgtgtttttttaagtttaggtctgtcctgccagtgggcatggagctgagctggggcaggtgcatgcgtgtgtgtgtatgtgtgtgtatgcatgtgtagtgtgtgtgcacacacgcaggcactgagaggtgatgggaagcatgaaagcttgcttggatggagcagaagaaggaacctgcctgagcagatgctggactgtccctgcgtggtgccacatgccagccctgaacagaagaatgtccccactgcatccccaaatgcaagtgcctcctctccacctgctcaagctggccaagttgaggggcagtggtaagaagacaccaaccccaccgcccctgccgaggccctgggactaaggacagtgagccctcccaatcactctccccttgtcctgctgctggtttctctgctctggacagaagaaaatcctgaaagcgttgtcaatgttcaagtggccccatgctgcaagagtctctcgcgaggggtgacgcccccttggccagtgtgctggactttgagtgtctgaggggtaagagggccaccccctcctcacagccgagactctatctaacctggaagcacactctggctccacccccaacccctgccatgccctaggccctggaagatgggaatcctggcccaggccagggtaaagggccaaacaggttagaagttgctcccctccaccaggcgtgcactcaccaagaacgatcaaaagctccctttctgcctacttttccaggggtactgggtgtggggggtgggtcacagctcctgcttcatcactcagcatgaagttggtccctccctgagccactcccagctacatgcacaaacatctgaaagtaggctggcctctctggctcacatctggagtggtcctgtgtggatacccatctgcaaaggggctagaggtttggacaaacagctgcatggacttatcatctgggatgggcccagcctcatggacagatacaagaaatgagcccaactctgtgggcaggtctctggattagacacatctgaaagttgcaggtcaagtggacacatctggaagtggcccggctgctggctgccatggaagggccgtgccctctgtccccatggcagtttaaatcaggccttcccttcagtcctggatttgccctggagtaaaaatttcagagctgaggtcatacgtgagtcacaaaacttttaggtagaaggttaatgttctgtacaatatatatatgaatgtaaaatatatatatatactgtatatatatatatatatgcacagtgtatatatgacctgtagcccatgtgtatacaaccctttcctgcacgtctgcacacggagtgtacagaacccagccagcacgggtgaggaccagatgagagatgggggctgcagcagcaaagtctgggacggaggtctcagagagccccttggggtggcgaaggccctccacacatcagagctccagaccctgaagaagagggcagagctacatggtgctgccaggtgagtcctgcaccgccagggcctcctgtgggaggggcaggaatggccaacggacctcatctccatccgagcctgtctgaggcaggacagctgggtgtgtctgagaagcaatgtcatgctagtactcagcccctgtgccaatattacattctagttctggggcaattcatcaggagcagaagggctgggaaagagcaggccactccccaggcctgttctcacacctgcctgcagaatcacaggtaggtttcaggctccatctaggataccctagaaggcggggctattctaggtagcaaaagcctctgcctctgattctcacccacatgcagaagcagtcacaacttgcacacaacacagctcacaactagggaaagcacttgttaaagagaatgcccccagggcatggccagcatgccgatacagtgttcccatgcccctgttactgatcctgtcctcctgccttctagaacagtggacctcacatcacctcccagattgtctccattttatggattgaaactctgaggcctccagacatgaagaagcagccatagattcagtcaaatgccagccaagggtttgccttgcctcagacaacctccccagccccatttgacccagagaccagctgtcagggagcgacctcagagccagaggggtgaaagatgagaggcaagaaggtagctcctatcctagcacagcccaggctccatctgtctgcctttctctcccctgcggcatcctggcagggcagttggcagagtgccccctccccaggaggctgcagatctctgtccctggctcacccagatcggtctgttctctgcagttccattcctttagcctctttcgcaggtctgagcatctctggagcatgcaggggaggagatatctgaggtgggcttccgtgcagtcagcagcctgccccagcttcagcctcaggcgtcaggctggtctgcactgaactctgggtctgcctctggggccctgaccaagcacgcctgactccagccccatgaggagcatcctgtcttggttccgtagggatcatgggtcctcttaccactgtgcgccaagcccccagcccacctctgcctgggccgacttcctggttgggcctcccatggtaggggcctcagttcccaggctctgggctgagcccccagggagcaccatgggcctctgagaccctagacctgtcccaccacccagaccagagtgcctggacgccccccactcccactcaacatggttcccacacactggtctctgggccattcaggggatgccctttgtggacatgcagaatttctatgaatatagttttttgtaaacattttgtaacaatttgggtttcatagtaactgtgttacttgccaatcattctaggctgatgtaaataaatttccaaacaaatctgattattttcctttttaagacactgtgatatatcaaagtgcacagtttgctgtatgaagtaatatggttttaaattttaaataaaatgtttctagaaaacaggg

SEQ ID NO: 12308 - DNA, 2955 bp, Homo sapiens
  source 1..2955: mol_type = unassigned DNA
cacgctcggcggcgcccaacgatgaccgctccctggcggcgcctccggagtctggtttgggaatactgggccgggctcctcgtgtgcgccttctggatcccggactcgcgcgggatgccccacgtcatccggatcggaggaatcttcgagtatgcggacggccccaacgcccaggtcatgaatgccgaggagcatgcctttcgattttctgccaacatcatcaacaggaacaggactctgctgcccaacacaaccttgacctatgacatacagaggattcacttccatgacagcttcgaggcgaccaaaaaggcctgtgaccagctggcactgggcgtggtggcgatcttcggcccatcacagggctcctgcaccaatgccgtccagtccatctgcaatgccctggaggtgccccacatccagctgcgttggaagcaccacccgctggacaacaaggacaccttctacgtgaacctctaccccgactacgcctcgctcagccatgccatcctcgacctggtccagtacctcaagtggcggtcagccaccgtggtctatgacgacagtacagggctcatccgactgcaggagctcatcatggccccatcaagatacaacatccgcctgaagatccgtcagctccccatcgactctgacgactcgcgccccttgctcaaggagatgaagcgaggccgggaattccgcattatcttcgactgcagccacactatggcggcccagatcctcaagcaggccatggccatgggcatgatgactgagtactaccacttcatcttcaccactctggatctctacgctttagacctggagccctaccgctactcaggcgtgaacctgacaggattccggattctcaatgtggacaacccacacgtctcggccattgtggagaagtggtccatggagcggctgcaggcagctccccggtccgagtctggcctgctggatggagtgatgatgactgatgcagccttactgtacgacgccgtccatatcgtgtccgtgtgctaccagcgggcaccacagatgaccgtgaactccctgcagtgccatcggcacaaggcctggcgctttggcggccgcttcatgaacttcatcaaggaggctcaatgggaaggattaactggacgaattgttttcaacaaaactagtggcttgcggacggattttgatctggacatcatcagcctgaaagaggatggcctggagaaggttggggtgtggagtcctgccgacgggctcaacatcactgaggttgccaaaggccgaggccctaatgtcaccgactctctgacaaacagatcactcattgtcaccacagtgctggaggagcccttcgtcatgtttcggaaatcagacaggacgctatacgggaatgaccggttcgagggctactgcatcgacctgctaaaggagctggcccacatccttggtttctcctatgagatccggctggtggaggacggcaagtacggggcacaggatgacaagggccagtggaacggcatggtcaaggagctcatcgaccacaaggcagatctggccgtggcccccctgaccatcacccatgttcgagagaaggccatcgacttctccaagcccttcatgacacttggtgtgagcatcctgtatcgaaagcccaatggcaccaaccccagcgtcttctccttcctcaatcccctgtccccagacatctggatgtatgttctcctcgcctacctgggggtcagctgtgtcctcttcgtcatcgccaggttcagcccttatgagtggtacgatgctcacccctgcaaccctggctccgaggtggtggaaaataacttcactctgcttaacagcttctggtttggaatgggatccctgatgcagcaagggtctgagctgatgcccaaagccctgtccacacgcatcattggtggcatctggtggttcttcacgctcatcatcatctcttcctacacggccaacctggctgcctttctgaccgtggagcgcatggaatcacccattgactctgctgatgacctggccaagcaaaccaaaatcgagtatggggctgtcaaggatggggccaccatgaccttcttcaagaaatccaagatctccaccttcgagaagatgtgggccttcatgagcagcaagccatcggcgctggtgaagaacaacgaggagggcatccagagggccctgacggccgactacgcgctgctcatggagtccaccaccatcgagtacgtcacgcagaggaactgcaacctcacccagatcgggggcctcattgactccaagggctacggcatcggcacgcccatgggctccccataccgggacaagatcaccatcgccatcctgcagcttcaggaggaggacaagctgcatatcatgaaggagaagtggtggcggggcagcgggtgtcctgaggaggaaaacaaagaggccagtgccctggggatccagaagatcgggggcatcttcattgtcctggccgccgggctggtcctctctgtgctggtggccgtgggcgagtttgtgtacaagctccgcaaaacagcagagagagagcaggtaagccttagagcttggagcctgcacaggatgggaaatggagattcgcgctgatttcactcctgtatgtgccaggcacacagtggtgtctcatctcagcctcacaacagctcaccctgcatccagtcggccagcaagccctgccactctacctctgtcctgacctggcacttttttccatcgccgttgccccaccccaggccaagccccatcacctcctgcctggattatgccgcagccttcaaactggccctccagcctccatgcttccccaacaccatccacaattcacacagcaactggtaccttgtttaaaacttaattcaaaccatatcattttcctgcataaaaccctccagggtaattgtt

SEQ ID NO: 12309 - DNA, 4214 bp, Homo sapiens
  source 1..4214: mol_type = unassigned DNA
cctttcccgattccccgacgtttcgggaggagtggggtcggagcgcagggctgggaagggtcttaggacccaggaaggagacgggtgcctcccagagaggaccccatcccctccgaggtccgggcggctcccggcctctccctggggtgccgtagcccccctcgacccgccttcccgcagccgcagtcgttcgggcctggaggtggccgggcatcggtgccgacgccgcgagggcagcgcccgcggcgggaatactaatgcaccctaaagggcacggccgccgccgcagcagagttatgtcatgcccaggccagcagggggctccatgaggattcatagaagatgccccgcgtctcggcgcctttggtgctgcttcctgcgtggctcgtgatggtcgcctgcagcccgcactccttgaggatcgctgctatcttggacgaccccatggagtgcagcagaggggagcggctctccatcaccctggccaagaaccgcatcaaccgcgctcctgagaggctgggcaaggccaaggtcgaagtggacatctttgagcttctcagagacagcgagtacgagactgcagaaaccatgtgtcagatcctccccaagggggtggtcgctgtcctcggaccatcgtccagcccagcctccagctccatcatcagcaacatctgtggagagaaggaggtccctcacttcaaagtggccccagaggagttcgtcaagttccagttccagagattcacaaccctgaacctccaccccagcaacactgacatcagcgtggctgtagctgggatcctgaacttcttcaactgcaccaccgcctgcctcatctgtgccaaagcagaatgccttttaaacctagagaagctgctccggcaattccttatctccaaggacacgctgtccgtccgcatgctggatgacacccgggaccccaccccgctcctcaaggagatccgggacgacaagaccgccaccatcatcatccacgccaacgcctccatgtcccacaccatcctcctgaaggcagccgaacttgggatggtgtcagcctattacacatacatcttcactaatctggagttctcactccagagaatggacagccttgtggatgatcgtgtcaacatcctgggattttccattttcaaccaatcccatgctttcttccaagagtttgcccagagcctcaaccagtcctggcaggagaactgtgaccatgtgcccttcactgggcctgcgctctcctcggccctgctgtttgatgctgtctatgctgtggtgactgcggtgcaggaactgaaccggagccaagagatcggcgtgaagcccttgtcctgcggctcggcccagatctggcagcacggcaccagcctcatgaactacctgcgcatggtagaattggaaggtcttaccggccacattgaattcaacagcaaaggccagaggtccaactacgctttgaaaatcttacagttcacaaggaatggttttcggcagatcggccagtggcacgtggcagagggcctcagcatggacagccacctctatgcctccaacatctcggacactctcttcaacaccaccctggtcgtcaccaccatcctggagaacccatatttaatgctgaaggggaaccaccaggagatggaaggcaatgaccgctacgagggcttctgtgtggacatgctcaaggagctggcagagatcctccgattcaactacaagatccgcctggttggggatggcgtgtacggcgttcccgaggccaacggcacctggacgggaatggtcggggagctgatcgctaggaaagcagatctggctgtggcaggcctcaccattacagctgaacgggagaaggtgattgatttctctaagccattcatgactctgggaattagcattctttaccgcgttcatatgggacgcaaacccggctatttctccttcctggacccattttctccgggcgtctggctcttcatgcttctagcctatctggccgtcagctgtgtcctcttcctggtggctcggttgacgccctacgagtggtacagcccacacccatgtgcccagggccggtgcaacctcctggtgaaccagtactccctgggcaacagcctctggtttccggtcggggggttcatgcagcaaggctccaccatcgcccctcgcgccttatccacccgctgtgtcagtggcgtctggtgggcattcacgctgatcatcatctcatcctacacggccaacctggcagccttcctgaccgtgcagcgcatggatgtgcccattgagtcagtggatgacctggctgaccagaccgccattgaatatggcacaattcacggaggctccagcatgaccttcttccaaaattcccgctaccagacctaccaacgcatgtggaattacatgtattccaagcagcccagcgtgttcgtgaagagcacagaggagggaatcgccagggtgttgaattccaactacgccttcctcctggaatccaccatgaacgagtactatcggcagcgaaactgcaacctcactcagattgggggcctgctggacaccaagggctatgggattggcatgccagtcggctcggttttccgggacgagtttgatctggccattctccagctgcaggagaacaaccgcctggagatcctgaagcgcaaatggtgggaaggagggaagtgccccaaggaggaagatcacagagctaaaggcctgggaatggagaatattggtggaatctttgtggttcttatttgtggcttaatcgtggccatttttatggctatgttggagtttttatggactctcagacactcagaagcaactgaggtgtccgtctgccaggagatggtgaccgagctgcgcagcattatcctgtgtcaggacagtatccacccccgccggcggcgcgccgcagtcccgccgccccggccccccatccccgaggagcgccgaccgcggggcacggcgacgctcagcaacgggaagctgtgcggggcaggggagcccgaccagctcgcgcagagactggcgcaggaggccgccctggtggcccgcggctgcacgcacatccgcgtctgccccgagtgccgccgcttccagggcctgcgggcacggccgtcgcccgcccgcagcgaggagagcctggagtgggagaaaaccaccaacagcagcgagcccgagtagtcccggaggccacaggacgcgcagaggccgggcggggcgggaggggaggggcggggcgggcgctgctgtcagccgccagccggaacttgtacagcgtcgacacctctccagatttcggatccagtcacttttcaaaaagatcaaggagcctgacgccccagccagagaccgcgcccggtcagggagcagggtccacccggaaacgttgcacccaaagggcaaaggacggccctccctcctgggcacaaggacccatcttctcccagtgggtctttccctctcgccaaaataacaagagtatagggtggggggtccctacccagaccagtccaatgaattggtggaatcatcagttgaatttccccctagtcaggggccaatgtaccctccgtctagttcttacagaaaaaaaaaaaattaaacagggaagtttttcttttctggatttgtatatttttgttaatgttcttttcccttttctttcctcctctccttttcttctttgtcatcttctcagtcctgttaatttgttttgtgttttttggagggggaggctgggttagggaatggaagcctaaataatccctatttcttctttttcctgaattttggaatattgcgttaccagtgcatccgatttcaggtgcttaactctctgtatggtgactgaggggcctgcaggagcacaggagaaggagtcttgggaagaatcagatggagagtctcaaaagtccattgcagtaaactttgagatgccaaaaagcaattaactcatcctatactcagaccttgaaacgcctggaatgtcaagggttaatctgtcttttctttccctttctctttctgactgtcactattactgggtttgatttgatctttttgtgaatgtagtctctgaagacagacaggggaggagaacagaatgcacaaagtatcctaggactttgtttaaggagcggaaagagcagatagaattttcccataccatggccttggcttcc

SEQ ID NO: 12310 - DNA, 5290 bp, Homo sapiens
  source 1..5290: mol_type = unassigned DNA
agctgcgggcggatcgggctggagccgccacggctgctgcggaagaggaaaaacggccaacagcagccccgcggccggcccggcagcgcccggcccccggctcagcccccggagtgcggagccgaccagcagatactttctgagtgcctactatgtgccagcctgtgctaggcactgaggacacaggtggaaaagcccgaattgctccctgctctcctggcgctcatcaccccggagagttatgtcatgcccaggccagcagggggctccatgaggattcatagaagatgccccgcgtctcggcgcctttggtgctgcttcctgcgtggctcgtgatggtcgcctgcagcccgcactccttgaggatcgctgctatcttggacgaccccatggagtgcagcagaggggagcggctctccatcaccctggccaagaaccgcatcaaccgcgctcctgagaggctgggcaaggccaaggtcgaagtggacatctttgagcttctcagagacagcgagtacgagactgcagaaaccatgtgtcagatcctccccaagggggtggtcgctgtcctcggaccatcgtccagcccagcctccagctccatcatcagcaacatctgtggagagaaggaggtccctcacttcaaagtggccccagaggagttcgtcaagttccagttccagagattcacaaccctgaacctccaccccagcaacactgacatcagcgtggctgtagctgggatcctgaacttcttcaactgcaccaccgcctgcctcatctgtgccaaagcagaatgccttttaaacctagagaagctgctccggcaattccttatctccaaggacacgctgtccgtccgcatgctggatgacacccgggaccccaccccgctcctcaaggagatccgggacgacaagaccgccaccatcatcatccacgccaacgcctccatgtcccacaccatcctcctgaaggcagccgaacttgggatggtgtcagcctattacacatacatcttcactaatctggagttctcactccagagaatggacagccttgtggatgatcgtgtcaacatcctgggattttccattttcaaccaatcccatgctttcttccaagagtttgcccagagcctcaaccagtcctggcaggagaactgtgaccatgtgcccttcactgggcctgcgctctcctcggccctgctgtttgatgctgtctatgctgtggtgactgcggtgcaggaactgaaccggagccaagagatcggcgtgaagcccttgtcctgcggctcggcccagatctggcagcacggcaccagcctcatgaactacctgcgcatggtagaattggaaggtcttaccggccacattgaattcaacagcaaaggccagaggtccaactacgctttgaaaatcttacagttcacaaggaatggttttcggcagatcggccagtggcacgtggcagagggcctcagcatggacagccacctctatgcctccaacatctcggacactctcttcaacaccaccctggtcgtcaccaccatcctggagaacccatatttaatgctgaaggggaaccaccaggagatggaaggcaatgaccgctacgagggcttctgtgtggacatgctcaaggagctggcagagatcctccgattcaactacaagatccgcctggttggggatggcgtgtacggcgttcccgaggccaacggcacctggacgggaatggtcggggagctgatcgctaggaaagcagatctggctgtggcaggcctcaccattacagctgaacgggagaaggtgattgatttctctaagccattcatgactctgggaattagcattctttaccgcgttcatatgggacgcaaacccggctatttctccttcctggacccattttctccgggcgtctggctcttcatgcttctagcctatctggccgtcagctgtgtcctcttcctggtggctcggttgacgccctacgagtggtacagcccacacccatgtgcccagggccggtgcaacctcctggtgaaccagtactccctgggcaacagcctctggtttccggtcggggggttcatgcagcaaggctccaccatcgcccctcgcgccttatccacccgctgtgtcagtggcgtctggtgggcattcacgctgatcatcatctcatcctacacggccaacctggcagccttcctgaccgtgcagcgcatggatgtgcccattgagtcagtggatgacctggctgaccagaccgccattgaatatggcacaattcacggaggctccagcatgaccttcttccaaaattcccgctaccagacctaccaacgcatgtggaattacatgtattccaagcagcccagcgtgttcgtgaagagcacagaggagggaatcgccagggtgttgaattccaactacgccttcctcctggaatccaccatgaacgagtactatcggcagcgaaactgcaacctcactcagattgggggcctgctggacaccaagggctatgggattggcatgccagtcggctcggttttccgggacgagtttgatctggccattctccagctgcaggagaacaaccgcctggagatcctgaagcgcaaatggtgggaaggagggaagtgccccaaggaggaagatcacagagctaaaggcctgggaatggagaatattggtggaatctttgtggttcttatttgtggcttaatcgtggccatttttatggctatgttggagtttttatggactctcagacactcagaagcaactgaggtgtccgtctgccaggagatggtgaccgagctgcgcagcattatcctgtgtcaggacagtatccacccccgccggcggcgcgccgcagtcccgccgccccggccccccatccccgaggagcgccgaccgcggggcacggcgacgctcagcaacgggaagctgtgcggggcaggggagcccgaccagctcgcgcagagactggcgcaggaggccgccctggtggcccgcggctgcacgcacatccgcgtctgccccgagtgccgccgcttccagggcctgcgggcacggccgtcgcccgcccgcagcgaggagagcctggagtgggagaaaaccaccaacagcagcgagcccgagtagtcccggaggccacaggacgcgcagaggccgggcggggcgggaggggaggggcggggcgggcgctgctgtcagccgccagccggaacttgtacagcgtcgacacctctccagatttcggatccagtcacttttcaaaaagatcaaggagcctgacgccccagccagagaccgcgcccggtcagggagcagggtccacccggaaacgttgcacccaaagggcaaaggacggccctccctcctgggcacaaggacccatcttctcccagtgggtctttccctctcgccaaaataacaagagtatagggtggggggtccctacccagaccagtccaatgaattggtggaatcatcagttgaatttccccctagtcaggggccaatgtaccctccgtctagttcttacagaaaaaaaaaaaattaaacagggaagtttttcttttctggatttgtatatttttgttaatgttcttttcccttttctttcctcctctccttttcttctttgtcatcttctcagtcctgttaatttgttttgtgttttttggagggggaggctgggttagggaatggaagcctaaataatccctatttcttctttttcctgaattttggaatattgcgttaccagtgcatccgatttcaggtgcttaactctctgtatggtgactgaggggcctgcaggagcacaggagaaggagtcttgggaagaatcagatggagagtctcaaaagtccattgcagtaaactttgagatgccaaaaagcaattaactcatcctatactcagaccttgaaacgcctggaatgtcaagggttaatctgtcttttctttccctttctctttctgactgtcactattactgggtttgatttgatctttttgtgaatgtagtctctgaagacagacaggggaggagaacagaatgcacaaagtatcctaggactttgtttaaggagcggaaagagcagatagaattttcccataccatggccttggcttccggtggaacgtgccgttcacagaggcggaaggactgggccaccccgttggtatggtgcatactttgtcaactgcatctcttttcaaccaaactcaaatgagtggctgcctatgaagccagacccccaagactatcatggattgggtggtttcttgctacttagacgtgagacctgggtgcaagtgtatgtgtgtgtatgtgtgcgcgcgtgtgcgtgtgtgtatttattcaacagaaagaccttaagtattcaagaatttgctaggttcctgggagagaggtggagtctcctagtcaatacacgggcctgggaaccaggaactcttgagtcgtaacctcagcttgagcagtagccctcccaccttgtatgactttaggtaaagcatttaacttctcttccatctaccaaataggagttactgatgctgtccaggttaccaggtgactgctagtgactgctctccatgtgagaagtttgcagagtccagagcacacatctgatgggaggggcgaggctttctacagctgcttgacctttgcttggcttcactaattgggagtttcacgcagagttctcattggctgatggaaaacaaattctatgcaatttctgattgtaaacttagaaaattcagagagaaacaaacagccgctaccaaccacctccacctccaccaccgctgccaccaccttgaatggaattgtcctcacttttgttgctgttgcaaatgtactaaaataaagacatctttggaagatgacgagcttaattcatgtttttgccatttgggttggtcggcatcctctttatgccaggacaatcagttagggctgccgtcctgggggccaaatggtaccctgattattcctgtgagggatactcgttttgtcctcacctgacctcactcatgaatttgaatcctttatcttttttctctttaaccatcaaatgacaacaagctgtgcaagacacttgtgtctttttttaaaccttgccttgatcctcgtggagaaacgtggatttggtgggaagggcacccgaaggccagctgacaacaaaccccaatggtgccactctgctccaacctgcagctccatcctatgcttctcacagacaacgtggttcctactg

SEQ ID NO: 12311 - DNA, 3524 bp, Homo sapiens
  source 1..3524: mol_type = unassigned DNA
cgcggcagctgcgtccccatgaggaggggaggaagatgccggctgagctgctgctgctgctgattgttgccttcgccagccccagctgccaggtgctctcatcactgcgcatggctgcaatcctggatgatcagacagtgtgtggccgcggtgagcgtctggccttggccttggcccgggagcagatcaacgggatcatcgaggtcccagccaaggcccgagtggaagtagacatctttgagctgcagcgggacagccagtacgagaccacggacaccatgtgtcagatcttacccaaaggggttgtgtctgtccttgggccctcctctagcccagcatctgcctccaccgtgagccatatctgtggagagaaggagatcccccacatcaaggtgggtcccgaggagacaccccgccttcagtaccttcgcttcgcgtctgtcagcctgtaccccagtaacgaggacgtcagcttggcggtctcccgaatcctcaagtccttcaactacccctcggccagcctcatctgcgccaaggctgagtgcctgctgcgattggaggaactggtgcgtggcttcctcatctccaaggagacgctgtcagtgaggatgttggacgacagccgggaccccacaccactgctcaaggagatccgtgatgacaaggtgtccaccatcatcatcgacgccaacgcctccatctcccacctcatcctccgtaaggcctcggaactgggaatgacctcagcgttttacaagtacatcctcaccaccatggacttccccatcctgcatctggacggtattgtggaggactcctccaacatcctgggcttctccatgttcaacacgtcccaccccttctaccctgagtttgtccgcagcctcaacatgtcctggagggagaactgtgaagccagcacctacctgggccctgcgctgtcagccgccctgatgtttgacgccgtgcacgtggtggtgagcgctgtccgagagctgaaccgcagccaggagatcggtgtgaagcctctggcctgtacatcggccaacatttggccccacgggaccagcctcatgaactacctgcgcatggtagagtatgatgggctgaccgggcgggtcgagttcaacagcaaagggcagagaaccaactacaccctgcgcatcctagaaaagtcccggcagggccaccgtgagattggggtgtggtactctaaccgcaccctggccatgaatgccaccaccctggacatcaacctgtcgcagacactggccaacaagaccctggtggtcacaaccatcctggagaacccatacgtcatgcgccggcccaacttccaggccctgtcggggaacgaacgcttcgagggcttctgcgtggacatgctgcgggagctggccgagctgctgcgcttccgctaccgcctgcggttggtggaggatgggctgtacggggcgcccgagcccaacggctcctggacgggcatggttggcgagctcatcaaccggaaggcagacctggctgtggccgccttcaccatcacagctgagcgggagaaggtcatcgacttttccaagccctttatgaccctggggatcagcatcctctaccgagtgcacatgggccgcaagcctggctacttctccttcctggaccccttctcccctgctgtgtggctcttcatgcttcttgcctacctggctgtcagctgcgtcctgtttctggctgccaggctgagcccctatgagtggtataacccacacccatgcctgcgggcacgcccccacatcctggagaaccagtacacgctgggcaacagcctgtggtttcccgtggggggcttcatgcagcagggctcggagatcatgccccgggcgctgtccacgcgctgtgtcagcggagtctggtgggccttcaccttgatcatcatctcctcctacacggccaacctggccgccttcctcaccgtgcagcgcatggaggtgcctgtggagtcggccgatgacctggcagatcagaccaacatcgagtatggcaccatccacgccggctccaccatgaccttcttccagaattcacggtaccaaacgtaccagcgcatgtggaactacatgcagtcgaagcagcccagcgtgttcgtcaagagcacagaagagggcattgcccgcgtcctcaactcccgctacgccttcctgctcgagtccaccatgaacgaataccaccggcgcctcaactgcaacctcacccagatcgggggactcctcgacaccaagggctacggcattggcatgccgctgggctccccgttccgggatgagatcacactggccatcctgcagcttcaggagaacaaccggctggagatcctgaagcgcaagtggtgggaggggggccggtgccccaaggaggaggaccatcgagctaaaggtttgggcatggagaacattggtggcatttttatcgtgctcatctgtggcctcatcattgctgtcttcgtggcggtcatggaattcatatggtccacacggaggtcagctgagtccgaggaggtgtcggtgtgccaggagatgctgcaggagctgcgccacgccgtttcttgccgcaagacgtcgcgttcccgccggcgccgacgcccgggcggcccgagccgggccctgctgtcactgcgcgcggtccgcgagatgcgcctcagcaacggcaagctctactcggccggcgcgggcggggatgcgggcagcgcgcacgggggcccgcagcgcctcctggacgacccggggccccccagcggagcccgacccgccgcccccaccccctgcacccacgtgcgcgtctgccaggagtgccggcgcatccaggcgctgcgggcctcgggggccggcgcgcctccgcgtggcctgggcgtccccgccgaagccaccagcccgccccggccgcggcctggccccgccggcccccgggagctggcggagcacgagtgaccacgggcggggctgtgcgggcgcccggactgaccgaagggacggggcccgccccaggccccagcagtctccgctcccgcagcgggcgcgggacaggacttgtgcgccggcgccccggacgccgcgattttgcctttggttccccgcgaagtccgaggcctggctctggagcccgcctgcgccccccagtggactcgcgagagggtgccgcgggcgagaagggcgcaggaaccgaggactccaggggctggggacttcgggggcggctctgggaagcggaaagcagtcagcggagaggaccccattctgggactgctcaggctccccaagacttgacgcagccccccacgcttctggaggtggggagggcctctggacagatgggtgtcccctggtgcccctccactcttctcttcctctcttttttggggggagaaacctcggaatttctatgagacctcccccagggagggggtcagttgggcccccatccctccccttgccacatcgcagcccctgttggaataaaaaaaagaacaaaacccc

SEQ ID NO: 12312 - DNA, 3305 bp, Homo sapiens
  source 1..3305: mol_type = unassigned DNA
cgcggcagctgcgtccccatgaggaggggaggaagatgccggctgagctgctgctgctgctgattgttgccttcgccagccccagctgccaggtgctctcatcactgcgcatggctgcaatcctggatgatcagacagtgtgtggccgcggtgagcgtctggccttggccttggcccgggagcagatcaacgggatcatcgaggtcccagccaaggcccgagtggaagtagacatctttgagctgcagcgggacagccagtacgagaccacggacaccatgtgtcagatcttacccaaaggggttgtgtctgtccttgggccctcctctagcccagcatctgcctccaccgtgagccatatctgtggagagaaggagatcccccacatcaaggtgggtcccgaggagacaccccgccttcagtaccttcgcttcgcgtctgtcagcctgtaccccagtaacgaggacgtcagcttggcggtctcccgaatcctcaagtccttcaactacccctcggccagcctcatctgcgccaaggctgagtgcctgctgcgattggaggaactggtgcgtggcttcctcatctccaaggagacgctgtcagtgaggatgttggacgacagccgggaccccacaccactgctcaaggagatccgtgatgacaaggtgtccaccatcatcatcgacgccaacgcctccatctcccacctcatcctccgtaaggcctcggaactgggaatgacctcagcgttttacaagtacatcctcaccaccatggacttccccatcctgcatctggacggtattgtggaggactcctccaacatcctgggcttctccatgttcaacacgtcccaccccttctaccctgagtttgtccgcagcctcaacatgtcctggagggagaactgtgaagccagcacctacctgggccctgcgctgtcagccgccctgatgtttgacgccgtgcacgtggtggtgagcgctgtccgagagctgaaccgcagccaggagatcggtgtgaagcctctggcctgtacatcggccaacatttggccccacgggaccagcctcatgaactacctgcgcatggtagagtatgatgggctgaccgggcgggtcgagttcaacagcaaagggcagagaaccaactacaccctgcgcatcctagaaaagtcccggcagggccaccgtgagattggggtgtggtactctaaccgcaccctggccatgaatgccaccaccctggacatcaacctgtcgcagacactggccaacaagaccctggtggtcacaaccatcctggagaacccatacgtcatgcgccggcccaacttccaggccctgtcggggaacgaacgcttcgagggcttctgcgtggacatgctgcgggagctggccgagctgctgcgcttccgctaccgcctgcggttggtggaggatgggctgtacggggcgcccgagcccaacggctcctggacgggcatggttggcgagctcatcaaccggaaggcagacctggctgtggccgccttcaccatcacagctgagcgggagaaggtcatcgacttttccaagccctttatgaccctggggatcagcatcctctaccgagtgcacatgggccgcaagcctggctacttctccttcctggaccccttctcccctgctgtgtggctcttcatgcttcttgcctacctggctgtcagctgcgtcctgtttctggctgccaggctgagcccctatgagtggtataacccacacccatgcctgcgggcacgcccccacatcctggagaaccagtacacgctgggcaacagcctgtggtttcccgtggggggcttcatgcagcagggctcggagatcatgccccgggcgctgtccacgcgctgtgtcagcggagtctggtgggccttcaccttgatcatcatctcctcctacacggccaacctggccgccttcctcaccgtgcagcgcatggaggtgcctgtggagtcggccgatgacctggcagatcagaccaacatcgagtatggcaccatccacgccggctccaccatgaccttcttccagaattcacggtaccaaacgtaccagcgcatgtggaactacatgcagtcgaagcagcccagcgtgttcgtcaagagcacagaagagggcattgcccgcgtcctcaactcccgctacgccttcctgctcgagtccaccatgaacgaataccaccggcgcctcaactgcaacctcacccagatcgggggactcctcgacaccaagggctacggcattggcatgccgctgggctccccgttccgggatgagatcacactggccatcctgcagcttcaggagaacaaccggctggagatcctgaagcgcaagtggtgggaggggggccggtgccccaaggaggaggaccatcgagctaaaggtttgggcatggagaacattggtggcatttttatcgtgctcatctgtggcctcatcattgctgtcttcgtggcggtcatggaattcatatggtccacacggaggtcagctgagtccgaggagaccccagctctgcatccagctgcctgccagtgttctgcacttggcccaaggactcctctgaaggagccgtccatgctgctagtaaaggtgccctccacccgtgtccaggttgccttctcaaggacatccctccggcaagtctgtcctttcctcctgcagcatcagttgtcctctctttattggattcaggccaccaacgtacaaatatgctgtcatttctccagtcttaaaccctctcctgacctcactttccctcccagccaccgcccactttcttcccttctctttacagccttggcagcagtggggggtctccctgatgcttccagtttcttctttcctcccatttcctcttgccccccactccagtctggcatcggtccctgccactccactgaagccactcttgtcaccagcaacttccatgtctgaaattcccggtctcaggcctcatgtatatgaggtagcagtgggcttcggcacagccagtcactctcaatcctcaaagccccttcttccccttctcccacttctccggtcactccttcccaggctccctcgttgggtttctctttctccccaggctctgtttgttgtggggctccagggctcagtccttagactgcttctcttctcggtctttctccactacttgaatgatcccaccagccaaatggctcttaagacccactatgtgctggtgattcttgtgttagttatctattgctatcataacaaatgaccttaacagctttt

SEQ ID NO: 12313 - DNA, 1404 bp, Homo sapiens
  source 1..1404: mol_type = unassigned DNA
gtgggccttcaccttgatcatcatctcctcctacacggccaacctggccgccttcctcaccgtgcagcgcatggaggtgcctgtggagtcggccgatgacctggcagatcagaccaacatcgagtatggcaccatccacgccggctccaccatgaccttcttccagaattcacggtaccaaacgtaccagcgcatgtggaactacatgcagtcgaagcagcccagcgtgttcgtcaagagcacagaagagggcattgcccgcgtcctcaactcccgctacgccttcctgctcgagtccaccatgaacgaataccaccggcgcctcaactgcaacctcacccagatcgggggactcctcgacaccaagggctacggcattggcatgccgctgggctccccgttccgggatgagatcacactggccatcctgcagcttcaggagaacaaccggctggagatcctgaagcgcaagtggtgggaggggggccggtgccccaaggaggaggaccatcgagctaaaggtttgggcatggagaacattggtggcatttttatcgtgctcatctgtggcctcatcattgctgtcttcgtggcggtcatggaattcatatggtccacacggaggtcagctgagtccgaggagaccccagctctgcatccagctgcctgccagtgttctgcacttggcccaaggactcctctgaaggagccgtccatgctgctagtaaaggtgccctccacccgtgtccaggttgccttctcaaggacatccctccggcaagtctgtcctttcctcctgcagcatcagttgtcctctctttattggattcaggccaccaacgtacaaatatgctgtcatttctccagtcttaaaccctctcctgacctcactttccctcccagccaccgcccactttcttcccttctctttacagccttggcagcagtggggggtctccctgatgcttccagtttcttctttcctcccatttcctcttgccccccactccagtctggcatcggtccctgccactccactgaagccactcttgtcaccagcaacttccatgtctgaaattcccggtctcaggcctcatgtatatgaggtagcagtgggcttcggcacagccagtcactctcaatcctcaaagccccttcttccccttctcccacttctccggtcactccttcccaggctccctcgttgggtttctctttctccccaggctctgtttgttgtggggctccagggctcagtccttagactgcttctcttctcggtctttctccactacttgaatgatcccaccagccaaatggctcttaagacccactatgtgctggtgattcttgtgttagttatctattgctatcataacaaatgaccttaacagcttttaaaaa

SEQ ID NO: 12314 - DNA, 4779 bp, Homo sapiens
  source 1..4779: mol_type = unassigned DNA
ggtaaggctctggaaaagggggcgctgggagcgcattgcgagggggctggagagggagagaggagcggaagctgagggtgtgaaacggctggccccgaacacacctcgcggcgctccagtgattcctggtgtccgacctcagccccagtcagtgcgggtccagtttccaggctctcgcggaaggcctggctgagcacatgcggcagccacggtcaccctccctattcctcttagcccgaggaggggggtcccaagttacatggccacgcagatggggcctctccctcatttctgaaccttgtggggaggggaaccttgaagggagcgccccccagagccatggcttagggcctcccccacccctctggagctccagtctgcaagagtcaggagccgaaatatcgctgactgtgggtgacgactcttgcgcgcacacacacatacaagcgggcacgacgcgttcggtcctattaaaaggcacgcaagggtgcgggctgcacgcggtgacacggacccctctaacgtttccaaactgagctccctgcaggtccccgacagcacaggcccctgtcccaggacccctccaggcacgcgctcacacgcacacgcgcgctccccggctcacgcgcgctccgacacacacgctcacgcgaacgcaggcgcacgctctggcgcgggaggcgcccccttcgcctccgtgttgggaagcgggggcggcgggaggggcaggagacgttggccccgctcgcgtttctgcagctgctgcagtcgccgcagcgtccggaccggaaccagcgccgtccgcggagccgccgccgccgccgccgggccctttccaagccgggcgctcggagctgtgcccggccccgcttcagcaccgcggacagcgccggccgcgtggggctgagccccgagcccccgcgcacgcttcagcgccccttccctcggccgacgtcccgggaccgccgctccgggggagacgtggcgtccgcagcccgcggggccgggcgagcgcaggacggcccggaagccccgcgggggatgcgccgagggccccgcgttcgcgccgcgcagagccaggcccgcggcccgagcccatgagcaccatgcgcctgctgacgctcgccctgctgttctcctgctccgtcgcccgtgccgcgtgcgaccccaagatcgtcaacattggcgcggtgctgagcacgcggaagcacgagcagatgttccgcgaggccgtgaaccaggccaacaagcggcacggctcctggaagattcagctcaatgccacctccgtcacgcacaagcccaacgccatccagatggctctgtcggtgtgcgaggacctcatctccagccaggtctacgccatcctagttagccatccacctacccccaacgaccacttcactcccacccctgtctcctacacagccggcttctaccgcatacccgtgctggggctgaccacccgcatgtccatctactcggacaagagcatccacctgagcttcctgcgcaccgtgccgccctactcccaccagtccagcgtgtggtttgagatgatgcgtgtctacagctggaaccacatcatcctgctggtcagcgacgaccacgagggccgggcggctcagaaacgcctggagacgctgctggaggagcgtgagtccaaggcagagaaggtgctgcagtttgacccagggaccaagaacgtgacggccctgctgatggaggcgaaagagctggaggcccgggtcatcatcctttctgccagcgaggacgatgctgccactgtataccgcgcagccgcgatgctgaacatgacgggctccgggtacgtgtggctggtcggcgagcgcgagatctcggggaacgccctgcgctacgccccagacggcatcctcgggctgcagctcatcaacggcaagaacgagtcggcccacatcagcgacgccgtgggcgtggtggcccaggccgtgcacgagctcctcgagaaggagaacatcaccgacccgccgcggggctgcgtgggcaacaccaacatctggaagaccgggccgctcttcaagagagtgctgatgtcttccaagtatgcggatggggtgactggtcgcgtggagttcaatgaggatggggaccggaagttcgccaactacagcatcatgaacctgcagaaccgcaagctggtgcaagtgggcatctacaatggcacccacgtcatccctaatgacaggaagatcatctggccaggcggagagacagagaagcctcgagggtaccagatgtccaccagactgaagattgtgacgatccaccaggagcccttcgtgtacgtcaagcccacgctgagtgatgggacatgcaaggaggagttcacagtcaacggcgacccagtcaagaaggtgatctgcaccgggcccaacgacacgtcgccgggcagcccccgccacacggtgcctcagtgttgctacggcttttgcatcgacctgctcatcaagctggcacggaccatgaacttcacctacgaggtgcacctggtggcagatggcaagttcggcacacaggagcgggtgaacaacagcaacaagaaggagtggaatgggatgatgggcgagctgctcagcgggcaggcagacatgatcgtggcgccgctaaccataaacaacgagcgcgcgcagtacatcgagttttccaagcccttcaagtaccagggcctgactattctggtcaagaaggagattccccggagcacgctggactcgttcatgcagccgttccagagcacactgtggctgctggtggggctgtcggtgcacgtggtggccgtgatgctgtacctgctggaccgcttcagccccttcggccggttcaaggtgaacagcgaggaggaggaggaggacgcactgaccctgtcctcggccatgtggttctcctggggcgtcctgctcaactccggcatcggggaaggcgcccccagaagcttctcagcgcgcatcctgggcatggtgtgggccggctttgccatgatcatcgtggcctcctacaccgccaacctggcggccttcctggtgctggaccggccggaggagcgcatcacgggcatcaacgaccctcggctgaggaacccctcggacaagtttatctacgccacggtgaagcagagctccgtggatatctacttccggcgccaggtggagctgagcaccatgtaccggcatatggagaagcacaactacgagagtgcggcggaggccatccaggccgtgagagacaacaagctgcatgccttcatctgggactcggcggtgctggagttcgaggcctcgcagaagtgcgacctggtgacgactggagagctgtttttccgctcgggcttcggcataggcatgcgcaaagacagcccctggaagcagaacgtctccctgtccatcctcaagtcccacgagaatggcttcatggaagacctggacaagacgtgggttcggtatcaggaatgtgactcgcgcagcaacgcccctgcgacccttacttttgagaacatggccggggtcttcatgctggtagctgggggcatcgtggccgggatcttcctgattttcatcgagattgcctacaagcggcacaaggatgctcgccggaagcagatgcagctggcctttgccgccgttaacgtgtggcggaagaacctgcaggatagaaagagtggtagagcagagcctgaccctaaaaagaaagccacatttagggctatcacctccaccctggcttccagcttcaagaggcgtaggtcctccaaagacacgcagtaccatcccactgatatcacgggcccgctcaacctctcagatccctcggtcagcaccgtggtgtgaggcccccggaggcgcccacctgcccagttagcccggccaaggacactgatgggtcctgctgctcgggaaggcctgagggaagcccacccgccccagagactgcccaccctgggcctcccgtccgtccgcccgcccaccccgctgcctggcgggcagcccctgctggaccaaggtgcggaccggagcggctgaggacggggcagagctgagtcggctgggcagggccgcagggcgctccggcagaggcagggccctggggtctctgagcagtggggagcgggggctaactggccccaggcggaggggcttggagcagagacggcagccccatccttcccgcagcaccagcctgagccacagtggggcccatggccccagctggctgggtcgcccctcctcgggcgcctgcgctcctctgcagcctgagctccaccctcccctcttcttgcggcaccgcccacccacaccccgtctgccccttgaccccacacgccggggctggccctgccctcccccacggccgtccctgacttcccagctggcagcgcctcccgccgcctcgggccgcctcctccagactcgagagggctgagcccctcctctcctcgtccggcctgcagcccagaacgggcctccccgggggtccccggacgctggctcgggactgtcttcaaccctgccctgcaccttgggcacgggagagcgccacccgcccgcccccgccctcgctccgggtgcgtgaccggcccgccaccttgtacagaaccagcactcccagggcccgagcgcgtgccttccccgtgcggcccgtgcgcagccgcgctctgcccctccgtccccagggtgcaggcgcgcaccgcccaacccccacctcccggtgtatgcagtggtgatgcctaaaggaatgtcacgc

SEQ ID NO: 12315 - DNA, 4184 bp, Homo sapiens
  source 1..4184: mol_type = unassigned DNA
ggcccggaagccccgcgggggatgcgccgagggccccgcgttcgcgccgcgcagagccaggcccgcggcccgagcccatgagcaccatgcgcctgctgacgctcgccctgctgttctcctgctccgtcgcccgtgccgcgtgcgaccccaagatcgtcaacattggcgcggtgctgagcacgcggaagcacgagcagatgttccgcgaggccgtgaaccaggccaacaagcggcacggctcctggaagattcagctcaatgccacctccgtcacgcacaagcccaacgccatccagatggctctgtcggtgtgcgaggacctcatctccagccaggtctacgccatcctagttagccatccacctacccccaacgaccacttcactcccacccctgtctcctacacagccggcttctaccgcatacccgtgctggggctgaccacccgcatgtccatctactcggacaagagcatccacctgagcttcctgcgcaccgtgccgccctactcccaccagtccagcgtgtggtttgagatgatgcgtgtctacagctggaaccacatcatcctgctggtcagcgacgaccacgagggccgggcggctcagaaacgcctggagacgctgctggaggagcgtgagtccaaggcagagaaggtgctgcagtttgacccagggaccaagaacgtgacggccctgctgatggaggcgaaagagctggaggcccgggtcatcatcctttctgccagcgaggacgatgctgccactgtataccgcgcagccgcgatgctgaacatgacgggctccgggtacgtgtggctggtcggcgagcgcgagatctcggggaacgccctgcgctacgccccagacggcatcctcgggctgcagctcatcaacggcaagaacgagtcggcccacatcagcgacgccgtgggcgtggtggcccaggccgtgcacgagctcctcgagaaggagaacatcaccgacccgccgcggggctgcgtgggcaacaccaacatctggaagaccgggccgctcttcaagagagtgctgatgtcttccaagtatgcggatggggtgactggtcgcgtggagttcaatgaggatggggaccggaagttcgccaactacagcatcatgaacctgcagaaccgcaagctggtgcaagtgggcatctacaatggcacccacgtcatccctaatgacaggaagatcatctggccaggcggagagacagagaagcctcgagggtaccagatgtccaccagactgaagattgtgacgatccaccaggagcccttcgtgtacgtcaagcccacgctgagtgatgggacatgcaaggaggagttcacagtcaacggcgacccagtcaagaaggtgatctgcaccgggcccaacgacacgtcgccgggcagcccccgccacacggtgcctcagtgttgctacggcttttgcatcgacctgctcatcaagctggcacggaccatgaacttcacctacgaggtgcacctggtggcagatggcaagttcggcacacaggagcgggtgaacaacagcaacaagaaggagtggaatgggatgatgggcgagctgctcagcgggcaggcagacatgatcgtggcgccgctaaccataaacaacgagcgcgcgcagtacatcgagttttccaagcccttcaagtaccagggcctgactattctggtcaagaaggagattccccggagcacgctggactcgttcatgcagccgttccagagcacactgtggctgctggtggggctgtcggtgcacgtggtggccgtgatgctgtacctgctggaccgcttcagccccttcggccggttcaaggtgaacagcgaggaggaggaggaggacgcactgaccctgtcctcggccatgtggttctcctggggcgtcctgctcaactccggcatcggggaaggcgcccccagaagcttctcagcgcgcatcctgggcatggtgtgggccggctttgccatgatcatcgtggcctcctacaccgccaacctggcggccttcctggtgctggaccggccggaggagcgcatcacgggcatcaacgaccctcggctgaggaacccctcggacaagtttatctacgccacggtgaagcagagctccgtggatatctacttccggcgccaggtggagctgagcaccatgtaccggcatatggagaagcacaactacgagagtgcggcggaggccatccaggccgtgagagacaacaagctgcatgccttcatctgggactcggcggtgctggagttcgaggcctcgcagaagtgcgacctggtgacgactggagagctgtttttccgctcgggcttcggcataggcatgcgcaaagacagcccctggaagcagaacgtctccctgtccatcctcaagtcccacgagaatggcttcatggaagacctggacaagacgtgggttcggtatcaggaatgtgactcgcgcagcaacgcccctgcgacccttacttttgagaacatggccggggtcttcatgctggtagctgggggcatcgtggccgggatcttcctgattttcatcgagattgcctacaagcggcacaaggatgctcgccggaagcagatgcagctggcctttgccgccgttaacgtgtggcggaagaacctgcaggtagggcaggccaccctccgaggcctggtgcccagggcccggcctggccacggccctcctccatccccgaaggccgtggcactggctctggctctggtgggcaggactggagctaggagccatggccaggggcagtggtgagtgctcccagggcacgggggcagcaccggtggggggctgcctgcaggtggctgcccactgcaaagccggggccgagggaggccacgcaccctgctccaagcctccgcctggcccctctgtctccagagtcgcccgccggtacccattccataggaaggcaatcaggcagggtaagacaggggcccgcctgtgtatggcacgtgagtccaagatgcattttgccctccgccgacccaagccccttgacacccttcggagacccccccctttcctgctatgtccttgtgctccgtgactctaatccgaattgggccaggtccggtcctgcctggtgcccaggttgtatccatgagaatttgccaccagcaagggcagccacggcccacctgggacagggtgggcagtgggcctgtacaggcctaagggctcgtggcccgcggtcgagttccggttcactccgtctcttctctttctctgggtgccgtcctggagcctgtgtcctgagatgaagccgacagtgcggccagggctgctgggggatgggggttgctggaggctccacacctctcatccgcccgctcttgctcttggcccccacaggtcccctggggacctggccgctgccagcactggcgggcacaggccacctggccatcagacctgaggccagagtcccgggagctgcctctgtcactccaattccacctcgacacctgcctccagccctcggccccttcctgaatcttggtgtgtgccccttgggggtcagtggcctccacgcagacagctggtgtggcctgaggggcaactcctccagtcctcagaggactcctcctcctcgggacgcctgtaagccagggccacccaggagccagggagccaggcggacctcccaggaagagccagccgagagcccccaagcccagccccagcacgagcaaggtcaggcccgagaccccgggcaggagaagaggccaccctcgaacgtccgctgtcggcccgtctgtccagcacagggaggcaggcaggagcgagggcccaagtggccggccaggctgggcagcggcccatgcaggagcaggcgagggcaggtgtggccaccaccctagccatctaatcacttatacatattcattttaggatagaaagagtggtagagcagagcctgaccctaaaaagaaagccacatttagggctatcacctccaccctggcttccagcttcaagaggcgtaggtcctccaaagacacggtaagggggagagcaccccagtcccgcgtccgactccacctgccctgccctgcgtgtgtctcccgccccatcaccccgccccggaccctgggctcctgtggcccactctgcccctgtctccctgtg

SEQ ID NO: 12316 - DNA, 3751 bp, Homo sapiens
  source 1..3751: mol_type = unassigned DNA
gagcccatgagcaccatgcgcctgctgacgctcgccctgctgttctcctgctccgtcgcccgtgccgcgtgcgaccccaagatcgtcaacattggcgcggtgctgagcacgcggaagcacgagcagatgttccgcgaggccgtgaaccaggccaacaagcggcacggctcctggaagattcagctcaatgccacctccgtcacgcacaagcccaacgccatccagatggctctgtcggtgtgcgaggacctcatctccagccaggtctacgccatcctagttagccatccacctacccccaacgaccacttcactcccacccctgtctcctacacagccggcttctaccgcatacccgtgctggggctgaccacccgcatgtccatctactcggacaagagcatccacctgagcttcctgcgcaccgtgccgccctactcccaccagtccagcgtgtggtttgagatgatgcgtgtctacagctggaaccacatcatcctgctggtcagcgacgaccacgagggccgggcggctcagaaacgcctggagacgctgctggaggagcgtgagtccaagagtaaaaaaaggaactatgaaaacctcgaccaactgtcctatgacaacaagcgcggacccaaggcagagaaggtgctgcagtttgacccagggaccaagaacgtgacggccctgctgatggaggcgaaagagctggaggcccgggtcatcatcctttctgccagcgaggacgatgctgccactgtataccgcgcagccgcgatgctgaacatgacgggctccgggtacgtgtggctggtcggcgagcgcgagatctcggggaacgccctgcgctacgccccagacggcatcctcgggctgcagctcatcaacggcaagaacgagtcggcccacatcagcgacgccgtgggcgtggtggcccaggccgtgcacgagctcctcgagaaggagaacatcaccgacccgccgcggggctgcgtgggcaacaccaacatctggaagaccgggccgctcttcaagagagtgctgatgtcttccaagtatgcggatggggtgactggtcgcgtggagttcaatgaggatggggaccggaagttcgccaactacagcatcatgaacctgcagaaccgcaagctggtgcaagtgggcatctacaatggcacccacgtcatccctaatgacaggaagatcatctggccaggcggagagacagagaagcctcgagggtaccagatgtccaccagactgaagattgtgacgatccaccaggagcccttcgtgtacgtcaagcccacgctgagtgatgggacatgcaaggaggagttcacagtcaacggcgacccagtcaagaaggtgatctgcaccgggcccaacgacacgtcgccgggcagcccccgccacacggtgcctcagtgttgctacggcttttgcatcgacctgctcatcaagctggcacggaccatgaacttcacctacgaggtgcacctggtggcagatggcaagttcggcacacaggagcgggtgaacaacagcaacaagaaggagtggaatgggatgatgggcgagctgctcagcgggcaggcagacatgatcgtggcgccgctaaccataaacaacgagcgcgcgcagtacatcgagttttccaagcccttcaagtaccagggcctgactattctggtcaagaaggagattccccggagcacgctggactcgttcatgcagccgttccagagcacactgtggctgctggtggggctgtcggtgcacgtggtggccgtgatgctgtacctgctggaccgcttcagccccttcggccggttcaaggtgaacagcgaggaggaggaggaggacgcactgaccctgtcctcggccatgtggttctcctggggcgtcctgctcaactccggcatcggggaaggcgcccccagaagcttctcagcgcgcatcctgggcatggtgtgggccggctttgccatgatcatcgtggcctcctacaccgccaacctggcggccttcctggtgctggaccggccggaggagcgcatcacgggcatcaacgaccctcggctgaggaacccctcggacaagtttatctacgccacggtgaagcagagctccgtggatatctacttccggcgccaggtggagctgagcaccatgtaccggcatatggagaagcacaactacgagagtgcggcggaggccatccaggccgtgagagacaacaagctgcatgccttcatctgggactcggcggtgctggagttcgaggcctcgcagaagtgcgacctggtgacgactggagagctgtttttccgctcgggcttcggcataggcatgcgcaaagacagcccctggaagcagaacgtctccctgtccatcctcaagtcccacgagaatggcttcatggaagacctggacaagacgtgggttcggtatcaggaatgtgactcgcgcagcaacgcccctgcgacccttacttttgagaacatggccggggtcttcatgctggtagctgggggcatcgtggccgggatcttcctgattttcatcgagattgcctacaagcggcacaaggatgctcgccggaagcagatgcagctggcctttgccgccgttaacgtgtggcggaagaacctgcaggatagaaagagtggtagagcagagcctgaccctaaaaagaaagccacatttagggctatcacctccaccctggcttccagcttcaagaggcgtaggtcctccaaagacacgcagtaccatcccactgatatcacgggcccgctcaacctctcagatccctcggtcagcaccgtggtgtgaggcccccggaggcgcccacctgcccagttagcccggccaaggacactgatgggtcctgctgctcgggaaggcctgagggaagcccacccgccccagagactgcccaccctgggcctcccgtccgtccgcccgcccaccccgctgcctggcgggcagcccctgctggaccaaggtgcggaccggagcggctgaggacggggcagagctgagtcggctgggcagggccgcagggcgctccggcagaggcagggccctggggtctctgagcagtggggagcgggggctaactggccccaggcggaggggcttggagcagagacggcagccccatccttcccgcagcaccagcctgagccacagtggggcccatggccccagctggctgggtcgcccctcctcgggcgcctgcgctcctctgcagcctgagctccaccctcccctcttcttgcggcaccgcccacccacaccccgtctgccccttgaccccacacgccggggctggccctgccctcccccacggccgtccctgacttcccagctggcagcgcctcccgccgcctcgggccgcctcctccagactcgagagggctgagcccctcctctcctcgtccggcctgcagcccagaacgggcctccccgggggtccccggacgctggctcgggactgtcttcaaccctgccctgcaccttgggcacgggagagcgccacccgcccgcccccgccctcgctccgggtgcgtgaccggcccgccaccttgtacagaaccagcactcccagggcccgagcgcgtgccttccccgtgcggcccgtgcgcagccgcgctctgcccctccgtccccagggtgcaggcgcgcaccgcccaacccccacctcccggtgtatgcagtggtgatgcctaaaggaatgtcacgc

SEQ ID NO: 12317 - DNA, 4003 bp, Homo sapiens
  source 1..4003: mol_type = unassigned DNA
gagcccatgagcaccatgcgcctgctgacgctcgccctgctgttctcctgctccgtcgcccgtgccgcgtgcgaccccaagatcgtcaacattggcgcggtgctgagcacgcggaagcacgagcagatgttccgcgaggccgtgaaccaggccaacaagcggcacggctcctggaagattcagctcaatgccacctccgtcacgcacaagcccaacgccatccagatggctctgtcggtgtgcgaggacctcatctccagccaggtctacgccatcctagttagccatccacctacccccaacgaccacttcactcccacccctgtctcctacacagccggcttctaccgcatacccgtgctggggctgaccacccgcatgtccatctactcggacaagagcatccacctgagcttcctgcgcaccgtgccgccctactcccaccagtccagcgtgtggtttgagatgatgcgtgtctacagctggaaccacatcatcctgctggtcagcgacgaccacgagggccgggcggctcagaaacgcctggagacgctgctggaggagcgtgagtccaagagtaaaaaaaggaactatgaaaacctcgaccaactgtcctatgacaacaagcgcggacccaaggcagagaaggtgctgcagtttgacccagggaccaagaacgtgacggccctgctgatggaggcgaaagagctggaggcccgggtcatcatcctttctgccagcgaggacgatgctgccactgtataccgcgcagccgcgatgctgaacatgacgggctccgggtacgtgtggctggtcggcgagcgcgagatctcggggaacgccctgcgctacgccccagacggcatcctcgggctgcagctcatcaacggcaagaacgagtcggcccacatcagcgacgccgtgggcgtggtggcccaggccgtgcacgagctcctcgagaaggagaacatcaccgacccgccgcggggctgcgtgggcaacaccaacatctggaagaccgggccgctcttcaagagagtgctgatgtcttccaagtatgcggatggggtgactggtcgcgtggagttcaatgaggatggggaccggaagttcgccaactacagcatcatgaacctgcagaaccgcaagctggtgcaagtgggcatctacaatggcacccacgtcatccctaatgacaggaagatcatctggccaggcggagagacagagaagcctcgagggtaccagatgtccaccagactgaagattgtgacgatccaccaggagcccttcgtgtacgtcaagcccacgctgagtgatgggacatgcaaggaggagttcacagtcaacggcgacccagtcaagaaggtgatctgcaccgggcccaacgacacgtcgccgggcagcccccgccacacggtgcctcagtgttgctacggcttttgcatcgacctgctcatcaagctggcacggaccatgaacttcacctacgaggtgcacctggtggcagatggcaagttcggcacacaggagcgggtgaacaacagcaacaagaaggagtggaatgggatgatgggcgagctgctcagcgggcaggcagacatgatcgtggcgccgctaaccataaacaacgagcgcgcgcagtacatcgagttttccaagcccttcaagtaccagggcctgactattctggtcaagaaggagattccccggagcacgctggactcgttcatgcagccgttccagagcacactgtggctgctggtggggctgtcggtgcacgtggtggccgtgatgctgtacctgctggaccgcttcagccccttcggccggttcaaggtgaacagcgaggaggaggaggaggacgcactgaccctgtcctcggccatgtggttctcctggggcgtcctgctcaactccggcatcggggaaggcgcccccagaagcttctcagcgcgcatcctgggcatggtgtgggccggctttgccatgatcatcgtggcctcctacaccgccaacctggcggccttcctggtgctggaccggccggaggagcgcatcacgggcatcaacgaccctcggctgaggaacccctcggacaagtttatctacgccacggtgaagcagagctccgtggatatctacttccggcgccaggtggagctgagcaccatgtaccggcatatggagaagcacaactacgagagtgcggcggaggccatccaggccgtgagagacaacaagctgcatgccttcatctgggactcggcggtgctggagttcgaggcctcgcagaagtgcgacctggtgacgactggagagctgtttttccgctcgggcttcggcataggcatgcgcaaagacagcccctggaagcagaacgtctccctgtccatcctcaagtcccacgagaatggcttcatggaagacctggacaagacgtgggttcggtatcaggaatgtgactcgcgcagcaacgcccctgcgacccttacttttgagaacatggccggggtcttcatgctggtagctgggggcatcgtggccgggatcttcctgattttcatcgagattgcctacaagcggcacaaggatgctcgccggaagcagatgcagctggcctttgccgccgttaacgtgtggcggaagaacctgcagagcaccgggggtggacgcggcgctttgcaaaaccaaaaagacacagtgctgccgcgacgcgctattgagagggaggagggccagctgcagctgtgttcccgtcatagggagagctgagactccccgcccgccctcctctgccccctcccccgcagacagacagacagacggacgggacagcggcccggcccacgcagagccccggagcaccacggggtcgggggaggagcacccccagcctcccccaggctgcgcctgcccgcccgccggttggccggctggccggtccaccccgtcccggccccgcgcgtgcccccagcgtggggctaacgggcgccttgtctgtgtatttctattttgcagcagtaccatcccactgatatcacgggcccgctcaacctctcagatccctcggtcagcaccgtggtgtgaggcccccggaggcgcccacctgcccagttagcccggccaaggacactgatgggtcctgctgctcgggaaggcctgagggaagcccacccgccccagagactgcccaccctgggcctcccgtccgtccgcccgcccaccccgctgcctggcgggcagcccctgctggaccaaggtgcggaccggagcggctgaggacggggcagagctgagtcggctgggcagggccgcagggcgctccggcagaggcagggccctggggtctctgagcagtggggagcgggggctaactggccccaggcggaggggcttggagcagagacggcagccccatccttcccgcagcaccagcctgagccacagtggggcccatggccccagctggctgggtcgcccctcctcgggcgcctgcgctcctctgcagcctgagctccaccctcccctcttcttgcggcaccgcccacccacaccccgtctgccccttgaccccacacgccggggctggccctgccctcccccacggccgtccctgacttcccagctggcagcgcctcccgccgcctcgggccgcctcctccagactcgagagggctgagcccctcctctcctcgtccggcctgcagcccagaacgggcctccccgggggtccccggacgctggctcgggactgtcttcaaccctgccctgcaccttgggcacgggagagcgccacccgcccgcccccgccctcgctccgggtgcgtgaccggcccgccaccttgtacagaaccagcactcccagggcccgagcgcgtgccttccccgtgcggcccgtgcgcagccgcgctctgcccctccgtccccagggtgcaggcgcgcaccgcccaacccccacctcccggtgtatgcagtggtgatgcctaaaggaatgtcacgc

SEQ ID NO: 12318 - DNA, 3640 bp, Homo sapiens
  source 1..3640: mol_type = unassigned DNA
gagcccatgagcaccatgcgcctgctgacgctcgccctgctgttctcctgctccgtcgcccgtgccgcgtgcgaccccaagatcgtcaacattggcgcggtgctgagcacgcggaagcacgagcagatgttccgcgaggccgtgaaccaggccaacaagcggcacggctcctggaagattcagctcaatgccacctccgtcacgcacaagcccaacgccatccagatggctctgtcggtgtgcgaggacctcatctccagccaggtctacgccatcctagttagccatccacctacccccaacgaccacttcactcccacccctgtctcctacacagccggcttctaccgcatacccgtgctggggctgaccacccgcatgtccatctactcggacaagagcatccacctgagcttcctgcgcaccgtgccgccctactcccaccagtccagcgtgtggtttgagatgatgcgtgtctacagctggaaccacatcatcctgctggtcagcgacgaccacgagggccgggcggctcagaaacgcctggagacgctgctggaggagcgtgagtccaagagtaaaaaaaggaactatgaaaacctcgaccaactgtcctatgacaacaagcgcggacccaaggcagagaaggtgctgcagtttgacccagggaccaagaacgtgacggccctgctgatggaggcgaaagagctggaggcccgggtcatcatcctttctgccagcgaggacgatgctgccactgtataccgcgcagccgcgatgctgaacatgacgggctccgggtacgtgtggctggtcggcgagcgcgagatctcggggaacgccctgcgctacgccccagacggcatcctcgggctgcagctcatcaacggcaagaacgagtcggcccacatcagcgacgccgtgggcgtggtggcccaggccgtgcacgagctcctcgagaaggagaacatcaccgacccgccgcggggctgcgtgggcaacaccaacatctggaagaccgggccgctcttcaagagagtgctgatgtcttccaagtatgcggatggggtgactggtcgcgtggagttcaatgaggatggggaccggaagttcgccaactacagcatcatgaacctgcagaaccgcaagctggtgcaagtgggcatctacaatggcacccacgtcatccctaatgacaggaagatcatctggccaggcggagagacagagaagcctcgagggtaccagatgtccaccagactgaagattgtgacgatccaccaggagcccttcgtgtacgtcaagcccacgctgagtgatgggacatgcaaggaggagttcacagtcaacggcgacccagtcaagaaggtgatctgcaccgggcccaacgacacgtcgccgggcagcccccgccacacggtgcctcagtgttgctacggcttttgcatcgacctgctcatcaagctggcacggaccatgaacttcacctacgaggtgcacctggtggcagatggcaagttcggcacacaggagcgggtgaacaacagcaacaagaaggagtggaatgggatgatgggcgagctgctcagcgggcaggcagacatgatcgtggcgccgctaaccataaacaacgagcgcgcgcagtacatcgagttttccaagcccttcaagtaccagggcctgactattctggtcaagaaggagattccccggagcacgctggactcgttcatgcagccgttccagagcacactgtggctgctggtggggctgtcggtgcacgtggtggccgtgatgctgtacctgctggaccgcttcagccccttcggccggttcaaggtgaacagcgaggaggaggaggaggacgcactgaccctgtcctcggccatgtggttctcctggggcgtcctgctcaactccggcatcggggaaggcgcccccagaagcttctcagcgcgcatcctgggcatggtgtgggccggctttgccatgatcatcgtggcctcctacaccgccaacctggcggccttcctggtgctggaccggccggaggagcgcatcacgggcatcaacgaccctcggctgaggaacccctcggacaagtttatctacgccacggtgaagcagagctccgtggatatctacttccggcgccaggtggagctgagcaccatgtaccggcatatggagaagcacaactacgagagtgcggcggaggccatccaggccgtgagagacaacaagctgcatgccttcatctgggactcggcggtgctggagttcgaggcctcgcagaagtgcgacctggtgacgactggagagctgtttttccgctcgggcttcggcataggcatgcgcaaagacagcccctggaagcagaacgtctccctgtccatcctcaagtcccacgagaatggcttcatggaagacctggacaagacgtgggttcggtatcaggaatgtgactcgcgcagcaacgcccctgcgacccttacttttgagaacatggccggggtcttcatgctggtagctgggggcatcgtggccgggatcttcctgattttcatcgagattgcctacaagcggcacaaggatgctcgccggaagcagatgcagctggcctttgccgccgttaacgtgtggcggaagaacctgcagcagtaccatcccactgatatcacgggcccgctcaacctctcagatccctcggtcagcaccgtggtgtgaggcccccggaggcgcccacctgcccagttagcccggccaaggacactgatgggtcctgctgctcgggaaggcctgagggaagcccacccgccccagagactgcccaccctgggcctcccgtccgtccgcccgcccaccccgctgcctggcgggcagcccctgctggaccaaggtgcggaccggagcggctgaggacggggcagagctgagtcggctgggcagggccgcagggcgctccggcagaggcagggccctggggtctctgagcagtggggagcgggggctaactggccccaggcggaggggcttggagcagagacggcagccccatccttcccgcagcaccagcctgagccacagtggggcccatggccccagctggctgggtcgcccctcctcgggcgcctgcgctcctctgcagcctgagctccaccctcccctcttcttgcggcaccgcccacccacaccccgtctgccccttgaccccacacgccggggctggccctgccctcccccacggccgtccctgacttcccagctggcagcgcctcccgccgcctcgggccgcctcctccagactcgagagggctgagcccctcctctcctcgtccggcctgcagcccagaacgggcctccccgggggtccccggacgctggctcgggactgtcttcaaccctgccctgcaccttgggcacgggagagcgccacccgcccgcccccgccctcgctccgggtgcgtgaccggcccgccaccttgtacagaaccagcactcccagggcccgagcgcgtgccttccccgtgcggcccgtgcgcagccgcgctctgcccctccgtccccagggtgcaggcgcgcaccgcccaacccccacctcccggtgtatgcagtggtgatgcctaaaggaatgtcacgc

SEQ ID NO: 12319 - DNA, 5142 bp, Homo sapiens
  source 1..5142: mol_type = unassigned DNA
ggtaaggctctggaaaagggggcgctgggagcgcattgcgagggggctggagagggagagaggagcggaagctgagggtgtgaaacggctggccccgaacacacctcgcggcgctccagtgattcctggtgtccgacctcagccccagtcagtgcgggtccagtttccaggctctcgcggaaggcctggctgagcacatgcggcagccacggtcaccctccctattcctcttagcccgaggaggggggtcccaagttacatggccacgcagatggggcctctccctcatttctgaaccttgtggggaggggaaccttgaagggagcgccccccagagccatggcttagggcctcccccacccctctggagctccagtctgcaagagtcaggagccgaaatatcgctgactgtgggtgacgactcttgcgcgcacacacacatacaagcgggcacgacgcgttcggtcctattaaaaggcacgcaagggtgcgggctgcacgcggtgacacggacccctctaacgtttccaaactgagctccctgcaggtccccgacagcacaggcccctgtcccaggacccctccaggcacgcgctcacacgcacacgcgcgctccccggctcacgcgcgctccgacacacacgctcacgcgaacgcaggcgcacgctctggcgcgggaggcgcccccttcgcctccgtgttgggaagcgggggcggcgggaggggcaggagacgttggccccgctcgcgtttctgcagctgctgcagtcgccgcagcgtccggaccggaaccagcgccgtccgcggagccgccgccgccgccgccgggccctttccaagccgggcgctcggagctgtgcccggccccgcttcagcaccgcggacagcgccggccgcgtggggctgagccccgagcccccgcgcacgcttcagcgccccttccctcggccgacgtcccgggaccgccgctccgggggagacgtggcgtccgcagcccgcggggccgggcgagcgcaggacggcccggaagccccgcgggggatgcgccgagggccccgcgttcgcgccgcgcagagccaggcccgcggcccgagcccatgagcaccatgcgcctgctgacgctcgccctgctgttctcctgctccgtcgcccgtgccgcgtgcgaccccaagatcgtcaacattggcgcggtgctgagcacgcggaagcacgagcagatgttccgcgaggccgtgaaccaggccaacaagcggcacggctcctggaagattcagctcaatgccacctccgtcacgcacaagcccaacgccatccagatggctctgtcggtgtgcgaggacctcatctccagccaggtctacgccatcctagttagccatccacctacccccaacgaccacttcactcccacccctgtctcctacacagccggcttctaccgcatacccgtgctggggctgaccacccgcatgtccatctactcggacaagagcatccacctgagcttcctgcgcaccgtgccgccctactcccaccagtccagcgtgtggtttgagatgatgcgtgtctacagctggaaccacatcatcctgctggtcagcgacgaccacgagggccgggcggctcagaaacgcctggagacgctgctggaggagcgtgagtccaaggcagagaaggtgctgcagtttgacccagggaccaagaacgtgacggccctgctgatggaggcgaaagagctggaggcccgggtcatcatcctttctgccagcgaggacgatgctgccactgtataccgcgcagccgcgatgctgaacatgacgggctccgggtacgtgtggctggtcggcgagcgcgagatctcggggaacgccctgcgctacgccccagacggcatcctcgggctgcagctcatcaacggcaagaacgagtcggcccacatcagcgacgccgtgggcgtggtggcccaggccgtgcacgagctcctcgagaaggagaacatcaccgacccgccgcggggctgcgtgggcaacaccaacatctggaagaccgggccgctcttcaagagagtgctgatgtcttccaagtatgcggatggggtgactggtcgcgtggagttcaatgaggatggggaccggaagttcgccaactacagcatcatgaacctgcagaaccgcaagctggtgcaagtgggcatctacaatggcacccacgtcatccctaatgacaggaagatcatctggccaggcggagagacagagaagcctcgagggtaccagatgtccaccagactgaagattgtgacgatccaccaggagcccttcgtgtacgtcaagcccacgctgagtgatgggacatgcaaggaggagttcacagtcaacggcgacccagtcaagaaggtgatctgcaccgggcccaacgacacgtcgccgggcagcccccgccacacggtgcctcagtgttgctacggcttttgcatcgacctgctcatcaagctggcacggaccatgaacttcacctacgaggtgcacctggtggcagatggcaagttcggcacacaggagcgggtgaacaacagcaacaagaaggagtggaatgggatgatgggcgagctgctcagcgggcaggcagacatgatcgtggcgccgctaaccataaacaacgagcgcgcgcagtacatcgagttttccaagcccttcaagtaccagggcctgactattctggtcaagaaggagattccccggagcacgctggactcgttcatgcagccgttccagagcacactgtggctgctggtggggctgtcggtgcacgtggtggccgtgatgctgtacctgctggaccgcttcagccccttcggccggttcaaggtgaacagcgaggaggaggaggaggacgcactgaccctgtcctcggccatgtggttctcctggggcgtcctgctcaactccggcatcggggaaggcgcccccagaagcttctcagcgcgcatcctgggcatggtgtgggccggctttgccatgatcatcgtggcctcctacaccgccaacctggcggccttcctggtgctggaccggccggaggagcgcatcacgggcatcaacgaccctcggctgaggaacccctcggacaagtttatctacgccacggtgaagcagagctccgtggatatctacttccggcgccaggtggagctgagcaccatgtaccggcatatggagaagcacaactacgagagtgcggcggaggccatccaggccgtgagagacaacaagctgcatgccttcatctgggactcggcggtgctggagttcgaggcctcgcagaagtgcgacctggtgacgactggagagctgtttttccgctcgggcttcggcataggcatgcgcaaagacagcccctggaagcagaacgtctccctgtccatcctcaagtcccacgagaatggcttcatggaagacctggacaagacgtgggttcggtatcaggaatgtgactcgcgcagcaacgcccctgcgacccttacttttgagaacatggccggggtcttcatgctggtagctgggggcatcgtggccgggatcttcctgattttcatcgagattgcctacaagcggcacaaggatgctcgccggaagcagatgcagctggcctttgccgccgttaacgtgtggcggaagaacctgcaggatagaaagagtggtagagcagagcctgaccctaaaaagaaagccacatttagggctatcacctccaccctggcttccagcttcaagaggcgtaggtcctccaaagacacgagcaccgggggtggacgcggcgctttgcaaaaccaaaaagacacagtgctgccgcgacgcgctattgagagggaggagggccagctgcagctgtgttcccgtcatagggagagctgagactccccgcccgccctcctctgccccctcccccgcagacagacagacagacggacgggacagcggcccggcccacgcagagccccggagcaccacggggtcgggggaggagcacccccagcctcccccaggctgcgcctgcccgcccgccggttggccggctggccggtccaccccgtcccggccccgcgcgtgcccccagcgtggggctaacgggcgccttgtctgtgtatttctattttgcagcagtaccatcccactgatatcacgggcccgctcaacctctcagatccctcggtcagcaccgtggtgtgaggcccccggaggcgcccacctgcccagttagcccggccaaggacactgatgggtcctgctgctcgggaaggcctgagggaagcccacccgccccagagactgcccaccctgggcctcccgtccgtccgcccgcccaccccgctgcctggcgggcagcccctgctggaccaaggtgcggaccggagcggctgaggacggggcagagctgagtcggctgggcagggccgcagggcgctccggcagaggcagggccctggggtctctgagcagtggggagcgggggctaactggccccaggcggaggggcttggagcagagacggcagccccatccttcccgcagcaccagcctgagccacagtggggcccatggccccagctggctgggtcgcccctcctcgggcgcctgcgctcctctgcagcctgagctccaccctcccctcttcttgcggcaccgcccacccacaccccgtctgccccttgaccccacacgccggggctggccctgccctcccccacggccgtccctgacttcccagctggcagcgcctcccgccgcctcgggccgcctcctccagactcgagagggctgagcccctcctctcctcgtccggcctgcagcccagaacgggcctccccgggggtccccggacgctggctcgggactgtcttcaaccctgccctgcaccttgggcacgggagagcgccacccgcccgcccccgccctcgctccgggtgcgtgaccggcccgccaccttgtacagaaccagcactcccagggcccgagcgcgtgccttccccgtgcggcccgtgcgcagccgcgctctgcccctccgtccccagggtgcaggcgcgcaccgcccaacccccacctcccggtgtatgcagtggtgatgcctaaaggaatgtcacgc

SEQ ID NO: 12320 - DNA, 5031 bp, Homo sapiens
  source 1..5031: mol_type = unassigned DNA
cgctcagcagctcccggtcgcacaactcccagcagccggcgctggggaggtggtagggggtgcgggtggaggtgcccagttagcttctcgtgggtggccaacctggggctcccattctcctgtgcaccctggagtggagctcccgctatcagccacaggggctgaggatccgcactgggggcgtcgtgggcatcgggcttcagcttcccccctcttgtctagcccccctgggcgcataggggggcttgtgagcactgcagactgcagccttcccctcaaccctccctcccctcgttggtgggctgaccctgcctctccttctctcctccgccccgttagagccctgctgcagagcctccggctgggatagccgccccccgtgggggcgatgcggacagcgcgggacagccaggggagcgcgctggggccgcagcatgcgggaacccgctaaacccggtggctgctgaggcggccgagatgctcgtgcgcgcagcgcgccccactgcatcctcgaccttctcgggctacagggaccgtcagtggcgactatgggcagagtgggctattggaccctgctggtgctgccggcccttctggtctggcgcggtccggcgccgagcgcggcggcggagaagggtccccccgcgctaaatattgcggtgatgctgggtcacagccacgacgtgacagagcgcgaacttcgaacactgtggggccccgagcaggcggcggggctgcccctggacgtgaacgtggtagctctgctgatgaaccgcaccgaccccaagagcctcatcacgcacgtgtgcgacctcatgtccggggcacgcatccacggcctcgtgtttggggacgacacggaccaggaggccgtagcccagatgctggattttatctcctcccacaccttcgtccccatcttgggcattcatgggggcgcatctatgatcatggctgacaaggatccgacgtctaccttcttccagtttggagcgtccatccagcagcaagccacggtcatgctgaagatcatgcaggattatgactggcatgtcttctccctggtgaccactatcttccctggctacagggaattcatcagcttcgtcaagaccacagtggacaacagctttgtgggctgggacatgcagaatgtgatcacactggacacttcctttgaggatgcaaagacacaagtccagctgaagaagatccactcttctgtcatcttgctctactgttccaaagacgaggctgttctcattctgagtgaggcccgctcccttggcctcaccgggtatgatttcttctggattgtccccagcttggtctctgggaacacggagctcatcccaaaagagtttccatcgggactcatttctgtctcctacgatgactgggactacagcctggaggcgagagtgagggacggcattggcatcctaaccaccgctgcatcttctatgctggagaagttctcctacatccccgaggccaaggccagctgctacgggcagatggagaggccagaggtcccgatgcacaccttgcacccatttatggtcaatgttacatgggatggcaaagacttatccttcactgaggaaggctaccaggtgcaccccaggctggtggtgattgtgctgaacaaagaccgggaatgggaaaaggtgggcaagtgggagaaccatacgctgagcctgaggcacgccgtgtggcccaggtacaagtccttctccgactgtgagccggatgacaaccatctcagcatcgtcaccctggaggaggccccattcgtcatcgtggaagacatagaccccctgaccgagacgtgtgtgaggaacaccgtgccatgtcggaagttcgtcaaaatcaacaattcaaccaatgaggggatgaatgtgaagaaatgctgcaaggggttctgcattgatattctgaagaagctttccagaactgtgaagtttacttacgacctctatctggtgaccaatgggaagcatggcaagaaagttaacaatgtgtggaatggaatgatcggtgaagtggtctatcaacgggcagtcatggcagttggctcgctcaccatcaatgaggaacgttctgaagtggtggacttctctgtgccctttgtggaaacgggaatcagtgtcatggtttcaagaagtaatggcaccgtctcaccttctgcttttctagaaccattcagcgcctctgtctgggtgatgatgtttgtgatgctgctcattgtttctgccatagctgtttttgtctttgaatacttcagccctgttggatacaacagaaacttagccaaagggaaagcaccccatgggccttcttttacaattggaaaagctatatggcttctttggggcctggtgttcaataactccgtgcctgtccagaatcctaaagggaccaccagcaagatcatggtatctgtatgggccttcttcgctgtcatattcctggctagctacacagccaatctggctgccttcatgatccaagaggaatttgtggaccaagtgaccggcctcagtgacaaaaagtttcagagacctcatgactattccccaccttttcgatttgggacagtgcctaatggaagcacggagagaaacattcggaataactatccctacatgcatcagtacatgaccaaatttaatcagaaaggagtagaggacgccttggtcagcctgaaaacggggaagctggacgctttcatctacgatgccgcagtcttgaattacaaggctgggagggatgaaggctgcaagctggtgaccatcgggagtgggtacatctttgccaccaccggttatggaattgcccttcagaaaggctctccttggaagaggcagatcgacctggccttgcttcagtttgtgggtgatggtgagatggaggagctggagaccctgtggctcactgggatctgccacaacgagaagaacgaggtgatgagcagccagctggacattgacaacatggcgggcgtattctacatgctggctgccgccatggcccttagcctcatcaccttcatctgggagcacctcttctactggaagctgcgcttctgtttcacgggcgtgtgctccgaccggcctgggttgctcttctccatcagcaggggcatctacagctgcattcatggagtgcacattgaagaaaagaagaagtctccagacttcaatctgacgggatcccagagcaacatgttaaaactcctccggtcagccaaaaacatttccagcatgtccaacatgaactcctcaagaatggactcacccaaaagagctgctgacttcatccaaagaggttccctcatcatggacatggtttcagataaggggaatttgatgtactcagacaacaggtcctttcaggggaaagagagcatttttggagacaacatgaacgaactccaaacatttgtggccaaccggcagaaggataacctcaataactatgtattccagggacaacatcctcttactctcaatgagtccaaccctaacacggtggaggtggccgtgagcacagaatccaaagcgaactctagaccccggcagctgtggaagaaatccgtggattccatacgccaggattcactatcccagaatccagtctcccagagggatgaggcaacagcagagaataggacccactccctaaagagccctaggtatcttccagaagagatggcccactctgacatttcagaaacgtcaaatcgggccacgtgccacagggaacctgacaacagtaagaaccacaaaaccaaggacaactttaaaaggtcagtggcctccaaataccccaaggactgtagtgaggtcgagcgcacctacctgaaaaccaaatcaagctcccctagagacaagatctacactatagatggtgagaaggagcctggtttccacttagatccaccccagtttgttgaaaatgtgaccctgcccgagaacgtggacttcccggacccctaccaggatcccagtgaaaacttccgcaagggggactccacgctgccaatgaaccggaaccccttgcataatgaagaggggctttccaacaacgaccagtataaactctactccaagcacttcaccttgaaagacaagggttccccgcacagtgagaccagcgagcgataccggcagaactccacgcactgcagaagctgcctttccaacatgcccacctattcaggccacttcaccatgaggtcccccttcaagtgcgatgcctgcctgcggatggggaacctctatgacatcgatgaagaccagatgcttcaggagacaggtaacccagccaccggggagcaggtctaccagcaggactgggcacagaacaatgcccttcaattacaaaagaacaagctaaggattagccgtcagcattcctacgataacattgtcgacaaacctagggagctagaccttagcaggccctcccggagcataagcctcaaggacagggaacggcttctggagggaaatttttacggcagcctgtttagtgtcccctcaagcaaactctcggggaaaaaaagctcccttttcccccaaggtctggaggacagcaagaggagcaagtctctcttgccagaccacacctccgataaccctttcctccactcccacagggatgaccaacgcttggttattgggagatgcccctcggacccttacaaacactcgttgccatcccaggcggtgaatgacagctatcttcggtcgtccttgaggtcaacggcatcgtactgttccagggacagtcggggccacaatgatgtgtatatttcggagcatgttatgccttatgctgcaaataagaataatatgtactctacccccagggttttaaattcctgcagcaatagacgcgtgtacaagaaaatgcctagtatcgaatctgatgtttaaaaatcttccattaatgttttatctatagggaaatatacgtaatggccaatgttctggagggtaaatgttggatgtccaatagtgccct

SEQ ID NO: 12321 - DNA, 14450 bp, Homo sapiens
  source 1..14450: mol_type = unassigned DNA
atcatgggaccgggtgagcgctgagaatcgcggccgcagccatcagccctggagatgaccaggagcggccactgctgagaactatgtggagagaggctgcgagccctgctgcagagcctccggctgggatagccgccccccgtgggggcgatgcggacagcgcgggacagccaggggagcgcgctggggccgcagcatgcgggaacccgctaaacccggtggctgctgaggcggccgagatgctcgtgcgcgcagcgcgccccactgcatcctcgaccttctcgggctacagggaccgtcagtggcgactatgggcagagtgggctattggaccctgctggtgctgccggcccttctggtctggcgcggtccggcgccgagcgcggcggcggagaagggtccccccgcgctaaatattgcggtgatgctgggtcacagccacgacgtgacagagcgcgaacttcgaacactgtggggccccgagcaggcggcggggctgcccctggacgtgaacgtggtagctctgctgatgaaccgcaccgaccccaagagcctcatcacgcacgtgtgcgacctcatgtccggggcacgcatccacggcctcgtgtttggggacgacacggaccaggaggccgtagcccagatgctggattttatctcctcccacaccttcgtccccatcttgggcattcatgggggcgcatctatgatcatggctgacaaggatccgacgtctaccttcttccagtttggagcgtccatccagcagcaagccacggtcatgctgaagatcatgcaggattatgactggcatgtcttctccctggtgaccactatcttccctggctacagggaattcatcagcttcgtcaagaccacagtggacaacagctttgtgggctgggacatgcagaatgtgatcacactggacacttcctttgaggatgcaaagacacaagtccagctgaagaagatccactcttctgtcatcttgctctactgttccaaagacgaggctgttctcattctgagtgaggcccgctcccttggcctcaccgggtatgatttcttctggattgtccccagcttggtctctgggaacacggagctcatcccaaaagagtttccatcgggactcatttctgtctcctacgatgactgggactacagcctggaggcgagagtgagggacggcattggcatcctaaccaccgctgcatcttctatgctggagaagttctcctacatccccgaggccaaggccagctgctacgggcagatggagaggccagaggtcccgatgcacaccttgcacccatttatggtcaatgttacatgggatggcaaagacttatccttcactgaggaaggctaccaggtgcaccccaggctggtggtgattgtgctgaacaaagaccgggaatgggaaaaggtgggcaagtgggagaaccatacgctgagcctgaggcacgccgtgtggcccaggtacaagtccttctccgactgtgagccggatgacaaccatctcagcatcgtcaccctggaggaggccccattcgtcatcgtggaagacatagaccccctgaccgagacgtgtgtgaggaacaccgtgccatgtcggaagttcgtcaaaatcaacaattcaaccaatgaggggatgaatgtgaagaaatgctgcaaggggttctgcattgatattctgaagaagctttccagaactgtgaagtttacttacgacctctatctggtgaccaatgggaagcatggcaagaaagttaacaatgtgtggaatggaatgatcggtgaagtggtctatcaacgggcagtcatggcagttggctcgctcaccatcaatgaggaacgttctgaagtggtggacttctctgtgccctttgtggaaacgggaatcagtgtcatggtttcaagaagtaatggcaccgtctcaccttctgcttttctagaaccattcagcgcctctgtctgggtgatgatgtttgtgatgctgctcattgtttctgccatagctgtttttgtctttgaatacttcagccctgttggatacaacagaaacttagccaaagggaaagcaccccatgggccttcttttacaattggaaaagctatatggcttctttggggcctggtgttcaataactccgtgcctgtccagaatcctaaagggaccaccagcaagatcatggtatctgtatgggccttcttcgctgtcatattcctggctagctacacagccaatctggctgccttcatgatccaagaggaatttgtggaccaagtgaccggcctcagtgacaaaaagtttcagagacctcatgactattccccaccttttcgatttgggacagtgcctaatggaagcacggagagaaacattcggaataactatccctacatgcatcagtacatgaccaaatttaatcagaaaggagtagaggacgccttggtcagcctgaaaacggggaagctggacgctttcatctacgatgccgcagtcttgaattacaaggctgggagggatgaaggctgcaagctggtgaccatcgggagtgggtacatctttgccaccaccggttatggaattgcccttcagaaaggctctccttggaagaggcagatcgacctggccttgcttcagtttgtgggtgatggtgagatggaggagctggagaccctgtggctcactgggatctgccacaacgagaagaacgaggtgatgagcagccagctggacattgacaacatggcgggcgtattctacatgctggctgccgccatggcccttagcctcatcaccttcatctgggagcacctcttctactggaagctgcgcttctgtttcacgggcgtgtgctccgaccggcctgggttgctcttctccatcagcaggggcatctacagctgcattcatggagtgcacattgaagaaaagaagaagtctccagacttcaatctgacgggatcccagagcaacatgttaaaactcctccggtcagccaaaaacatttccagcatgtccaacatgaactcctcaagaatggactcacccaaaagagctgctgacttcatccaaagaggttccctcatcatggacatggtttcagataaggggaatttgatgtactcagacaacaggtcctttcaggggaaagagagcatttttggagacaacatgaacgaactccaaacatttgtggccaaccggcagaaggataacctcaataactatgtattccagggacaacatcctcttactctcaatgagtccaaccctaacacggtggaggtggccgtgagcacagaatccaaagcgaactctagaccccggcagctgtggaagaaatccgtggattccatacgccaggattcactatcccagaatccagtctcccagagggatgaggcaacagcagagaataggacccactccctaaagagccctaggtatcttccagaagagatggcccactctgacatttcagaaacgtcaaatcgggccacgtgccacagggaacctgacaacagtaagaaccacaaaaccaaggacaactttaaaaggtcagtggcctccaaataccccaaggactgtagtgaggtcgagcgcacctacctgaaaaccaaatcaagctcccctagagacaagatctacactatagatggtgagaaggagcctggtttccacttagatccaccccagtttgttgaaaatgtgaccctgcccgagaacgtggacttcccggacccctaccaggatcccagtgaaaacttccgcaagggggactccacgctgccaatgaaccggaaccccttgcataatgaagaggggctttccaacaacgaccagtataaactctactccaagcacttcaccttgaaagacaagggttccccgcacagtgagaccagcgagcgataccggcagaactccacgcactgcagaagctgcctttccaacatgcccacctattcaggccacttcaccatgaggtcccccttcaagtgcgatgcctgcctgcggatggggaacctctatgacatcgatgaagaccagatgcttcaggagacaggtaacccagccaccggggagcaggtctaccagcaggactgggcacagaacaatgcccttcaattacaaaagaacaagctaaggattagccgtcagcattcctacgataacattgtcgacaaacctagggagctagaccttagcaggccctcccggagcataagcctcaaggacagggaacggcttctggagggaaatttttacggcagcctgtttagtgtcccctcaagcaaactctcggggaaaaaaagctcccttttcccccaaggtctggaggacagcaagaggagcaagtctctcttgccagaccacacctccgataaccctttcctccactcccacagggatgaccaacgcttggttattgggagatgcccctcggacccttacaaacactcgttgccatcccaggcggtgaatgacagctatcttcggtcgtccttgaggtcaacggcatcgtactgttccagggacagtcggggccacaatgatgtgtatatttcggagcatgttatgccttatgctgcaaataagaataatatgtactctacccccagggttttaaattcctgcagcaatagacgcgtgtacaagaaaatgcctagtatcgaatctgatgtttaaaaatcttccattaatgttttatctatagggaaatatacgtaatggccaatgttctggagggtaaatgttggatgtccaatagtgccctgctaagaggaagaagatgtagggaggtattttgttgttgttgttgttggctcttttgcacacggcttcatgccataatcttccactcaaggaatcttgtgaggtgtgtgctgagcatggcagacaccagataggtgagtccttaaccaaaaataactaactacataagggcaagtctccgggacatgcctactgggtatgttggcaataatgatgcattggatgccaatggtgatgttatgatttcctatattccaaattccattaaggtcagcccaccatgtaattttctcatcagaaatgcctaatggtttctctaatacagaataagcaatatggtgtgcatgtaaacctgacacagacaaaataaaaacagttaagaatgcatctgcactgtagtgcgattgacatgtgcaagagattaggaagtttggctcgtaacagtttcagctttcttgttatgccttccatcacagcccaggctcaccccaagaactccaggctcccctaaagaatagcaaatcagtgtgttcgtgatgactgtgctaccttcattatagttcatttccaagacacatctggagccaaaggcccgagggaccctcaggtggggagagctacaggaatctctttggatgttgatgtgtgtttctctcaccctcggcttcgatggtcttgttcagagctgcataaactaacacatttatgtctccgagatctaagtgtggatcttctgtctgtgacacagtggccattgtagtttatcccgaagacgcctatgtacgtaagtttgcatttcctcccttctggtgatgactcagggttgtatagtatctgttaccccttccctcccagagtaaccataactcgttccgtttccaaacagccatggtggtgtccaattagctgtgtatcgctcttcccagagttgttaatgtggtgacatgcaccaacagccgtatgtgtactgtgatctgtaagaagtacaatgccatctgtctgccgaaggctagcatggttttaggtttatcttccttcacatccagaaattctgttggacactcacttccaccccaaactcctcaaatcaaaagccttcaaaacacgaggcactcttggatctaccctgagtatcctccaaactgtggatacagtttagtgagacaagcaatttctcccttctgagttattctctctgttggtggcaaaccacttcatagcaccaacagagatgtaggaaaaattcctcaaagtatttgtcatttctgagtcgcctgcattatcccattcttattctcctcaaacctgtgcatatatgacatgaaatgatatccattttttttttaagttagagacagagaggggaatacttatgcatggggagcctgttagcacagtgcctgccacaaaaacaagtgcccccgacaagatagttgctatgttatgacactttctcagatcaggattttctagtttaaaaattaaatatcataaaaccagcaaataatattaactaaaccttttatatagttctactctgttaattagtgtatttcatgtacatgaatatttttgaagtatttgggataactagccatcagtgtttgcagaagacctcagtctgttttgggccattacggaaacactaagctaatgtagactcgcctggccatttcctggtttcctcctgcattctgctttacattcttgaagaaagggataaagtggcaggttgaaaaattatcccatttcttctcctcatggtgtgcgttctgttttgtaagtattattttcttgcatgtgggcaagtgtcagggatgattcccttaaagctcaaggatgcatggaatagctccatctttgggaaagtacacctgacctacagtgttcctataatgaaaagtggttgcaataaatttcagggtcaatcatagggagacagagggaggcagtgggtgagaggagcttcctttcatttttgaaaggcagaaggggctgactaggtgctggggatgcatgtgcttgaaaatgacattttatttcccggatgctgtacctctgctgccccaagacccagccatggagaagcctggatcgaagggcccagaatagtcaccccaacatctgatcctaaatctgaatctccatgactgtgtagccttttagccctttctaccttctgcccttccagtgcattccagaccttaatccaccccagcaaggatcgcctccatttcctcatgagtctgggatgttttgacatgaatgaattaaaaagtcttcccagaatacagaagagtgatttgtcgtcaagccaaagaggctttctgtcttcctctggtgtcctctaaacccagggggctgccaaatgccacagagacctccagggagagtgagagttatacttggactgacttcatcggtcagaaagccttcccctaacagcagcattatttctgctattaaccccatacatctctggataaagaaactgaaaacgtggcctttggaagaatcaacagtaatgttgtgaaaaaaatatatattcttttcactgaccgaagtgttttttcaaataaataatcagaaatgttatgctacacaaagtttatggtatcccttctctactaattcaatgactcttcaatgtgatgatcccaagcaaaaaaaaaaaaaaaaaaaaaaaatcaactactgatcagatggtcaatttctaaggaaaagatgtagagttattcaaaggtcatctaagtcagttcagtctttgcaaaaagaatatcaggaatgtaacgtccagtggtaaatggaacccacagtatgagaagtaacaagaattaaataggaagcctggaagcctgagactatagatctatcacagaagattcccgtaacatatcccagctctgagttcttagatttgttgatgtcaaggagcccaaatttctgaacacaaatgcctgagtttcagctggcttaagtcagagctggcatccataatgatattttgttaattctaattggttttccccacttgagaaggacccaactagtcctcagataggtacacttgaatgcaaacggttgggtctctgtccatgggtaatagcacgcacatgcaaccaatttaaaatactctgggtaagagagtcttctagagcataaactgtacttgagaaacctttgtgcttctggaaaatgggtttcatcatccttacatctgcaggttcttaggccacttatggtttcaatgctctgagctggcaagtccctataggtctatctttctgccagagagacttgcaggattataatctcacaatctcaccactcattactgttatgtcctctgcaaatctctctgcgttattttagccagcaccatgactgggcatccacggattactcttgattttctcttccctgattcacaggatgccagagagtctgagtatttagtttttctggtgaaagcattaaaattcacacattgcagcaaaatctgtcaaatcatttcacgcttattttctggggagaaaaatagaaaattacaccttgtttacaaatgaaatagtttcacttaaatgggactctagccaaggcagttaattagtcaaaagatccacagctgtcatatagtcacacattgtttattctatttgctatgtcgaccactgatgtgtatttaatattctgcatccttcacaggaaatgacaaatgccctgaattatttgcaaatagaattgctaatgaaaaagaaaaaaaatgttgatgttaattaaatggtgattaaaaatttatctcctttaaatctaaaaagtgcagctttaataatcagttgtcatataaataagtaccttgtactgaaatcccttgcggtttaagacctaaataaacactaatttgagaactctaaataccttacagaggagctggatatattcgttaacattatgcacattcctgtactgtttctttgtgcatagctgttgtgcatgaatccttgaaaaggggacatgcgttgtttctgaaatggagcctgtttgtattaaccatggctatagtagacatgattggactcaaagaaaaagaagtttgagtaggtggaagctaaatgtgttgcttgatatttaatgagtgaagggttctatgtaaaggcaattttccttccaaaagtactgtttattttcactggagacaaaattagacctttccagataccccatctctttttggtgaacagggttgaaagtgctgtggggtctatacttgaaaagttctcccaatatgcagttactgtttcccattcaatccctatacattgtactgtgttcatatctaattgtatcagatgaggtcagcttgccacttgatatagatcagagatgatcaaatgcacttatcctgtgaatacaactgcttgtgtacacatgtatataatatacatgcttgatttctacaattcacacgtaagtgtattatccaaataaaattgtacatattgtaaagtttatgttaaaaattaaatggtgatgatggtattaacacatggaaaacccattctggttatttttatgggaggatatttctgtagagagggcactatatttttttaatctcagttgtagggaggatgacagagcctaagtagaatatgggtgttggcgttcttggccccttctttaaaaaacaaaactctgggatgaggggtatagaatatattctgctcgcatttgcttctgaagacaatgccgatatggacttgtgtgtgatttccttaaacacatcaaagggcatagatttcctatttaaattccttatcctctttcctcacctgcactctttctgtgcccagcagtactttcagtatagtattagctagaagtgcctgcccagaagggtcttagaaaaatagagttcgtagaaccacaccaaaagttaggagaaggggaggagagatgagaaaaatgaagtttacaaatgggcagttgcctgtttaagatcatcaagttagagagtatcagagcgaggattagatccaagacatggttcaatttctggctcgattctctgaccgggctgacttatttctaggtttctttcaaggggaaactcctgagtagctctggaataagagccagagatccccataaggctgccctggtttttgttttgttttgttttttgtttttgccacttgccccagaaagacctacccatgcttctttgaatttggttttcctttaaactccctcacaatccctgtcttaaagttcctagaagagaaaacttttctcagagaccgtctccttaggaaaaatcaacagggatattgtttaaaacctcaaactgaagataaaaggctggcagtgaccattgaaataattgaggtctatgtatcatgcattgaggaagaaccaagcacattgaccagctaataggacttcactgaatgtccactttattttgaaagccagtttgggattgtgggggaggggatgcaaaataaatagaaaatatagtctcttcccataagtagcttatggtttagaagttcagttctctaatacaaaggataaccaaggacccatgcaatgcaaacagagactaaacagcaaaaattagaaatgacaactaaagttgtagccaggaaaaaaaaaataatctgattctatgagcataccttttttaaaaaaaaaaaaaaagtccttccctaaacctttaagtaactccggagaatagagttagtggtcccggaaatgcagttgatttattttaatcttcaaataatggacttaggagacccaggagctgctaaccaggtgaacacactcacactcctacatttttgcacaggaaggcttttgtctggttccaaccagttctccagtccttgccaaatcatgcctcctcccagccttgcattatgacatgtgcctcaagaaaaggttgaaaaaattccccaaaggattagaaaatagaccatgatgtaaaaagacgaagcatttccctaaagcttttttgtttggttttgtttttgacatttgaagaacccttctgatacaccagggtatgaatgtatcagggaagcatagagggaaaattctttatcaagttccaagtgcctactgctgtggctgacagaaagcatcaggttccctagagagaaaacggggcaaagagatggcaaaaggaatagaggtgtatttcaggaaggatggcgaggtggagagggagcttttgtcactctgtctatcccattctgtgcattcttggaatgttacattttctgcttatcgcaagtacttgccatggatctgcacctgaatttgaaaatatcaaaatatatctaaattgagtgtaggcgatattctaggcatatcctagaatgtgatcctcaaaacaaccttaagatataaatatgattgctcccattttacagataaggaaactgaggctcaggtttttctcaacctcgtcagcaactagaattagctagtaaatccctaacgttagacatattttcaaagtgcctggtctcctccagggaggtcagaatagaagtcagaaagagaggtgtgctcttttgaggttcctgggcatatacccttgagtatcagcctctgtgacagggaagtctgttagggtcttacccctcattgcctgatctgtgtgtatggagaacttctggggatctcacctctgttcatagttccttctgagacttgaacactgtttgtgtctccctttcatatgcttgcacttagcatttaaaaaaatttctggggagttattttctctacttagcatgtgcctaatcttaaatatctctttcctaatgtctcatctttttatcagtcaacatcagggctaattccattaaacatatatacatagtacatgctctcatgtgtgtgggtatgcacacacacacacacagccatgtgaccctccattaaagtcctcctaaatattgtgacccatgttcaaagaggtgatattatttgcaagttgactattcctcctatttcatgtctatgtttggttatctttgccaggcagatggaatgagtttcagaggtgggacagggaataggaaatagagtttctgcatgaatgatggagagctttggtagtcagaatgattgaggaccagctattaaaatgttgttgttgttttccttcttggtctgttcctttttttttttcttttccaaattgtcttagagataattcccggctcacttagcattaggataatgacggttattctgtcccactgaagagtgttgaactggaacgcttccaccgggctttataggtacccagaatggcctaatgtttaacatatcctgcaggcatgcccctgagcacacactgcctttcctgcattcccccctctccatggtctaagccacatttctttcctggcatttatatttactgagaggtgaggggtgcattaggcccatttgatggatgaggacactagcggggatttgaaggaatgtctttctgggagtctccatgaattctctggagagttagctaacttaatgcaagttaagtgctagtctatgagaaaaatttctcagctgttttcatctttcaagctggcagtaaaaagccttttaagacagaaagattattatttgttatttggagatcctgttgttgggtctacaagtgcgtgaccatgttctccttggaatgttgagctatgcagaaatggagcactccaaagaacgatttgaccaatagcatttcttctctgggggttgtatttcaaagcatgcaactctccagggaaccagaactaaattgcttaaaatgaagtcattcctcagattaacttcctcagataaagtgtcagcggtctgcagaaacgaagaagacaaaactgagattatcactcataattctcttacttactatgtcagtgaaacaatgagtttgcatttttgcaatcctagaacattcttcattagccctgggtcatgacctcttccagttaattctctttcacacctttaggaaagatttaagatgaaccttcaataggatattaacataactcatagccaataccacagctgcctttcaaattaatgaggttaattgttctccagcaaacatgagtttgtctttggcattttaaatgcttcccattgatctgacattttgctgtttcaagttttaaagggctcaaatcaaagactattgataactgagcaaagagcgaagatccagaaatacgaaaacattgtctttttttttccatgaaaaacaatcatagccttttgaattcaatcgaagtttctacattagccatctaagacttatttaattatttctgttctcagtcaagctaattcaagtgaatgaacagtattgacttttaaaatcttttttaaatttttttaaatctttagtttattaagtttgtagaaaagctctggggccatgaccacttacgtaaatgtttcagtttaaaaacaaaagattcaggcctctaatttgagccaaatccaggtgatcttgtttgaaatttttgatgaatttgaaaagatgaaagtggaacttttaacattcatgttccccaaatttttcactgggaagggatgctaattgcctacttaagatataagttcaagaataacattttcatagaaaattcagaaaactgcttgacacagcagtgacatagttagatgtggctcagatgccttccaaacctgagggtccccaaagatttctttaccagttgtttttaactatgaatcttaatcttgttcattcccctgccaaaacaaatttaaaagcataaacctgctgaattaattggcagaattcaccatagtttatatcaccccagaatgtttatgtgtatatgtttatgtatagtatatatatttcaagctgaatgttcagaaagaataaggtgagtttcttggtagcttgaataagaattagatcataaaaattataaataatggccttctcaaagaggataaatgattcatttttcactcacgtattaataatatgacttgttgcataatacacaagctggtcattgcctgcaagaaagttattgaattaagcagctatccaggtttatgtctgagtccatttttaacccaacaaggctaggattgaactccatatgcagagggtttctattcacagctacattcaaacagaatccaaaacccacatcagaactgacttgatgtcttgtatggtggagctgaaagcaagctgtctgctctaagcaatggtcttcatttgggaattaatgttcactgatcaactgcagcagtttatatctgtcatgttttaatccactgcatgaggaagtgctaataagtgtattaaatatttccaagcatagctacaaaattatatgtttgcttaacacctttctatgatagaggaagtatatactatggttgtcttcttgtagtatgtcttttaattttgttcaatgtgttatcaactgttttaaggaatggggattgaaattcgtgtgcaaactgatatgtatataactcctgaggcaacagaagtgcccggtcatatggtgtaaaaatgtaaatacaggaaaatttcatttttctaataaagataatttctgccaattgatatgaaaatgagaaa

SEQ ID NO: 12322 - DNA, 4395 bp, Homo sapiens
  source 1..4395: mol_type = unassigned DNA
atgggcagagtgggctattggaccctgctggtgctgccggcccttctggtctggcgcggtccggcgccgagcgcggcggcggagaagggtccccccgcgctaaatattgcggtgatgctgggtcacagccacgacgtgacagagcgcgaacttcgaacactgtggggccccgagcaggcggcggggctgcccctggacgtgaacgtggtagctctgctgatgaaccgcaccgaccccaagagcctcatcacgcacgtgtgcgacctcatgtccggggcacgcatccacggcctcgtgtttggggacgacacggaccaggaggccgtagcccagatgctggattttatctcctcccacaccttcgtccccatcttgggcattcatgggggcgcatctatgatcatggctgacaaggatccgacgtctaccttcttccagtttggagcgtccatccagcagcaagccacggtcatgctgaagatcatgcaggattatgactggcatgtcttctccctggtgaccactatcttccctggctacagggaattcatcagcttcgtcaagaccacagtggacaacagctttgtgggctgggacatgcagaatgtgatcacactggacacttcctttgaggatgcaaagacacaagtccagctgaagaagatccactcttctgtcatcttgctctactgttccaaagacgaggctgttctcattctgagtgaggcccgctcccttggcctcaccgggtatgatttcttctggattgtccccagcttggtctctgggaacacggagctcatcccaaaagagtttccatcgggactcatttctgtctcctacgatgactgggactacagcctggaggcgagagtgagggacggcattggcatcctaaccaccgctgcatcttctatgctggagaagttctcctacatccccgaggccaaggccagctgctacgggcagatggagaggccagaggtcccgatgcacaccttgcacccatttatggtcaatgttacatgggatggcaaagacttatccttcactgaggaaggctaccaggtgcaccccaggctggtggtgattgtgctgaacaaagaccgggaatgggaaaaggtgggcaagtgggagaaccatacgctgagcctgaggcacgccgtgtggcccaggtacaagtccttctccgactgtgagccggatgacaaccatctcagcatcgtcaccctggaggaggccccattcgtcatcgtggaagacatagaccccctgaccgagacgtgtgtgaggaacaccgtgccatgtcggaagttcgtcaaaatcaacaattcaaccaatgaggggatgaatgtgaagaaatgctgcaaggggttctgcattgatattctgaagaagctttccagaactgtgaagtttacttacgacctctatctggtgaccaatgggaagcatggcaagaaagttaacaatgtgtggaatggaatgatcggtgaagtggtctatcaacgggcagtcatggcagttggctcgctcaccatcaatgaggaacgttctgaagtggtggacttctctgtgccctttgtggaaacgggaatcagtgtcatggtttcaagaagtaatggcaccgtctcaccttctgcttttctagaaccattcagcgcctctgtctgggtgatgatgtttgtgatgctgctcattgtttctgccatagctgtttttgtctttgaatacttcagccctgttggatacaacagaaacttagccaaagggaaagcaccccatgggccttcttttacaattggaaaagctatatggcttctttggggcctggtgttcaataactccgtgcctgtccagaatcctaaagggaccaccagcaagatcatggtatctgtatgggccttcttcgctgtcatattcctggctagctacacagccaatctggctgccttcatgatccaagaggaatttgtggaccaagtgaccggcctcagtgacaaaaagtttcagagacctcatgactattccccaccttttcgatttgggacagtgcctaatggaagcacggagagaaacattcggaataactatccctacatgcatcagtacatgaccaaatttaatcagaaaggagtagaggacgccttggtcagcctgaaaacggggaagctggacgctttcatctacgatgccgcagtcttgaattacaaggctgggagggatgaaggctgcaagctggtgaccatcgggagtgggtacatctttgccaccaccggttatggaattgcccttcagaaaggctctccttggaagaggcagatcgacctggccttgcttcagtttgtgggtgatggtgagatggaggagctggagaccctgtggctcactgggatctgccacaacgagaagaacgaggtgatgagcagccagctggacattgacaacatggcgggcgtattctacatgctggctgccgccatggcccttagcctcatcaccttcatctgggagcacctcttctactggaagctgcgcttctgtttcacgggcgtgtgctccgaccggcctgggttgctcttctccatcagcaggggcatctacagctgcattcatggagtgcacattgaagaaaagaagaagtctccagacttcaatctgacgggatcccagagcaacatgttaaaactcctccggtcagccaaaaacatttccagcatgtccaacatgaactcctcaagaatggactcacccaaaagagctgctgacttcatccaaagaggttccctcatcatggacatggtttcagataaggggaatttgatgtactcagacaacaggtcctttcaggggaaagagagcatttttggagacaacatgaacgaactccaaacatttgtggccaaccggcagaaggataacctcaataactatgtattccagggacaacatcctcttactctcaatgagtccaaccctaacacggtggaggtggccgtgagcacagaatccaaagcgaactctagaccccggcagctgtggaagaaatccgtggattccatacgccaggattcactatcccagaatccagtctcccagagggatgaggcaacagcagagaataggacccactccctaaagagccctaggtatcttccagaagagatggcccactctgacatttcagaaacgtcaaatcgggccacgtgccacagggaacctgacaacagtaagaaccacaaaaccaaggacaactttaaaaggtcagtggcctccaaataccccaaggactgtagtgaggtcgagcgcacctacctgaaaaccaaatcaagctcccctagagacaagatctacactatagatggtgagaaggagcctggtttccacttagatccaccccagtttgttgaaaatgtgaccctgcccgagaacgtggacttcccggacccctaccaggatcccagtgaaaacttccgcaagggggactccacgctgccaatgaaccggaaccccttgcataatgaagaggggctttccaacaacgaccagtataaactctactccaagcacttcaccttgaaagacaagggttccccgcacagtgagaccagcgagcgataccggcagaactccacgcactgcagaagctgcctttccaacatgcccacctattcaggccacttcaccatgaggtcccccttcaagtgcgatgcctgcctgcggatggggaacctctatgacatcgatgaagaccagatgcttcaggagacaggtaacccagccaccggggagcaggtctaccagcaggactgggcacagaacaatgcccttcaattacaaaagaacaagctaaggattagccgtcagcattcctacgataacattgtcgacaaacctagggagctagaccttagcaggccctcccggagcataagcctcaaggacagggaacggcttctggagggaaatttttacggcagcctgtttagtgtcccctcaagcaaactctcggggaaaaaaagctcccttttcccccaaggtctggaggacagcaagaggagcaagtctctcttgccagaccacacctccgataaccctttcctccactcccacagggatgaccaacgcttggttattgggagatgcccctcggacccttacaaacactcgttgccatcccaggcggtgaatgacagctatcttcggtcgtccttgaggtcaacggcatcgtactgttccagggacagtcggggccacaatgatgtgtatatttcggagcatgttatgccttatgctgcaaataagaataatatgtactctacccccagggttttaaattcctgcagcaatagacgcgtgtacaagaaaatgcctagtatcgaatctgatgtttaa

SEQ ID NO: 12323 - DNA, 4734 bp, Homo sapiens
  source 1..4734: mol_type = unassigned DNA
agccctgctgcagagcctccggctgggatagccgccccccgtgggggcgatgcggacagcgcgggacagccaggggagcgcgctggggccgcagcatgcgggaacccgctaaacccggtggctgctgaggcggccgagatgctcgtgcgcgcagcgcgccccactgcatcctcgaccttctcgggctacagggaccgtcagtggcgactatgggcagagtgggctattggaccctgctggtgctgccggcccttctggtctggcgcggtccggcgccgagcgcggcggcggagaagggtccccccgcgctaaatattgcggtgatgctgggtcacagccacgacgtgacagagcgcgaacttcgaacactgtggggccccgagcaggcggcggggctgcccctggacgtgaacgtggtagctctgctgatgaaccgcaccgaccccaagagcctcatcacgcacgtgtgcgacctcatgtccggggcacgcatccacggcctcgtgtttggggacgacacggaccaggaggccgtagcccagatgctggattttatctcctcccacaccttcgtccccatcttgggcattcatgggggcgcatctatgatcatggctgacaaggatccgacgtctaccttcttccagtttggagcgtccatccagcagcaagccacggtcatgctgaagatcatgcaggattatgactggcatgtcttctccctggtgaccactatcttccctggctacagggaattcatcagcttcgtcaagaccacagtggacaacagctttgtgggctgggacatgcagaatgtgatcacactggacacttcctttgaggatgcaaagacacaagtccagctgaagaagatccactcttctgtcatcttgctctactgttccaaagacgaggctgttctcattctgagtgaggcccgctcccttggcctcaccgggtatgatttcttctggattgtccccagcttggtctctgggaacacggagctcatcccaaaagagtttccatcgggactcatttctgtctcctacgatgactgggactacagcctggaggcgagagtgagggacggcattggcatcctaaccaccgctgcatcttctatgctggagaagttctcctacatccccgaggccaaggccagctgctacgggcagatggagaggccagaggtcccgatgcacaccttgcacccatttatggtcaatgttacatgggatggcaaagacttatccttcactgaggaaggctaccaggtgcaccccaggctggtggtgattgtgctgaacaaagaccgggaatgggaaaaggtgggcaagtgggagaaccatacgctgagcctgaggcacgccgtgtggcccaggtacaagtccttctccgactgtgagccggatgacaaccatctcagcatcgtcaccctggaggaggccccattcgtcatcgtggaagacatagaccccctgaccgagacgtgtgtgaggaacaccgtgccatgtcggaagttcgtcaaaatcaacaattcaaccaatgaggggatgaatgtgaagaaatgctgcaaggggttctgcattgatattctgaagaagctttccagaactgtgaagtttacttacgacctctatctggtgaccaatgggaagcatggcaagaaagttaacaatgtgtggaatggaatgatcggtgaagtggtctatcaacgggcagtcatggcagttggctcgctcaccatcaatgaggaacgttctgaagtggtggacttctctgtgccctttgtggaaacgggaatcagtgtcatggtttcaagaagtaatggcaccgtctcaccttctgcttttctagaaccattcagcgcctctgtctgggtgatgatgtttgtgatgctgctcattgtttctgccatagctgtttttgtctttgaatacttcagccctgttggatacaacagaaacttagccaaagggaaagcaccccatgggccttcttttacaattggaaaagctatatggcttctttggggcctggtgttcaataactccgtgcctgtccagaatcctaaagggaccaccagcaagatcatggtatctgtatgggccttcttcgctgtcatattcctggctagctacacagccaatctggctgccttcatgatccaagaggaatttgtggaccaagtgaccggcctcagtgacaaaaagtttcagagacctcatgactattccccaccttttcgatttgggacagtgcctaatggaagcacggagagaaacattcggaataactatccctacatgcatcagtacatgaccaaatttaatcagaaaggagtagaggacgccttggtcagcctgaaaacggggaagctggacgctttcatctacgatgccgcagtcttgaattacaaggctgggagggatgaaggctgcaagctggtgaccatcgggagtgggtacatctttgccaccaccggttatggaattgcccttcagaaaggctctccttggaagaggcagatcgacctggccttgcttcagtttgtgggtgatggtgagatggaggagctggagaccctgtggctcactgggatctgccacaacgagaagaacgaggtgatgagcagccagctggacattgacaacatggcgggcgtattctacatgctggctgccgccatggcccttagcctcatcaccttcatctgggagcacctcttctactggaagctgcgcttctgtttcacgggcgtgtgctccgaccggcctgggttgctcttctccatcagcaggggcatctacagctgcattcatggagtgcacattgaagaaaagaagaagtctccagacttcaatctgacgggatcccagagcaacatgttaaaactcctccggtcagccaaaaacatttccagcatgtccaacatgaactcctcaagaatggactcacccaaaagagctgctgacttcatccaaagaggttccctcatcatggacatggtttcagataaggggaatttgatgtactcagacaacaggtcctttcaggggaaagagagcatttttggagacaacatgaacgaactccaaacatttgtggccaaccggcagaaggataacctcaataactatgtattccagggacaacatcctcttactctcaatgagtccaaccctaacacggtggaggtggccgtgagcacagaatccaaagcgaactctagaccccggcagctgtggaagaaatccgtggattccatacgccaggattcactatcccagaatccagtctcccagagggatgaggcaacagcagagaataggacccactccctaaagagccctaggtatcttccagaagagatggcccactctgacatttcagaaacgtcaaatcgggccacgtgccacagggaacctgacaacagtaagaaccacaaaaccaaggacaactttaaaaggtcagtggcctccaaataccccaaggactgtagtgaggtcgagcgcacctacctgaaaaccaaatcaagctcccctagagacaagatctacactatagatggtgagaaggagcctggtttccacttagatccaccccagtttgttgaaaatgtgaccctgcccgagaacgtggacttcccggacccctaccaggatcccagtgaaaacttccgcaagggggactccacgctgccaatgaaccggaaccccttgcataatgaagaggggctttccaacaacgaccagtataaactctactccaagcacttcaccttgaaagacaagggttccccgcacagtgagaccagcgagcgataccggcagaactccacgcactgcagaagctgcctttccaacatgcccacctattcaggccacttcaccatgaggtcccccttcaagtgcgatgcctgcctgcggatggggaacctctatgacatcgatgaagaccagatgcttcaggagacagggatgaccaacgcttggttattgggagatgcccctcggacccttacaaacactcgttgccatcccaggcggtgaatgacagctatcttcggtcgtccttgaggtcaacggcatcgtactgttccagggacagtcggggccacaatgatgtgtatatttcggagcatgttatgccttatgctgcaaataagaataatatgtactctacccccagggttttaaattcctgcagcaatagacgcgtgtacaagaaaatgcctagtatcgaatctgatgtttaaaaatcttccattaatgttttatctatagggaaatatacgtaatggccaatgttctggagggtaaatgttggatgtccaatagtgccctgctaagaggaagaagatgtagggaggtattttgttgttgttgttgttggctcttttgcacacggcttcatgccataatcttccactcaaggaatcttgtgaggtgtgtgctgagcatggcagacaccagataggtgagtccttaaccaaaaataactaactacataagggcaagtctccgggacatgcctactgggtatgttggcaataatgatgcattggatgccaatggtgatgttatgatttcctatattccaaattccattaaggtcagcccaccatgtaattttctcatcagaaatgcctaatggtttctctaatacagaataagcaatatggtgtgcatgtaaacctgacacagacaaaataaaaacagttaagaatgc

SEQ ID NO: 12324 - DNA, 4164 bp, Homo sapiens
  source 1..4164: mol_type = unassigned DNA
atatatccaatatttctcctgttgagagtttaccagcctgtaattttcttaaggatccgacgtctaccttcttccagtttggagcgtccatccagcagcaagccacggtcatgctgaagatcatgcaggattatgactggcatgtcttctccctggtgaccactatcttccctggctacagggaattcatcagcttcgtcaagaccacagtggacaacagctttgtgggctgggacatgcagaatgtgatcacactggacacttcctttgaggatgcaaagacacaagtccagctgaagaagatccactcttctgtcatcttgctctactgttccaaagacgaggctgttctcattctgagtgaggcccgctcccttggcctcaccgggtatgatttcttctggattgtccccagcttggtctctgggaacacggagctcatcccaaaagagtttccatcgggactcatttctgtctcctacgatgactgggactacagcctggaggcgagagtgagggacggcattggcatcctaaccaccgctgcatcttctatgctggagaagttctcctacatccccgaggccaaggccagctgctacgggcagatggagaggccagaggtcccgatgcacaccttgcacccatttatggtcaatgttacatgggatggcaaagacttatccttcactgaggaaggctaccaggtgcaccccaggctggtggtgattgtgctgaacaaagaccgggaatgggaaaaggtgggcaagtgggagaaccatacgctgagcctgaggcacgccgtgtggcccaggtacaagtccttctccgactgtgagccggatgacaaccatctcagcatcgtcaccctggaggaggccccattcgtcatcgtggaagacatagaccccctgaccgagacgtgtgtgaggaacaccgtgccatgtcggaagttcgtcaaaatcaacaattcaaccaatgaggggatgaatgtgaagaaatgctgcaaggggttctgcattgatattctgaagaagctttccagaactgtgaagtttacttacgacctctatctggtgaccaatgggaagcatggcaagaaagttaacaatgtgtggaatggaatgatcggtgaagtggtctatcaacgggcagtcatggcagttggctcgctcaccatcaatgaggaacgttctgaagtggtggacttctctgtgccctttgtggaaacgggaatcagtgtcatggtttcaagaagtaatggcaccgtctcaccttctgcttttctagaaccattcagcgcctctgtctgggtgatgatgtttgtgatgctgctcattgtttctgccatagctgtttttgtctttgaatacttcagccctgttggatacaacagaaacttagccaaagggaaagcaccccatgggccttcttttacaattggaaaagctatatggcttctttggggcctggtgttcaataactccgtgcctgtccagaatcctaaagggaccaccagcaagatcatggtatctgtatgggccttcttcgctgtcatattcctggctagctacacagccaatctggctgccttcatgatccaagaggaatttgtggaccaagtgaccggcctcagtgacaaaaagtttcagagacctcatgactattccccaccttttcgatttgggacagtgcctaatggaagcacggagagaaacattcggaataactatccctacatgcatcagtacatgaccaaatttaatcagaaaggagtagaggacgccttggtcagcctgaaaacggggaagctggacgctttcatctacgatgccgcagtcttgaattacaaggctgggagggatgaaggctgcaagctggtgaccatcgggagtgggtacatctttgccaccaccggttatggaattgcccttcagaaaggctctccttggaagaggcagatcgacctggccttgcttcagtttgtgggtgatggtgagatggaggagctggagaccctgtggctcactgggatctgccacaacgagaagaacgaggtgatgagcagccagctggacattgacaacatggcgggcgtattctacatgctggctgccgccatggcccttagcctcatcaccttcatctgggagcacctcttctactggaagctgcgcttctgtttcacgggcgtgtgctccgaccggcctgggttgctcttctccatcagcaggggcatctacagctgcattcatggagtgcacattgaagaaaagaagaagtctccagacttcaatctgacgggatcccagagcaacatgttaaaactcctccggtcagccaaaaacatttccagcatgtccaacatgaactcctcaagaatggactcacccaaaagagctgctgacttcatccaaagaggttccctcatcatggacatggtttcagataaggggaatttgatgtactcagacaacaggtcctttcaggggaaagagagcatttttggagacaacatgaacgaactccaaacatttgtggccaaccggcagaaggataacctcaataactatgtattccagggacaacatcctcttactctcaatgagtccaaccctaacacggtggaggtggccgtgagcacagaatccaaagcgaactctagaccccggcagctgtggaagaaatccgtggattccatacgccaggattcactatcccagaatccagtctcccagagggatgaggcaacagcagagaataggacccactccctaaagagccctaggtatcttccagaagagatggcccactctgacatttcagaaacgtcaaatcgggccacgtgccacagggaacctgacaacagtaagaaccacaaaaccaaggacaactttaaaaggtcagtggcctccaaataccccaaggactgtagtgaggtcgagcgcacctacctgaaaaccaaatcaagctcccctagagacaagatctacactatagatggtgagaaggagcctggtttccacttagatccaccccagtttgttgaaaatgtgaccctgcccgagaacgtggacttcccggacccctaccaggatcccagtgaaaacttccgcaagggggactccacgctgccaatgaaccggaaccccttgcataatgaagaggggctttccaacaacgaccagtataaactctactccaagcacttcaccttgaaagacaagggttccccgcacagtgagaccagcgagcgataccggcagaactccacgcactgcagaagctgcctttccaacatgcccacctattcaggccacttcaccatgaggtcccccttcaagtgcgatgcctgcctgcggatggggaacctctatgacatcgatgaagaccagatgcttcaggagacagggatgaccaacgcttggttattgggagatgcccctcggacccttacaaacactcgttgccatcccaggcggtgaatgacagctatcttcggtcgtccttgaggtcaacggcatcgtactgttccagggacagtcggggccacaatgatgtgtatatttcggagcatgttatgccttatgctgcaaataagaataatatgtactctacccccagggttttaaattcctgcagcaatagacgcgtgtacaagaaaatgcctagtatcgaatctgatgtttaaaaatcttccattaatgttttatctatagggaaatatacgtaatggccaatgttctggagggtaaatgttggatgtccaatagtgccctgctaagaggaagaagatgtagggaggtattttgttgttgttgttgttggctcttttgcacacggcttcatgccataatcttccactcaaggaatcttgtgaggtgtgtgctgagcatggcagacaccagataggtgagtccttaaccaaaaataactaactacataagggcaagtctccgggacatgcctactgggtatgttggcaataatgatgcattggatgccaatggtgatgttatgatttcctatattccaaattccattaaggtcagcccaccatgtaattttctcatcagaaatgcctaatggtttctctaatacagaataagcaatatggtgtgcatgtaaacctgacacagacaaaataaaaacagttaagaatgc

SEQ ID NO: 12325 - DNA, 6238 bp, Homo sapiens
  source 1..6238: mol_type = unassigned DNA
tttgaatttgcatctcttcaagacacaagattaaaacaaaatttacgctaaattggattttaaattatcttccgttcatttatccttcgtctttcttatgtggatatgcaagcgagaagaagggactggacattcccaacatgctcactcccttaatctgtccgtctagaggtttggcttctacaaaccaagggagtcgacgagttgaagatgaagcccagagcggagtgctgttctcccaagttctggttggtgttggccgtcctggccgtgtcaggcagcagagctcgttctcagaagagcccccccagcattggcattgctgtcatcctcgtgggcacttccgacgaggtggccatcaaggatgcccacgagaaagatgatttccaccatctctccgtggtaccccgggtggaactggtagccatgaatgagaccgacccaaagagcatcatcacccgcatctgtgatctcatgtctgaccggaagatccagggggtggtgtttgctgatgacacagaccaggaagccatcgcccagatcctcgatttcatttcagcacagactctcacccccatcctgggcatccacgggggctcctctatgataatggcagataaggatgaatcctccatgttcttccagtttggcccatcaattgaacagcaagcttccgtaatgctcaacatcatggaagaatatgactggtacatcttttctatcgtcaccacctatttccctggctaccaggactttgtaaacaagatccgcagcaccattgagaatagctttgtgggctgggagctagaggaggtcctcctactggacatgtccctggacgatggagattctaagatccagaatcagctcaagaaacttcaaagccccatcattcttctttactgtaccaaggaagaagccacctacatctttgaagtggccaactcagtagggctgactggctatggctacacgtggatcgtgcccagtctggtggcaggggatacagacacagtgcctgcggagttccccactgggctcatctctgtatcatatgatgaatgggactatggcctccccgccagagtgagagatggaattgccataatcaccactgctgcttctgacatgctgtctgagcacagcttcatccctgagcccaaaagcagttgttacaacacccacgagaagagaatctaccagtccaatatgctaaataggtatctgatcaatgtcacttttgaggggaggaatttgtccttcagtgaagatggctaccagatgcacccgaaactggtgataattcttctgaacaaggagaggaagtgggaaagggtggggaagtggaaagacaagtccctgcagatgaagtactatgtgtggccccgaatgtgtccagagactgaagagcaggaggatgaccatctgagcattgtgaccctggaggaggcaccatttgtcattgtggaaagtgtggaccctctgagtggaacctgcatgaggaacacagtcccctgccaaaaacgcatagtcactgagaataaaacagacgaggagccgggttacatcaaaaaatgctgcaaggggttctgtattgacatccttaagaaaatttctaaatctgtgaagttcacctatgacctttacctggttaccaatggcaagcatgggaagaaaatcaatggaacctggaatggtatgattggagaggtggtcatgaagagggcctacatggcagtgggctcactcaccatcaatgaggaacgatcggaggtggtcgacttctctgtgcccttcatagagacaggcatcagtgtcatggtgtcacgcagcaatgggactgtctcaccttctgccttcttagagccattcagcgctgacgtatgggtgatgatgtttgtgatgctgctcatcgtctcagccgtggctgtctttgtctttgagtacttcagccctgtgggttataacaggtgcctcgctgatggcagagagcctggtggaccctctttcaccatcggcaaagctatttggttgctctggggtctggtgtttaacaactccgtacctgtgcagaacccaaaggggaccacctccaagatcatggtgtcagtgtgggccttctttgctgtcatcttcctggccagctacactgccaacttagctgccttcatgatccaagaggaatatgtggaccaggtttctggcctgagcgacaaaaagttccagagacctaatgacttctcaccccctttccgctttgggaccgtgcccaacggcagcacagagagaaatattcgcaataactatgcagaaatgcatgcctacatgggaaagttcaaccagaggggtgtagatgatgcattgctctccctgaaaacagggaaactggatgccttcatctatgatgcagcagtgctgaactatatggcaggcagagatgaaggctgcaagctggtgaccattggcagtgggaaggtctttgcttccactggctatggcattgccatccaaaaagattctgggtggaagcgccaggtggaccttgctatcctgcagctctttggagatggggagatggaagaactggaagctctctggctcactggcatttgtcacaatgagaagaatgaggtcatgagcagccagctggacattgacaacatggcaggggtcttctacatgttgggggcggccatggctctcagcctcatcaccttcatctgcgaacaccttttctattggcagttccgacattgctttatgggtgtctgttctggcaagcctggcatggtcttctccatcagcagaggtatctacagctgcatccatggggtggcgatcgaggagcgccagtctgtaatgaactcccccaccgcaaccatgaacaacacacactccaacatcctgcgcctgctgcgcacggccaagaacatggctaacctgtctggtgtgaatggctcaccgcagagcgccctggacttcatccgacgggagtcatccgtctatgacatctcagagcaccgccgcagcttcacgcattctgactgcaaatcctacaacaacccgccctgtgaggagaacctcttcagtgactacatcagtgaggtagagagaacgttcgggaacctgcagctgaaggacagcaacgtgtaccaagatcactaccaccatcaccaccggccccatagtattggcagtgccagctccatcgatgggctctacgactgtgacaacccacccttcaccacccagtccaggtccatcagcaagaagcccctggacatcggcctcccctcctccaagcacagccagctcagtgacctgtacggcaaattctccttcaagagcgaccgctacagtggccacgacgacttgatccgctccgatgtctctgacatctcaacccacaccgtcacctatgggaacatcgagggcaatgccgccaagaggcgtaagcagcaatataaggacagcctgaagaagcggcctgcctcggccaagtcccgcagggagtttgacgagatcgagctggcctaccgtcgccgaccgccccgctcccctgaccacaagcgctacttcagggacaaggaagggctacgggacttctacctggaccagttccgaacaaaggagaactcaccccactgggagcacgtagacctgaccgacatctacaaggagcggagtgatgactttaagcgcgactccgtcagcggaggagggccctgtaccaacaggtctcacatcaagcacgggacgggcgacaaacacggcgtggtcagcggggtacctgcaccttgggagaagaacctgaccaacgtggagtgggaggaccggtccgggggcaacttctgccgcagctgtccctccaagctgcacaactactccacgacggtgacgggtcagaactcgggcaggcaggcgtgcatccggtgtgaggcttgcaagaaagcaggcaacctgtatgacatcagtgaggacaactccctgcaggaactggaccagccggctgccccagtggcggtgacgtcaaacgcctccaccactaagtaccctcagagcccgactaattccaaggcccagaagaagaaccggaacaaactgcgccggcagcactcctacgacaccttcgtggacctgcagaaggaagaagccgccctggccccgcgcagcgtaagcctgaaagacaagggccgattcatggatgggagcccctacgcccacatgtttgagatgtcagctggcgagagcacctttgccaacaacaagtcctcagtgcccactgccggacatcaccaccacaacaaccccggcggcgggtacatgctcagcaagtcgctctaccctgaccgggtcacgcaaaaccctttcatccccacttttggggacgaccagtgcttgctccatggcagcaaatcctacttcttcaggcagcccacggtggcgggggcgtcgaaagccaggccggacttccgggcccttgtcaccaacaagccggtggtctcggcccttcatggggccgtgccagcccgtttccagaaggacatctgtatagggaaccagtccaacccctgtgtgcctaacaacaaaaaccccagggctttcaatggctccagcaatgggcatgtttatgagaaactttctagtattgagtctgatgtctgagtgagggaacagagaggttaaggtgggtacgggagggtaaggctgtgggtcgcgtgatgcgcatgtcacggagggtgacgggggtgaacttggttcccatttgctcctttcttgttttaatttatttatgggatcctggagttctggttcctactgggggcaaccctggtgaccagcaccatctctcctccttttcacagttctctccttcttccccccgctgtcagccattcctgttcccatgagatgatgccatgggccctctcagcaggggagggtagagcggagaaaggaagggctgcatgcgggcttcctcctggtgtggaagagctccttgatatcctctttgagtgaagctgggagaaccaaaaagaggctatgtgagcacaaaggtagcttttcccaaactgatcttttcatttaggtgaggaagcaaaagcatctatgtgagaccatttagcacactgcttgtgaaaggaaagaggctctggctaaattcatgctgcttagatgacatctgtctaggaatcatgtgccaagcagaggttgggaggccatttgtgtttatatataagccaaaaaatgcttgcttcaaccccatgagactcgatagtggtggtgaacagaacaaaaggtcattggtggcagagtggattcttgaacaaactggaaagtacgttatgatagtgtcccacggtgccttggggacaagagcaggtggattgtgcgtgcatgtgtgttcatgcacacttgcacccatgtgtagtcaggtgcctcaagagaaggcaaccttgactctttctattgtttctttcaatatccccaagcagtgtgattgtttggcttatatacagacagagatggccatgtattacctgaattttggctgtgtctcccttcatccttctggaataaggagaatgaaaattcttgataaagaagattctgtggtctaaacaaaaaaaggcggtgagcaatcctgcaagaacaaggtacataaacaagtcctcagtggttggcaattgtttcaaccagtttgaaccaagaactttccaggaaggctaaagggaaaccgaattttcacagccatgattcttttgcccacacttgggagcaaaagattctacaaagctcttttgagcatttagactctcgactggccaaggtttggggaagaacgaagccacctttgaagaagtaaggagtcgtgtatggtagggtaagtgagagagggggatgtttccaatgctttgatcccttcttacttaacctgaagctagacgagcaggcttcttccccccaaaactgattacaactgctacagagcagacagttaagagaaatgagcttgacctttaagagaaatgagctgcactccatgagtgcagctctggaggtacgaaaagaggggaagagacttggaaatgggagacgggggcagagagggaccctccaccacctctttgggcctggctccctgggaatgtgacttgagcccagagtgaacactcttggtagaagcccttctaccttcctgcaacaccttgtttccctctcagattgtaccattgag

SEQ ID NO: 12326 - DNA, 4261 bp, Homo sapiens
  source 1..4261: mol_type = unassigned DNA
tgtccttgagccgcgggtgacggtggctctcgctgctcgcgccccctcctcccgcggggggagcctgatgccacgttccctatgaattatttatcgccggcctaaaaataccccgaacttcacagcccgagtgaccctccggtggacatgggtggggccctggggccggccctgttgctcacctcgctcttcggtgcctgggcagggctgggtccggggcagggcgagcagggcatgacggtggctgtggtgtttagcagctcagggccgccccaggcccagttccgtgcccgcctcaccccccagagcttcctggacctacccctggagatccagccgctcacagttggggtcaacaccaccaaccccagcagcctcctcacccagatctgcggcctcctgggtgctgcccacgtccacggcattgtctttgaggacaacgtggacaccgaggcggtggcccagatccttgacttcatctcctcccagacccatgtgcccatcctcagcatcagcggaggctctgctgtggtcctcacccccaaggagccgggctccgccttcctgcagctgggcgtgtccctggagcagcagctgcaggtgctgttcaaggtgctggaagagtacgactggagcgccttcgccgtcatcaccagcctgcacccgggccacgcgctcttcctggagggcgtgcgcgccgtcgccgacgccagccacgtgagttggcggctgctggacgtggtcacgctggagctgggcccgggagggccgcgcgcgcgcacgcagcgcctgctgcgccagctcgacgcgcccgtgtttgtggcctactgctcgcgcgaggaggccgaggtgctcttcgccgaggcggcgcaggccggtctggtggggcccggccacgtgtggctggtgcccaacctggcgctgggcagcaccgatgcgccccccgccaccttccccgtgggcctcatcagcgtcgtcaccgagagctggcgcctcagcctgcgccagaaggtgcgcgacggcgtggccattctggccctgggcgcccacagctactggcgccagcatggaaccctgccagccccggccggggactgccgtgttcaccctgggcccgtcagccctgcccgggaggccttctacaggcacctactgaatgtcacctgggagggccgagacttctccttcagccctggtgggtacctggtccagcccaccatggtggtgatcgccctcaaccggcaccgcctctgggagatggtggggcgctgggagcatggcgtcctatacatgaagtaccccgtgtggcctcgctacagtgcctctctgcagcctgtggtggacagtcggcacctgacggtggccacgctggaagagcggccctttgtcatcgtggagagccctgaccctggcacaggaggctgtgtccccaacaccgtgccctgccgcaggcagagcaaccacaccttcagcagcggggacgtggccccctacaccaagctctgctgtaagggattctgcatcgacatcctcaagaagctggccagagtggtcaaattctcctacgacctgtacctggtgaccaacggcaagcatggcaagcgggtgcgcggcgtatggaacggcatgattggggaggtgtactacaagcgggcagacatggccatcggctccctcaccatcaatgaggaacgctccgagatcgtagacttctctgtaccctttgtggagacgggcatcagtgtgatggtggctcgcagcaatggcaccgtctccccctcggccttcttggagccatatagccctgcagtgtgggtgatgatgtttgtcatgtgcctcactgtggtggccatcaccgtcttcatgttcgagtacttcagccctgtcagctacaaccagaacctcaccagaggcaagaagtccgggggcccagctttcactatcggcaagtccgtgtggctgctgtgggcgctggtcttcaacaactcagtgcccatcgagaacccgcggggcaccaccagcaagatcatggttctggtctgggccttctttgctgtcatcttcctcgccagctacacggccaacctggccgccttcatgatccaagagcaatacatcgacactgtgtcgggcctcagtgacaagaagtttcagcggcctcaagatcagtacccacctttccgcttcggcacggtgcccaacggcagcacggagcggaacatccgcagtaactaccgtgacatgcacacccacatggtcaagttcaaccagcgctcggtggaggacgcgctcaccagcctcaagatggggaagctggatgccttcatctatgatgctgctgtcctcaactacatggcaggcaaggacgagggctgcaagctggtcaccattgggtctggcaaggtctttgctaccactggctacggcatcgccatgcagaaggactcccactggaagcgggccatagacctggcgctcttgcagttcctgggggacggagagacacagaaactggagacagtgtggctctcagggatctgccagaatgagaagaacgaggtgatgagcagcaagctggacatcgacaacatggcaggcgtcttctacatgctgctggtggccatggggctggccctgctggtcttcgcctgggagcacctggtctactggaagctgcgccactcggtgcccaactcatcccagctggacttcctgctggctttcagcaggggcatctacagctgcttcagcggggtgcagagcctcgccagcccaccgcggcaggccagcccggacctcacggccagctcggcccaggccagcgtgctcaagatgctgcaggcagcccgcgacatggtgaccacggcgggcgtaagcagctccctggaccgcgccactcgcaccatcgagaattggggtggcggccgccgtgcgcccccaccgtccccctgcccgaccccgcggtctggccccagcccatgcctgcccacccccgacccgcccccagagccgagccccacgggctggggaccgccagacgggggtcgcgcggcgcttgtgcgcagggctccgcagcccccgggccgccccccgacgccggggccgcccctgtccgacgtctcccgagtgtcgcgccgcccagcctgggaggcgcggtggccggtgcggaccgggcactgcgggaggcacctctcggcctccgagcggcccctgtcgcccgcgcgctgtcactacagctcctttcctcgagccgaccgatccggccgccccttcctcccgctcttcccggagctggaggacctgccgctgctcggtccggagcagctggcccggcgggaggccctgctgcacgcggcctgggcccggggctcgcgcccgcgtcacgcttccctgcccagctccgtggccgaggccttcgctcggcccagctcgctgcccgctgggtgcaccggccccgcctgcgcccgccccgacggccactcggcctgcaggcgcttggcgcaggcgcagtcgatgtgcttgccgatctaccgggaggcctgccaggagggcgagcaggcaggggcccccgcctggcagcacagacagcacgtctgcctgcacgcccacgcccacctgccattttgctggggggctgtctgtcctcaccttccaccctgtgccagccacggctcctggctctccggggcctgggggcctctggggcacaggggcaggactctggggctgggcacaggctacagagacagtgggggactggacgagatcagcagggtagcccgtgggacgcaaggcttcccgggaccctgcacctggagacggatctccagtctggagtcagaagtgtgagttatcagccactcaggctccgagccagctggattctctgcctgccactgtcagggttaagcggcaggcaggattgggcttttctggcttctgccatgaaatcctggccatgggaccccagtgacagatgatgtcttccatggtcatcagtgacctcagtagcctcaaatcatggtgagggctgggcttttgctgtcctcttctcacgcagagttctgccaggagggtgtgctgtgggggtcagactcctgaggctctcccttccctggggctagccagttactggtcatggctgctgtgggcatggaggctggaacttgtggttgaggcagggccatcccgatccttgctctacctggctagagtttcttctcatcagagcactgggacattaaaccaaccttttacaaca

SEQ ID NO: 12327 - DNA, 3032 bp, Homo sapiens
  source 1..3032: mol_type = unassigned DNA
gcgagtcccgcttcttccccttccagctctgccccatctcctttgccccagcctagctctctccttcctgcgacctgggagaatcggagtgggcttccagagtagtggcatcttgcagatgctggcccgtgcccggctcccgggcttccagagcgcaaagggaagggtaggcagagagggcactgggcgagcaagacctggcgctgggccctggctgcgcaccagccgcctgcgccggtctctgggggcttcgcccaggatccccgacggcggggaggggaagccccgagtctcctgtttcctgcctacgcgggcagggcggggacacgcggagcaaaggcacccggcaacctgaacccccaggtgcgtcccgcgaccctgcaaggagctgctgggaccctccggtggacatgggtggggccctggggccggccctgttgctcacctcgctcttcggtgcctgggcagggctgggtccggggcagggcgagcagggcatgacggtggctgtggtgtttagcagctcagggccgccccaggcccagttccgtgcccgcctcaccccccagagcttcctggacctacccctggagatccagccgctcacagttggggtcaacaccaccaaccccagcagcctcctcacccagatctgcggcctcctgggtgctgcccacgtccacggcattgtctttgaggacaacgtggacaccgaggcggtggcccagatccttgacttcatctcctcccagacccatgtgcccatcctcagcatcagcggaggctctgctgtggtcctcacccccaaggagccgggctccgccttcctgcagctgggcgtgtccctggagcagcagctgcaggtgctgttcaaggtgctggaagagtacgactggagcgccttcgccgtcatcaccagcctgcacccgggccacgcgctcttcctggagggcgtgcgcgccgtcgccgacgccagccacgtgagttggcggctgctggacgtggtcacgctggagctgggcccgggagggccgcgcgcgcgcacgcagcgcctgctgcgccagctcgacgcgcccgtgtttgtggcctactgctcgcgcgaggaggccgaggtgctcttcgccgaggcggcgcaggccggtctggtggggcccggccacgtgtggctggtgcccaacctggcgctgggcagcaccgatgcgccccccgccaccttccccgtgggcctcatcagcgtcgtcaccgagagctggcgcctcagcctgcgccagaaggtgcgcgacggcgtggccattctggccctgggcgcccacagctactggcgccagcatggaaccctgccagccccggccggggactgccgtgttcaccctgggcccgtcagccctgcccgggaggccttctacaggcacctactgaatgtcacctgggagggccgagacttctccttcagccctggtgggtacctggtccagcccaccatggtggtgatcgccctcaaccggcaccgcctctgggagatggtggggcgctgggagcatggcgtcctatacatgaagtaccccgtgtggcctcgctacagtgcctctctgcagcctgtggtggacagtcggcacctgacggtggccacgctggaagagcggccctttgtcatcgtggagagccctgaccctggcacaggaggctgtgtccccaacaccgtgccctgccgcaggcagagcaaccacaccttcagcagcggggacgtggccccctacaccaagctctgctgtaagggattctgcatcgacatcctcaagaagctggccagagtggtcaaattctcctacgacctgtacctggtgaccaacggcaagcatggcaagcgggtgcgcggcgtatggaacggcatgattggggaggtgtactacaagcgggcagacatggccatcggctccctcaccatcaatgaggaacgctccgagatcgtagacttctctgtaccctttgtggagacgggcatcagtgtgatggtggctcgcagcaatggcaccgtctccccctcggccttcttggagccatatagccctgcagtgtgggtgatgatgtttgtcatgtgcctcactgtggtggccatcaccgtcttcatgttcgagtacttcagccctgtcagctacaaccagaacctcaccagaggcaagaagtccgggggcccagctttcactatcggcaagtccgtgtggctgctgtgggcgctggtcttcaacaactcagtgcccatcgagaacccgcggggcaccaccagcaagatcatggttctggtctgggccttctttgctgtcatcttcctcgccagctacacggccaacctggccgccttcatgatccaagagcaatacatcgacactgtgtcgggcctcagtgacaagaagtttcagcggcctcaagatcagtacccacctttccgcttcggcacggtgcccaacggcagcacggagcggaacatccgcagtaactaccgtgacatgcacacccacatggtcaagttcaaccagcgctcggtggaggacgcgctcaccagcctcaagatggggaagctggatgccttcatctatgatgctgctgtcctcaactacatggcaggcaaggacgagggctgcaagctggtcaccattgggtctggcaaggtctttgctaccactggctacggcatcgccatgcagaaggactcccactggaagcgggccatagacctggcgctcttgcagttcctgggggacggagagacacagaaactggagacagtgtggctctcagggatctgccagaatgagaagaacgaggtgatgagcagcaagctggacatcgacaacatggcaggcgtcttctacatgctgctggtggccatggggctggccctgctggtcttcgcctgggagcacctggtctactggaagctgcgccactcggtgcccaactcatcccagctggacttcctgctggctttcagcagggtgggtgcccacccctccccacacaggccaaagttttaa

SEQ ID NO: 12328 - DNA, 5092 bp, Homo sapiens
  source 1..5092: mol_type = unassigned DNA
ggacgccgggttccggtcctggcccccccgccatccccccaacagaacagggtcatgaaaagaggccgcccggcggggcccgcaggcgatgcgcggcgccggtggcccccgcggccctcggggccccgctaagatgctgctgctgctggcgctggcctgcgccagcccgttcccggaggaggcgccggggccgggcggggccggtgggcccggcggcggcctcggcggggcgcggccgctcaacgtggcgctcgtgttctcggggcccgcgtacgcggccgaggcggcacgcctgggcccggccgtggcggcggcggtgcgcagcccgggcctagacgtgcggcccgtggcgctggtgctcaacggctcggacccgcgcagcctcgtgctgcagctctgcgacctgctgtcggggttgcgcgtgcacggcgtggtcttcgaagacgactcgcgcgcgcccgccgtcgcgcccatcctcgacttcctgtcggcgcagacctcgctgcccatcgtggccgtgcacggcggcgccgcgctcgtgctcacgcccaaggagaagggctccaccttcctgcagctgggctcttccaccgagcaacagcttcaggtcatctttgaggtgctggaggagtatgactggacgtcctttgtagccgtgaccactcgtgcccctggccaccgggccttcctgtcctacattgaggtgctgactgacggtagtctggtgggctgggagcaccgcggagcgctgacgctggaccctggggcgggcgaggccgtgctcagtgcccagctccgcagtgtcagcgcgcagatccgcctgctcttctgcgcccgagaggaggccgagcccgtgttccgcgcagctgaggaggctggcctcactggatctggctacgtctggttcatggtggggccccagctggctggaggcgggggctctggggcccctggtgagccccctcttctgccaggaggcgcccccctgcctgccgggctgtttgcagtgcgctcggctggctggcgggatgacctggctcggcgagtggcagctggcgtggccgtagtggccagaggtgcccaggccctgctgcgtgattatggtttccttcctgagctcggccacgactgtcgcgcccagaaccgcacccaccgcggcgagagtctgcataggtacttcatgaacatcacgtgggataaccgggattactccttcaatgaggacggcttcctagtgaacccctccctggtggtcatctccctcaccagagacaggacgtgggaggtggtgggcagctgggagcagcagacgctccgcctcaagtacccgctgtggtcccgctatggtcgcttcctgcagccagtggacgacacgcagcacctcacggtggccacgctggaggaaaggccgtttgtcatcgtggagcctgcagaccctatcagcggcacctgcatccgagactccgtcccctgccggagccagctcaaccgaacccacagccctccaccggatgccccccgcccggaaaagcgctgctgcaagggtttctgcatcgacattctgaagcggctggcgcataccatcggcttcagctacgacctctacctggtcaccaatggcaagcacggaaagaagatcgatggcgtctggaacggcatgatcggggaggtgttctaccagcgcgcagacatggccatcggctccctcaccatcaacgaggagcgctccgagatcgtggacttctccgtccccttcgtggagaccggcatcagcgtcatggtggcgcgcagcaatggcacggtgtccccctcggccttcctcgagccctacagccccgccgtgtgggtgatgatgttcgtcatgtgcctcactgtggtcgccgtcactgttttcatcttcgagtacctcagtcctgttggttacaaccgcagcctggccacgggcaagcgccctggcggttcaaccttcaccattgggaaatccatctggctgctctgggccctggtgttcaataattcggtgcccgtggagaacccccggggaaccaccagcaaaatcatggtgctggtgtgggccttcttcgccgtcatcttcctcgccagctacacagccaacctggccgccttcatgatccaggaggagtacgtggatactgtgtctgggctcagtgaccgcaagttccagaggccccaggagcagtacccgcccctgaagtttgggaccgtgcccaacggctccacggagaagaacatccgcagcaactatcccgacatgcacagctacatggtgcgctacaaccagccccgcgtagaggaagcgctcactcagctcaaggcagggaagctggacgccttcatctacgatgctgcagtgctcaattacatggcccgcaaggacgagggctgcaagcttgtcaccatcggctccggcaaggtcttcgccacgacaggctatggcatcgccctgcacaagggctcccgctggaagcggcccatcgacctggcgttgctgcagttcctgggggatgatgagatcgagatgctggagcggctgtggctctctgggatctgccacaatgacaaaatcgaggtgatgagcagcaagctggacatcgacaacatggcgggcgtcttctacatgctcctggtggccatgggcctgtccctgctggtcttcgcctgggagcacctggtgtactggcgcctgcggcactgcctggggcccacccaccgcatggacttcctgctggccttctccaggggcatgtacagctgctgcagcgctgaggccgccccaccgcccgccaagcccccgccgccgccacagcccctgcccagccccgcgtaccccgcgccgcggccggctcccgggcccgcacctttcgtgccccgcgagcgcgcctcagtggaccgctggcgccggaccaagggcgcggggccgccggggggcgcgggcctggccgacggcttccaccgctactacggccccatcgagccgcagggcctaggcctcggcctgggcgaagcgcgcgcggcaccgcggggcgcagccgggcgcccgctgtccccgccggccgctcagcccccgcagaagccgccgccctcctatttcgccatcgtacgcgacaaggagccagccgagccccccgccggcgccttccccggcttcccgtcgccgcccgcgccccccgccgccgcggccaccgccgtcgggccgccactctgccgcttggccttcgaggacgagagcccgccggcgcccgcgcggtggccgcgctcggaccccgagagccaacccctgctggggccaggcgcgggcggcgcggggggcacggggggcgcaggcggaggagccccggccgctccgcccccgtgccgcgccgcgccgcccccgtgcccttacctcgatctcgagccgtcgccgtcggactcggaggactcggagagcctgggcggcgcgtcgctgggcggcctggagccctggtggttcgccgacttcccttacccgtatgccgagcgcctcgggccgccgcccggccgctactggtcggtcgacaagctcgggggctggcgcgccgggagctgggactacctgcccccgcgcagcggtccggccgcctggcactgtcggcactgcgccagcctggagctgctgccgccgccgcgccatctcagctgctcgcacgatggcctggacggcggctggtgggcgccaccgcctccaccctgggccgccgggcccctgccccgacgccgggcccgctgcgggtgcccgcggtcgcacccgcaccgcccgcgggcctcgcaccgcacgcccgccgccgccgcgccccaccaccacaggcaccggcgcgccgctgggggctgggacctcccgccgcccgcgcccacctcgcgctcgctcgaggacctcagctcgtgccctcgcgccgcccctgcgcgcaggcttaccgggccctcccgccacgctcgcaggtgtccgcacgccgcgcactgggggccgccgctgcccacagcttcccaccggagacaccggggcggggacctgggcacccgcaggggctcggcgcacttctctagcctcgagtccgaggtatgacgcggccccgggggccccaccgcccccttggtcagcgcaggccacggcccgagggggcgcccgcagtggacaggacccgcgtgggttgggaaggaaagcagtggaactggccggaccccgcctggagcagcgtcctgcgccccctggttctggaggaaccgcaagccggagaggatttggtccctcaactatcacccagcctgagaacgagggggcgggggccttggagcccaccggacttttttttaaacccgacaagggctttttaacgtcaccagatggggcgggaggtggggggttcacgccactcccgcgtcccacctccacgcccggggccgtggcccccacatcactgtgcagctccccggccccagccgcgcctccggggaagcccgtttttaacctttcatccattgggactcaaaactgtgagacgcgttcgccaaactgtgaccccagaccttggccccgccacacagaaacccctgacccagactgtgacatccgactcctaaaatggtcatccgactccagactgtgacccctgaccccaaactgtgacccgaaccccagactgtgccccgaccagactgtgacccttgacatcaaaccgtgacaccccctcctcctcttccaccctcggtcgcttttccctactctgacctaggacacgtccccaacggaagccccgccttcccttgcaccgcgatgaacccaacctccctgaagccaaaacttcccaccctgccgcacctccggaccaccccacttgccaccaagcacatcctctccaaatccaacccttatttgcgacccttcagtgatgacccagcagacctccaaaaagcctcctctgcccagatctccagccgggtctggggctgggttgcggaggggagggtctgggagtccacacttctccaccaacttcccttcccactctcttattccacattgcagtgtttggaataaaccatgtttttatgcctcctc

SEQ ID NO: 12329 - DNA, 1968 bp, Homo sapiens
  source 1..1968: mol_type = unassigned DNA
aaggccccgctgcgtcttccgagccgcaggcgcaggcccagctgagcggccgccgagcgggtgcgggtgcgggcgcatcggccatcaccgcgcggccgcgcagcggacaccgtgcgtaccggcctgcggcgcccggccaccggtgagtccccggcccgagcccaggagcgcctctgacccgctgcgccgcgcggcctgccgcccccgcccccgcccccacgcggatcttgcgcatccgagcgtggccgcctcgggggcggaccgcggaacccgaggccatgtcccatgaaaagagttttttggtgtctggggacaactatcctccccccaaccctggatatccgggggggccccagccacccatgcccccctatgctcagcctccctaccctggggccccttacccacagccccctttccagccctccccctacggtcagccagggtacccccatggccccagcccctacccccaagggggctacccacagggtccctacccccaagggggctacccacagggcccctacccacaagagggctacccacagggcccctacccccaagggggctacccccaggggccatatccccagagccccttcccccccaacccctatggacagccacaggtcttcccaggacaagaccctgactcaccccagcatggaaactaccaggaggagggtcccccatcctactatgacaaccaggacttccctgccaccaactgggatgacaagagcatccgacaggccttcatccgcaaggtgttcctagtgctgaccttgcagctgtcggtgaccctgtccacggtgtctgtgttcacttttgttgcggaggtgaagggctttgtccgggagaatgtctggacctactatgtctcctatgctgtcttcttcatctctctcatcgtcctcagctgttgtggggacttccggcgaaagcacccctggaaccttgttgcactgtcggtcctgaccgccagcctgtcgtacatggtggggatgatcgccagcttctacaacaccgaggcagtcatcatggccgtgggcatcaccacagccgtctgcttcaccgtcgtcatcttctccatgcagacccgctacgacttcacctcatgcatgggcgtgctcctggtgagcatggtggtgctcttcatcttcgccattctctgcatcttcatccggaaccgcatcctggagatcgtgtacgcctcactgggcgctctgctcttcacctgcttcctcgcagtggacacccagctgctactggggaacaagcagctgtccctgagcccagaagagtatgtgtttgctgcgctgaacctgtacacagacatcatcaacatcttcctgtacatcctcaccatcattggccgcgccaaggagtagccgagctccagctcgctgtgcccgctcaggtggcacggctggcctggaccctgcccctggcacggcagtgccagctgtacttcccctctctcttgtccccaggcacagcctagggaaaaggatgcctctctccaaccctcctgtatgtacactgcagatacttccatttggacccgctgtggccacagcatggcccctttagtcctcccgcccccgccaaggggcaccaaggccacgtttccgtgccacctcctgtctactcattgttgcatgagccctgtctgccagcccaccccagggactgggggcagcaccaggtcccggggagagggattgagccaagaggtgagggtgcacgtcttccctcctgtcccagctccccagcctggcgtagagcacccctcccctcccccccacccccctggagtgctgccctctggggacatgcggagtgggggtcttatccctgtgctgagccctgagggcagagaggatggcatgtttcaggggagggggaagccttcctctcaatttgttgtcagtgaaattccaataaatgggatttgctctctgc

SEQ ID NO: 12330 - DNA, 1814 bp, Homo sapiens
  source 1..1814: mol_type = unassigned DNA
tgagcggccgccgagcgggtgcgggtgcgggcgcatcggccatcaccgcgcggccgcgcagcggacaccgtgcgtaccggcctgcggcgcccggccaccggggcggaccgcggaacccgaggccatgtcccatgaaaagagttttttggtgtctggggacaactatcctccccccaaccctggatatccgggggggccccagccacccatgcccccctatgctcagcctccctaccctggggccccttacccacagccccctttccagccctccccctacggtcagccagggtacccccatggccccagcccctacccccaagggggctacccacagggtccctacccccaagggggctacccacagggcccctacccacaagagggctacccacagggcccctacccccaagggggctacccccaggggccatatccccagagccccttcccccccaacccctatggacagccacaggtcttcccaggacaagaccctgactcaccccagcatggaaactaccaggaggagggtcccccatcctactatgacaaccaggacttccctgccaccaactgggatgacaagagcatccgacaggccttcatccgcaaggtgttcctagtgctgaccttgcagctgtcggtgaccctgtccacggtgtctgtgttcacttttgttgcggaggtgaagggctttgtccgggagaatgtctggacctactatgtctcctatgctgtcttcttcatctctctcatcgtcctcagctgttgtggggacttccggcgaaagcacccctggaaccttgttgcactgtcggtcctgaccgccagcctgtcgtacatggtggggatgatcgccagcttctacaacaccgaggcagtcatcatggccgtgggcatcaccacagccgtctgcttcaccgtcgtcatcttctccatgcagacccgctacgacttcacctcatgcatgggcgtgctcctggtgagcatggtggtgctcttcatcttcgccattctctgcatcttcatccggaaccgcatcctggagatcgtgtacgcctcactgggcgctctgctcttcacctgcttcctcgcagtggacacccagctgctactggggaacaagcagctgtccctgagcccagaagagtatgtgtttgctgcgctgaacctgtacacagacatcatcaacatcttcctgtacatcctcaccatcattggccgcgccaaggagtagccgagctccagctcgctgtgcccgctcaggtggcacggctggcctggaccctgcccctggcacggcagtgccagctgtacttcccctctctcttgtccccaggcacagcctagggaaaaggatgcctctctccaaccctcctgtatgtacactgcagatacttccatttggacccgctgtggccacagcatggcccctttagtcctcccgcccccgccaaggggcaccaaggccacgtttccgtgccacctcctgtctactcattgttgcatgagccctgtctgccagcccaccccagggactgggggcagcaccaggtcccggggagagggattgagccaagaggtgagggtgcacgtcttccctcctgtcccagctccccagcctggcgtagagcacccctcccctcccccccacccccctggagtgctgccctctggggacatgcggagtgggggtcttatccctgtgctgagccctgagggcagagaggatggcatgtttcaggggagggggaagccttcctctcaatttgttgtcagtgaaattccaataaatgggatttgctctctgc

SEQ ID NO: 12331 - DNA, 1075 bp, Homo sapiens
  source 1..1075: mol_type = unassigned DNA
gcaggcgcaggcccagctgagcggccgccgagcgggtgcgggtgcgggcgcatcggccatcaccgcgcggccgcgcagcggacaccgtgcgtaccggcctgcggcgcccggccaccggtgagtccccggcccgagcccaggagcgcctctgacccgctgcgccgcgcggcctgccgcccccgcccccgcccccacgcggatcttgcgcatccgagcgtggccgcctcgggggcggaccgcggaacccgaggccatgtcccatgaaaagagttttttggtgtctggggacaactatcctccccccaaccctggatatccgggggggccccagccacccatgcccccctatgctcagcctccctaccctggggccccttacccacagccccctttccagccctccccctacggtcagccagggtacccccatggccccagcccctacccccaagggggctacccacagggtccctacccccaagggggctacccacagggcccctacccacaagagggctacccacagggcccctacccccaagggggctacccccaggggccatatccccagagccccttcccccccaacccctatggacagccacaggtcttcccaggacaagaccctgactcaccccagcatggaaactaccaggaggagggtcccccatcctactatgacaaccaggacttccctgccaccaactgggatgacaagagcatccgacaggccttcatccgcaaggtgttcctagtgctgaccttgcagctgtcggtgaccctgtccacggtgtctgtgttcacttttgttgcggaggtgaagggctttgtccgggagaatgtctggacctactatgtctcctatgctgtcttcttcatctctctcatcgtcctcagctgttgtggggacttccggcgaaagcacccctggaaccttgttgcactgtcggtcctgaccgccagcctgtcgtacatggtggggatgatcgccagcttctacaacaccgaggcagtcatcatggccgtgggcatcaccacagccgtctgcttcaccgtcgtcatcttctccatgcag

SEQ ID NO: 12332 - DNA, 558 bp, Homo sapiens
  source 1..558: mol_type = unassigned DNA
gttgttgggctcgcgggggtgggggggctcgggcctttgttggtcacagatggcccggggatttcctgggatagaaatagccgccggctccggccccttaaagctgcttaaggggcgggatgcggaggggagggtccgggcacaccccacacgtccccggccgagaccccagcctccgcgctgagctcccacccgggagacgccggcagcggcgcaggcctccggttgcttgggcggaccgcggaacccgaggccatgtcccatgaaaagagttttttggtgtctggggacaactatcctccccccaaccctggatatccgggggggccccagccacccatgcccccctatgctcagcctccctaccctggggccccttacccacagccccctttccagccctccccctacggtcagccagggtacccccatggccccagcccctacccccaagggggctacccacagggtccctacccccaagggggctacccacagggcccctacccacaagagggctacccacagggcccctacccccaagggggctacccccag

SEQ ID NO: 12333 - DNA, 1633 bp, Homo sapiens
  source 1..1633: mol_type = unassigned DNA
atgtcccatgaaaagagttttttggtgtctggggacaactatcctcctccctaccctggggccccttacccacagccccctttccagccctccccctacggtcagccagggtacccccatggccccagcccctacccccaagggggctacccacagggtccctacccccaagggggctacccacagggcccctacccacaagagggctacccacagggcccctacccccaagggggctacccccaggggccatatccccagagccccttcccccccaacccctatggacagccacaggtcttcccaggacaagaccctgactcaccccagcatggaaactaccaggaggagggtcccccatcctactatgacaaccaggacttccctgccaccaactgggatgacaagagcatccgacaggccttcatccgcaaggtgttcctagtgctgaccttgcagctgtcggtgaccctgtccacggtgtctgtgttcacttttgttgcggaggtgaagggctttgtccgggagaatgtctggacctactatgtctcctatgctgtcttcttcatctctctcatcgtcctcagctgttgtggggacttccggcgaaagcacccctggaaccttgttgcactgtcggtcctgaccgccagcctgtcgtacatggtggggatgatcgccagcttctacaacaccgaggcagtcatcatggccgtgggcatcaccacagccgtctgcttcaccgtcgtcatcttctccatgcagacccgctacgacttcacctcatgcatgggcgtgctcctggtgagcatggtggtgctcttcatcttcgccattctctgcatcttcatccggaaccgcatcctggagatcgtgtacgcctcactgggcgctctgctcttcacctgcttcctcgcagtggacacccagctgctactggggaacaagcagctgtccctgagcccagaagagtatgtgtttgctgcgctgaacctgtacacagacatcatcaacatcttcctgtacatcctcaccatcattggccgcgccaaggagtagccgagctccagctcgctgtgcccgctcaggtggcacggctggcctggaccctgcccctggcacggcagtgccagctgtacttcccctctctcttgtccccaggcacagcctagggaaaaggatgcctctctccaaccctcctgtatgtacactgcagatacttccatttggacccgctgtggccacagcatggcccctttagtcctcccgcccccgccaaggggcaccaaggccacgtttccgtgccacctcctgtctactcattgttgcatgagccctgtctgccagcccaccccagggactgggggcagcaccaggtcccggggagagggattgagccaagaggtgagggtgcacgtcttccctcctgtcccagctccccagcctggcgtagagcacccctcccctcccccccacccccctggagtgctgccctctggggacatgcggagtgggggtcttatccctgtgctgagccctgagggcagagaggatggcatgtttcaggggagggggaagccttcctctcaatttgttgtcagtgaaattccaataaatgggatttgctctctgc

SEQ ID NO: 12334 - DNA, 7770 bp, Homo sapiens
  source 1..7770: mol_type = unassigned DNA
cagagaggaagtagcgagagaagagagaaaatgaagtcggcgctgggggagcctgcaggagggtggccaacagtggaggaaggtggatttggcttcttttccgcaccccgggcgtgaaagccctctccaacgcgaccccaggaaataagtgggtctcgcctgggcagaaaaggaaaagaatccaggcgagagcgcgtcgctcctctgtcactgctgcccccgaggaactccggctgcttctcatcccggccgcctcgcggggccggacgcagtgcccgaggcgccctgcagatggggcgggcagggaacgggcgctccagctgcgggtgacaggcgccggcccgcccgcctgcctgctcagcgcagtgaccgggcgggcagaggatgccaggcggagggacctgggagcgggatctgagactgccggaggcgcgctacgctccaacttgcatggcctagagaccgctccagctcctgggaccgcttcaccgagtggagtgaagctgcgcgcgggacctggaggcggagacctcaggcagcggctgcagaggggcgagccgggcgcaggagggggcgcgctttctccctgcgggtctcagtaatgaggagactgagtttgtggtggctgctgagcagggtctgtctgctgttgccgccgccctgcgcactggtgctggccggggtgcccagctcctcctcgcacccgcagccctgccagatcctcaagcgcatcgggcacgcggtgagggtgggcgcggtgcacttgcagccctggaccaccgccccccgcgcggccagccgcgctccggacgacagccgagcaggagcccagagggatgagccggagccagggactaggcggtccccggcgccctcgccgggcgcacgctggttggggagcaccctgcatggccgggggccgccgggctcccgtaagcccggggagggcgccagggcggaggccctgtggccacgggacgccctcctatttgccgtggacaacctgaaccgcgtggaagggctgctaccctacaacctgtctttggaagtagtgatggccatcgaggcaggcctgggcgatctgccacttttgcccttctcctcccctagttcgccatggagcagtgaccctttctccttcctgcaaagtgtgtgccataccgtggtggtgcaaggggtgtcggcgctgctcgccttcccccagagccagggcgaaatgatggagctcgacttggtcagcttagtcctgcacattccagtgatcagcatcgtgcgccacgagtttccacgggagagtcagaatccccttcacctacaactgagtttagaaaattcattaagttctgatgctgatgtcactgtctcaatcctgaccatgaacaactggtacaattttagcttgttgctgtgccaggaagactggaacatcaccgacttcctcctccttacccagaataattccaagttccaccttggttctatcatcaacatcaccgctaacctcccctccacccaggacctcttgagcttcctacagatccagcttgagagtattaagaacagcacacccacagtggtgatgtttggctgcgacatggaaagtatccggcggattttcgaaattacaacccagtttggggtcatgccccctgaacttcgttgggtgctgggagattcccagaatgtggaggaactgaggacagagggtctgcccttagggctcattgctcatggaaaaacaacacagtctgtctttgagcactacgtacaagatgctatggagctggtcgcaagagctgtagccacagccaccatgatccaaccagaacttgctctcattcccagcacgatgaactgcatggaggtggaaactacaaatctcacttcaggacaatatttatcaaggtttctagccaataccactttcagaggcctcagtggttccatcagagtaaaaggttccaccatcgtcagctcagaaaacaactttttcatctggaatcttcaacatgaccccatgggaaagccaatgtggacccgcttgggcagctggcaggggggaaagattgtcatggactatggaatatggccagagcaggcccagagacacaaaacccacttccaacatccaagtaagctacacttgagagtggttaccctgattgagcatccttttgtcttcacaagggaggtagatgatgaaggcttgtgccctgctggccaactctgtctagaccccatgactaatgactcttccacattggacagcctttttagcagcctccatagcagtaatgatacagtgcccattaaattcaagaagtgctgctatggatattgcattgatctgctggaaaagatagcagaagacatgaactttgacttcgacctctatattgtaggggatggaaagtatggagcatggaaaaatgggcactggactgggctagtgggtgatctcctgagagggactgcccacatggcagtcacttcctttagcatcaatactgcacggagccaggtgatagatttcaccagccctttcttctccaccagcttgggcatcttagtgaggacccgagatacagcagctcccattggagccttcatgtggccactccactggacaatgtggctggggatttttgtggctctgcacatcactgccgtcttcctcactctgtatgaatggaagagtccatttggtttgactcccaaggggcgaaatagaagtaaagtcttctccttttcttcagccttgaacatctgttatgccctcttgtttggcagaacagtggccatcaaacctccaaaatgttggactggaaggtttctaatgaacctttgggccattttctgtatgttttgcctttccacatacacggcaaacttggctgctgtcatggtaggtgagaagatctatgaagagctttctggaatacatgaccccaagttacatcatccttcccaaggattccgctttggaactgtccgagaaagcagtgctgaagattatgtgagacaaagtttcccagagatgcatgaatatatgagaaggtacaatgttccagccacccctgatggagtggagtatctgaagaatgatccagagaaactagacgccttcatcatggacaaagcccttctggattatgaagtgtcaatagatgctgactgcaaacttctcactgtggggaagccatttgccatagaaggatacggcattggcctcccacccaactctccattgaccgccaacatatccgagctaatcagtcaatacaagtcacatgggtttatggatatgctccatgacaagtggtacagggtggttccctgtggcaagagaagttttgctgtcacggagactttgcaaatgggcatcaaacacttctctgggctctttgtgctgctgtgcattggatttggtctgtccattttgaccaccattggtgagcacatagtatacaggctgctgctaccacgaatcaaaaacaaatccaagctgcaatactggctccacaccagccagagattacacagagcaataaatacatcatttatagaggaaaagcagcagcatttcaagaccaaacgtgtggaaaagaggtctaatgtgggaccccgtcagcttaccgtatggaatacttccaatctgagtcatgacaaccgacggaaatacatctttagtgatgaggaaggacaaaaccagctgggcatccggatccaccaggacatccccctccctccaaggagaagagagctccctgccttgcggaccaccaatgggaaagcagactccctaaatgtatctcggaactcagtgatgcaggaactctcagagctcgagaagcagattcaggtgatccgtcaggagctgcagctggctgtgagcaggaaaacggagctggaggagtatcaaaggacaagtcggacttgtgagtcctaggtgaccacactgcttccctttctcagttcctgaccttcctctgagcccttgagacactttgtaatgctcttttgtaactatcgacaaaggtgtggggaagctgaggtctaggtcttcttaaaggtcaagtctgctctccctcgcctaaagtgcagcagcagctcctctcaagctcactctctaggtctccagggtaggagtgtttttctagcaagaatcttagtcaggagtaagctctgtgcgagagatctgtgaataaccagataaccccagctgccgttaaccttttcaccaggtgccacagtaatatttctggtttttagccctttctctgcactaccaacaagagataaaattgttactcacacttatgtcttactgggttgctggttttcatcgtaacacagaacgaggttatctagggttgtagcttttgatacaactccccgatctagatttattcctacattctgaatggggagcaggtaagagcagagcacctcccactgggggtggggtatttaaaaattaactcattagtatcataaacgtcaaggattgattggaccaggcaagagccatgtttttgagaaggttctggatctctgactccatcctgactgtttagtaagagcatgcttacaccctactgtgaaaaggggaggggatgtggtaagcggaaacagaagacaggcagcagaggcattaaaaatgcataccatgctttcagaacaaaagctctgggccagaaaggcaatttggctaaaaaatgaataagactacttctaatgtaactaagcatctccactatggtgtgtgccttttataaaggaaaagagagaaaaaggcaaagcaaggttgtggccttaggttggacctggaatatcccttattgcctataatggaatatgtgacactgtgggtgaaatgttctacacaccacacactaggccattttcagatcagcagtcacccatcgcttagcatagaaatcccaaaacctccagcccgggaacactataagcttcgaccattcaggaatctgccctgcactttgcatatctgtatagaaaatcaagtcaatcccccatcctcacacccactcatctctgaggagctatgaactggttttggtccctctaatgatcctccagcctcatctaatgccccccaaagactgatacaagtaacctcccctctgcttaggtgtcactttctcagcatatcaagtttaggcagcaagggaaaggaatatgggtcagttctcaaatgtcaatgtagataagagtcatctagtagagaactcatcagagtgcggattgccaagacccttctccagagattatggggttgggggtggaggtctagaggtgagctcagaaacctactgttaaccaacacccccaagtgactgacacaggtggtctaaaaattacttttctagaaacaccattctggaagtttggctgcccacaggcaggaggagaagcatgaagagaaaacctgtttgagaagttttgttttgttttgttttgctttttaataattttagcacacatctgctgactctccttcaacatcctcacccccacccctgggcaccatttaggacaagacttccttatttatcaattacttgatttatcttctcaggactcattgttccacccccaaccaatttgaatgcctacaataagttcaggagctgtgccaagcactttcctcttttacagctggagatcactggaaaggtgtctcagtcacaaaacttctccctctactactggatgaaatgtctgcatttccaccaaaatctacccagtcacccagggaataacaacttaagctgtagttagataacacctagtgattaattggctgagaaaaccctggagtggagggaggctcagagatactgatatggatgtgggagggctctaaagttagaggtcaccaactccacagatgaaacagttcaataatgaggaaacaggtgagccctgaaaacacaaaaggacagttctgtgttgaaacaccccatcccctcacgttctcaccccaggcccagaagtaggttgcaactgcctttggaagattttgccccttagccatccccacccacttgtaccagctaagaatgctggagactctgccaccatgctctgcgtgcccctgaacctctgtgcagcccggaaggctgatgtacaggtgtacctcaatccacattacagccatgctcctaatgtacatggacatttttgtaactcagctcatattctgactgtatttgagaagctggctgtttaagggaacccagaagtgaattcttttgtaaagtaaagcacccttttgtaatgcaattaattatcccttaatgtatctgttttgtaagtctgcatttttgtatatcggatttaccttaagcttctctagtgaggcattctgagcagtggtgatcacatgccagatcgccctgcctatccacaaagtagatgaccaatgcacgctcctcaaacatctttggaggaactacctggccaaaacactggccaggatgcagcaagcagcagcaggggctgacagcaggcttactgccatcaacattgcttgaaatgcctctatgttctgaataaagaaaaaccataattgcttgtggtgaaacgaagcagtcttcatgttaagtagcaatggttatttttattggtagtaactgaacagtgttttgcaatttgtgaaacagtgtattgtgttttgtaaaatgatgtcatgaaatggtgggtccttggaaacctcctttccgttcagctctgcctctgttctttcaactcctttgaggctcaaaaaaaacacaaagatcagaagccttcagatagagggtggtattctggtaaagaagaaagagataagggacgctaccttgcttttctggcacaggaagcacatgataaagcatgctcagatgagctggaacagatatagctacctggttcgtgtaaataagaataatcaaggccccagagtgtgtatgcttccaggtggaggagaaaggggaatctcccaaaatttaaaaacaaattggaagaataaccaggacagccaagtgaagcagccacagggacccaagcagtcgaggtctttaatgtgcctggagatgactctctgctattcatgaatcttgctattgcacaaaccctatcaagagctgctgcttcccttccagccagaaaagtggtaagcggagcaagtgccaagcagaacagaccttatcatctgggtaacagacttctcagtgttggtgctgtgtctgttagagccttagagcaagttaagcacttccttggtgtgggtaaagaataaaggggaaagaaactactttagagcctctttttctcccaactcatatttttgataggaaaaacagaaaacccatccagttcttcagaaattgctttctaggcattaatactactttactatctatactgtttagttattcctttctttacccacctaaactatccatctaatccaggattccctcactctttttttttagttactaatcattttatgaaaataatgtatttataagtattttcttaaggtttgtgaagagtatttgcattgtgtcttcattttaatgtgtttgcaatcgctccgctccaggaagaacggaaatgctgtcttgtgagcatgaagtgaacgggctgttttgctccagccacttttcttgtacaaccacatggatggattagatgtcctcaggtcttttccatcttcagtttctatgactgtggaataaatgttcagatagaaacttc

SEQ ID NO: 12335 - DNA, 6622 bp, Homo sapiens
  source 1..6622: mol_type = unassigned DNA
gaattcccttacaaacgcctccagcttgtagaggcggtcgtggaggacccagaggaggagacgaaggggaaggaggcggtggtggaggaggcaaaggccttggacgaccattgttggcgaggggcaccactccgggagaggcggcgctgggcgtcttgggggtgcgcgccgggagcctgcagcgggaccagcgtgggaacgcggctggcaggctgtggacctcgtcctcaccaccatggtcgggctccttttgttttttttcccagcgatctttttggaggtgtcccttctccccagaagccccggcaggaaagtgttgctggcaggagcgtcgtctcagcgctcggtggccagaatggacggagatgtcatcattggagccctcttctcagtccatcaccagcctccggccgagaaagtgcccgagaggaagtgtggggagatcagggagcagtatggcatccagagggtggaggccatgttccacacgttggataagatcaacgcggacccggtcctcctgcccaacatcaccctgggcagtgagatccgggactcctgctggcactcttccgtggctctggaacagagcattgagttcattagggactctctgatttccattcgagatgagaaggatgggatcaaccggtgtctgcctgacggccagtccctccccccaggcaggactaagaagcccattgcgggagtgatcggtcccggctccagctctgtagccattcaagtgcagaacctgctccagctcttcgacatcccccagatcgcttattcagccacaagcatcgacctgagtgacaaaactttgtacaaatacttcctgagggttgtcccttctgacactttgcaggcaagggccatgcttgacatagtcaaacgttacaattggacctatgtctctgcagtccacacggaagggaattatggggagagcggaatggacgctttcaaagagctggctgcccaggaaggcctctgtatcgcccattctgacaaaatctacagcaacgctggggagaagagctttgaccgactcttgcgcaaactccgagagaggcttcccaaggctagagtggtggtctgcttctgtgaaggcatgacagtgcgaggactcctgagcgccatgcggcgccttggcgtcgtgggcgagttctcactcattggaagtgatggatgggcagacagagatgaagtcattgaaggttatgaggtggaagccaacgggggaatcacgataaagctgcagtctccagaggtcaggtcatttgatgattatttcctgaaactgaggctggacactaacacgaggaatccctggttccctgagttctggcaacatcggttccagtgccgccttccaggacaccttctggaaaatcccaactttaaacgaatctgcacaggcaatgaaagcttagaagaaaactatgtccaggacagtaagatggggtttgtcatcaatgccatctatgccatggcacatgggctgcagaacatgcaccatgccctctgccctggccacgtgggcctctgcgatgccatgaagcccatcgacggcagcaagctgctggacttcctcatcaagtcctcattcattggagtatctggagaggaggtgtggtttgatgagaaaggagacgctcctggaaggtatgatatcatgaatctgcagtacactgaagctaatcgctatgactatgtgcacgttggaacctggcatgaaggagtgctgaacattgatgattacaaaatccagatgaacaagagtggagtggtgcggtctgtgtgcagtgagccttgcttaaagggccagattaaggttatacggaaaggagaagtgagctgctgctggatttgcacggcctgcaaagagaatgaatatgtgcaagatgagttcacctgcaaagcttgtgacttgggatggtggcccaatgcagatctaacaggctgtgagcccattcctgtgcgctatcttgagtggagcaacatcgaatccattatagccatcgccttttcatgcctgggaatccttgttaccttgtttgtcaccctaatctttgtactgtaccgggacacaccagtggtcaaatcctccagtcgggagctctgctacatcatcctagctggcatcttccttggttatgtgtgcccattcactctcattgccaaacctactaccacctcctgctacctccagcgcctcttggttggcctctcctctgcgatgtgctactctgctttagtgactaaaaccaatcgtattgcacgcatcctggctggcagcaagaagaagatctgcacccggaagcccaggttcatgagtgcctgggctcaggtgatcattgcctcaattctgattagtgtgcaactaaccctggtggtaaccctgatcatcatggaaccccctatgcccattctgtcctacccaagtatcaaggaagtctaccttatctgcaataccagcaacctgggtgtggtggcccctttgggctacaatggactcctcatcatgagctgtacctactatgccttcaagacccgcaacgtgcccgccaacttcaacgaggccaaatatatcgcgttcaccatgtacaccacctgtatcatctggctagcttttgtgcccatttactttgggagcaactacaagatcatcacaacttgctttgcagtgagtctcagtgtaacagtggctctggggtgcatgttcactcccaagatgtacatcattattgccaagcctgagaggaatgtccgcagtgccttcaccacctctgatgttgtccgcatgcatgttggcgatggcaagctgccctgccgctccaacactttcctcaacatcttccgaagaaagaaggcaggggcagggaatgccaattctaatggcaagtctgtgtcatggtctgaaccaggtggaggacaggtgcccaagggacagcatatgtggcaccgcctctctgtgcacgtgaagaccaatgagacggcctgcaaccaaacagccgtcatcaagcccctcactaaaagttaccaaggctctggcaagagcctgaccttttcagataccagcaccaagaccctttacaacgtagaggaggaggaggatgcccagccgattcgctttagcccgcctggtagcccttccatggtggtgcacaggcgcgtgccaagcgcggcgaccactccgcctctgccgtcccacctgaccgcagaggagacccccctcttcctggccgaaccagccctccccaagggcttgccccctcctctccagcagcagcagcaaccccctccacagcagaaatcgctgatggaccagctccagggagtggtcagcaacttcagtaccgcgatcccggattttcacgcggtgctggcaggccccggtggtcccgggaacgggctgcggtccctgtacccgcccccgccacctccgcagcacctgcagatgctgccgctgcagctgagcacctttggggaggagctggtctccccgcccgcggacgacgacgacgacagcgagaggtttaagctcctccaggagtacgtgtatgagcacgagcgggaagggaacacggaagaagacgaactggaagaggaggaggaggacctgcaggcggccagcaaactgaccccggatgattcgcctgcgctgacgcctccgtcgcctttccgcgactcggtggcctcgggcagctcggtgcccagctcccccgtgtccgagtcggtgctctgcacccctcccaacgtatcctacgcctctgtcattctgcgggactacaagcaaagctcttccaccctgtaagggggaagggtccacatagaaaagcaagacaagccagagatctcccacacctccagagatgtgcaaacagctgggaggaaaagcctgggagtggggggcctcgtcgggaggacaggagaccgctgctgctgctgccgctactgctgctgctgccttaagtaggaagagagggaaggacaccaagcaaaaaatgttccaggccaggattcggattcttgaattactcgaagccttctctgggaagaaagggaattctgacaaagcacaattccatatggtatgtaacttttatcacaaatcaaatagtgacatcacaaacataatgtcctcttttgcacaattgtgcatagatatatatatgcccacacacactgggccatgcttgccaaggaacagcccacgtggacatgccagtcggatcatgagttcacctgatggcattcggagtgagctggtggagccagacagagcaggtgcggggaagggaagggcccaggccagacccatcccaaacggatgatgggatgatgggacagcagctccttgctcagaagcccttctccccgctgggctgacagactcctcatcttcaggagactcaggaatggagcggcacaggggtctctcttcatccactgcaacccatccagtgccagctttgagattgcacttgaagaaaggtgcatggaccccctgctgctctgcagattccctttatttaggaaaacaggaataagagcaaaattatcaccaaaaagtgcttcatcaggcgtgctacaggaggaaggagctagaaatagaacaatccatcagcatgagactttgaaaaaaaaacacatgatcagcttctcatgttccatattcacttattggcgatttggggaaaaggccggaacaagagattgttacgagagtggcagaaacccttttgtagattgacttgtgtttgtgccaagcgggctttccattgaccttcagttaaagaacaaaccatgtgacaaaattgttaccttccacttactgtagcaaataatacctacaagttgaacttctaagatgcgtatatgtacaatttggtgccattatttctcctacgtattagagaaacaaatccatctttgaatctaatggtgtactcatagcaactattactggtttaaatgacaaataattctatcctattgtcactgaagtccttgtaactagcgagtgaatgtgttcctgtgtccttgtatatgtgcgatcgtaaaatttgtgcaatgtaatgtcaaattgactggtcaatgtcaacctagtagtcaatctaactgcaattagaaattgtcttttgaatatactatatatattttttatgttccaataatgttttgtacatcattgtcatcaatatctacagaagctctttgacggtttgaatactatggctcaaggttttcatatgcagctcggatggacatttttcttctaagatggaacttatttttcagatattttctgatgtggagatatgttattaatgaagtggtttgaaaatttgttatattaaaagtgcacaaaaactgagagtgaaaataaaaggtacattttataagcttgcacacattattaacacataagattgaacaaagcatttagattattccaggttatatcatttttttaaagattttccacagctacttgagtgtctaacatacagtaacatctaactcagctaataatttgtaaaatctttatcaatcacattttgccttcttttaatttttatgttcatggacttttattcctgtgtcttggctgtcataactttttatttctgctatttgctgttgtgtaatatccatggacatgtaatccacttactccatctttacaatccctttttaccaccaataaaaggatttttcttgctgttttgatttcttctattatttgtggaatgaattataccccccttaaatatctttgtttatgccttatgttcagtcatattttaatatgcttccttcatattgaagctgctgatttctcagccaaaaatcatcttagaatctttaaatatccattgcatcatttgttcagaatttaacatccattccaatgttggaggcttgtattacttatatttcatcatattctattgccaagtttagtcagttccacaccaagaatgaactgcatttcctttaaaaattattttaaaacacctttattgaaaagatctcatgactgagatgtggactttggttccatgttttcattgtaagaaagcagagagcggaaaatcaatggctccagtgattaatagatgggtttttagtaattgacaaattcatgagggaaagcatatgatctctttattagtgaatcatgcttattttttactcttaatgccactaatatacatccctaatatcacagggcttgtgcattcagatttttaaaaaattaggatagataaggaaacaacttatattcaagtgtaagatgatatcaggttggtctaagacttttggtgaacacgttcattcaactgtgatcactttattactctgaatgcctactattatcctgattatggggtctcctgaataaatagagtattagtccttatgtcatcattgttcaaaattggagatgtacacatacataccctataccaagagggccgaaactcttcaccttgatgtatgttctgatacaagttgttcagcttcttgtaaatgtgttttccttcggcttgttactgccttttgtcaaataatcttgacaatgctgtataataaatattttctatttatt

SEQ ID NO: 12336 - DNA, 6854 bp, Homo sapiens
  source 1..6854: mol_type = unassigned DNA
agtgctgaagaaagagggcactagtgtacagcccagatcgcatccttgcaccgtctggattagagctgaggcgtctgcaagccgagcgtggccacggtcctctggccccgggaccatagcgctgtctaccccgactcaggtactcagcagcatctagctcaccgctgccaacacgacttccactgtactcttgatcaatttaccttgatgcactaccggtgaagaacggggactcgaattcccttacaaacgcctccagcttgtagaggcggtcgtggaggacccagaggaggagacgaaggggaaggaggcggtggtggaggaggcaaaggccttggacgaccattgttggcgaggggcaccactccgggagaggcggcgctgggcgtcttgggggtgcgcgccgggagcctgcagcgggaccagcgtgggaacgcggctggcaggctgtggacctcgtcctcaccaccatggtcgggctccttttgttttttttcccagcgatctttttggaggtgtcccttctccccagaagccccggcaggaaagtgttgctggcaggagcgtcgtctcagcgctcggtggccagaatggacggagatgtcatcattggagccctcttctcagtccatcaccagcctccggccgagaaagtgcccgagaggaagtgtggggagatcagggagcagtatggcatccagagggtggaggccatgttccacacgttggataagatcaacgcggacccggtcctcctgcccaacatcaccctgggcagtgagatccgggactcctgctggcactcttccgtggctctggaacagagcattgagttcattagggactctctgatttccattcgagatgagaaggatgggatcaaccggtgtctgcctgacggccagtccctccccccaggcaggactaagaagcccattgcgggagtgatcggtcccggctccagctctgtagccattcaagtgcagaacctgctccagctcttcgacatcccccagatcgcttattcagccacaagcatcgacctgagtgacaaaactttgtacaaatacttcctgagggttgtcccttctgacactttgcaggcaagggccatgcttgacatagtcaaacgttacaattggacctatgtctctgcagtccacacggaagggaattatggggagagcggaatggacgctttcaaagagctggctgcccaggaaggcctctgtatcgcccattctgacaaaatctacagcaacgctggggagaagagctttgaccgactcttgcgcaaactccgagagaggcttcccaaggctagagtggtggtctgcttctgtgaaggcatgacagtgcgaggactcctgagcgccatgcggcgccttggcgtcgtgggcgagttctcactcattggaagtgatggatgggcagacagagatgaagtcattgaaggttatgaggtggaagccaacgggggaatcacgataaagctgcagtctccagaggtcaggtcatttgatgattatttcctgaaactgaggctggacactaacacgaggaatccctggttccctgagttctggcaacatcggttccagtgccgccttccaggacaccttctggaaaatcccaactttaaacgaatctgcacaggcaatgaaagcttagaagaaaactatgtccaggacagtaagatggggtttgtcatcaatgccatctatgccatggcacatgggctgcagaacatgcaccatgccctctgccctggccacgtgggcctctgcgatgccatgaagcccatcgacggcagcaagctgctggacttcctcatcaagtcctcattcattggagtatctggagaggaggtgtggtttgatgagaaaggagacgctcctggaaggtatgatatcatgaatctgcagtacactgaagctaatcgctatgactatgtgcacgttggaacctggcatgaaggagtgctgaacattgatgattacaaaatccagatgaacaagagtggagtggtgcggtctgtgtgcagtgagccttgcttaaagggccagattaaggttatacggaaaggagaagtgagctgctgctggatttgcacggcctgcaaagagaatgaatatgtgcaagatgagttcacctgcaaagcttgtgacttgggatggtggcccaatgcagatctaacaggctgtgagcccattcctgtgcgctatcttgagtggagcaacatcgaatccattatagccatcgccttttcatgcctgggaatccttgttaccttgtttgtcaccctaatctttgtactgtaccgggacacaccagtggtcaaatcctccagtcgggagctctgctacatcatcctagctggcatcttccttggttatgtgtgcccattcactctcattgccaaacctactaccacctcctgctacctccagcgcctcttggttggcctctcctctgcgatgtgctactctgctttagtgactaaaaccaatcgtattgcacgcatcctggctggcagcaagaagaagatctgcacccggaagcccaggttcatgagtgcctgggctcaggtgatcattgcctcaattctgattagtgtgcaactaaccctggtggtaaccctgatcatcatggaaccccctatgcccattctgtcctacccaagtatcaaggaagtctaccttatctgcaataccagcaacctgggtgtggtggcccctttgggctacaatggactcctcatcatgagctgtacctactatgccttcaagacccgcaacgtgcccgccaacttcaacgaggccaaatatatcgcgttcaccatgtacaccacctgtatcatctggctagcttttgtgcccatttactttgggagcaactacaagatcatcacaacttgctttgcagtgagtctcagtgtaacagtggctctggggtgcatgttcactcccaagatgtacatcattattgccaagcctgagaggaatgtccgcagtgccttcaccacctctgatgttgtccgcatgcatgttggcgatggcaagctgccctgccgctccaacactttcctcaacatcttccgaagaaagaaggcaggggcagggaatgccaattctaatggcaagtctgtgtcatggtctgaaccaggtggaggacaggtgcccaagggacagcatatgtggcaccgcctctctgtgcacgtgaagaccaatgagacggcctgcaaccaaacagccgtcatcaagcccctcactaaaagttaccaaggctctggcaagagcctgaccttttcagataccagcaccaagaccctttacaacgtagaggaggaggaggatgcccagccgattcgctttagcccgcctggtagcccttccatggtggtgcacaggcgcgtgccaagcgcggcgaccactccgcctctgccgtcccacctgaccgcagaggagacccccctcttcctggccgaaccagccctccccaagggcttgccccctcctctccagcagcagcagcaaccccctccacagcagaaatcgctgatggaccagctccagggagtggtcagcaacttcagtaccgcgatcccggattttcacgcggtgctggcaggccccggtggtcccgggaacgggctgcggtccctgtacccgcccccgccacctccgcagcacctgcagatgctgccgctgcagctgagcacctttggggaggagctggtctccccgcccgcggacgacgacgacgacagcgagaggtttaagctcctccaggagtacgtgtatgagcacgagcgggaagggaacacggaagaagacgaactggaagaggaggaggaggacctgcaggcggccagcaaactgaccccggatgattcgcctgcgctgacgcctccgtcgcctttccgcgactcggtggcctcgggcagctcggtgcccagctcccccgtgtccgagtcggtgctctgcacccctcccaacgtatcctacgcctctgtcattctgcgggactacaagcaaagctcttccaccctgtaagggggaagggtccacatagaaaagcaagacaagccagagatctcccacacctccagagatgtgcaaacagctgggaggaaaagcctgggagtggggggcctcgtcgggaggacaggagaccgctgctgctgctgccgctactgctgctgctgccttaagtaggaagagagggaaggacaccaagcaaaaaatgttccaggccaggattcggattcttgaattactcgaagccttctctgggaagaaagggaattctgacaaagcacaattccatatggtatgtaacttttatcacaaatcaaatagtgacatcacaaacataatgtcctcttttgcacaattgtgcatagatatatatatgcccacacacactgggccatgcttgccaaggaacagcccacgtggacatgccagtcggatcatgagttcacctgatggcattcggagtgagctggtggagccagacagagcaggtgcggggaagggaagggcccaggccagacccatcccaaacggatgatgggatgatgggacagcagctccttgctcagaagcccttctccccgctgggctgacagactcctcatcttcaggagactcaggaatggagcggcacaggggtctctcttcatccactgcaacccatccagtgccagctttgagattgcacttgaagaaaggtgcatggaccccctgctgctctgcagattccctttatttaggaaaacaggaataagagcaaaattatcaccaaaaagtgcttcatcaggcgtgctacaggaggaaggagctagaaatagaacaatccatcagcatgagactttgaaaaaaaaacacatgatcagcttctcatgttccatattcacttattggcgatttggggaaaaggccggaacaagagattgttacgagagtggcagaaacccttttgtagattgacttgtgtttgtgccaagcgggctttccattgaccttcagttaaagaacaaaccatgtgacaaaattgttaccttccacttactgtagcaaataatacctacaagttgaacttctaagatgcgtatatgtacaatttggtgccattatttctcctacgtattagagaaacaaatccatctttgaatctaatggtgtactcatagcaactattactggtttaaatgacaaataattctatcctattgtcactgaagtccttgtaactagcgagtgaatgtgttcctgtgtccttgtatatgtgcgatcgtaaaatttgtgcaatgtaatgtcaaattgactggtcaatgtcaacctagtagtcaatctaactgcaattagaaattgtcttttgaatatactatatatattttttatgttccaataatgttttgtacatcattgtcatcaatatctacagaagctctttgacggtttgaatactatggctcaaggttttcatatgcagctcggatggacatttttcttctaagatggaacttatttttcagatattttctgatgtggagatatgttattaatgaagtggtttgaaaatttgttatattaaaagtgcacaaaaactgagagtgaaaataaaaggtacattttataagcttgcacacattattaacacataagattgaacaaagcatttagattattccaggttatatcatttttttaaagattttccacagctacttgagtgtctaacatacagtaacatctaactcagctaataatttgtaaaatctttatcaatcacattttgccttcttttaatttttatgttcatggacttttattcctgtgtcttggctgtcataactttttatttctgctatttgctgttgtgtaatatccatggacatgtaatccacttactccatctttacaatccctttttaccaccaataaaaggatttttcttgctgttttgatttcttctattatttgtggaatgaattataccccccttaaatatctttgtttatgccttatgttcagtcatattttaatatgcttccttcatattgaagctgctgatttctcagccaaaaatcatcttagaatctttaaatatccattgcatcatttgttcagaatttaacatccattccaatgttggaggcttgtattacttatatttcatcatattctattgccaagtttagtcagttccacaccaagaatgaactgcatttcctttaaaaattattttaaaacacctttattgaaaagatctcatgactgagatgtggactttggttccatgttttcattgtaagaaagcagagagcggaaaatcaatggctccagtgattaatagatgggtttttagtaattgacaaattcatgagggaaagcatatgatctctttattagtgaatcatgcttattttttactcttaatgccactaatatacatccctaatatcacagggcttgtgcattcagatttttaaaaaattaggatagataaggaaacaacttatattcaagtgtaagatgatatcaggttggtctaagacttttggtgaacacgttcattcaactgtgatcactttattactctgaatgcctactattatcctgattatggggtctcctgaataaatagagtattagtccttatgtcatcattgttcaaaattggagatgtacacatacataccctataccaagagggccgaaactcttcaccttgatgtatgttctgatacaagttgttcagcttcttgtaaatgtgttttccttcggcttgttactgccttttgtcaaataatcttgacaatgctgtataataaatattttctattt

SEQ ID NO: 12337 - DNA, 6939 bp, Homo sapiens
  source 1..6939: mol_type = unassigned DNA
agtgctgaagaaagagggcactagtgtacagcccagatcgcatccttgcaccgtctggattagagctgaggcgtctgcaagccgagcgtggccacggtcctctggccccgggaccatagcgctgtctaccccgactcaggtactcagcagcatctagctcaccgctgccaacacgacttccactgtactcttgatcaatttaccttgatgcactaccggtgaagaacggggactcgaattcccttacaaacgcctccagcttgtagaggcggtcgtggaggacccagaggaggagacgaaggggaaggaggcggtggtggaggaggcaaaggccttggacgaccattgttggcgaggggcaccactccgggagaggcggcgctgggcgtcttgggggtgcgcgccgggagcctgcagcgggaccagcgtgggaacgcggctggcaggctgtggacctcgtcctcaccaccatggtcgggctccttttgttttttttcccagcgatctttttggaggtgtcccttctccccagaagccccggcaggaaagtgttgctggcaggagcgtcgtctcagcgctcggtggccagaatggacggagatgtcatcattggagccctcttctcagtccatcaccagcctccggccgagaaagtgcccgagaggaagtgtggggagatcagggagcagtatggcatccagagggtggaggccatgttccacacgttggataagatcaacgcggacccggtcctcctgcccaacatcaccctgggcagtgagatccgggactcctgctggcactcttccgtggctctggaacagagcattgagttcattagggactctctgatttccattcgagatgagaaggatgggatcaaccggtgtctgcctgacggccagtccctccccccaggcaggactaagaagcccattgcgggagtgatcggtcccggctccagctctgtagccattcaagtgcagaacctgctccagctcttcgacatcccccagatcgcttattcagccacaagcatcgacctgagtgacaaaactttgtacaaatacttcctgagggttgtcccttctgacactttgcaggcaagggccatgcttgacatagtcaaacgttacaattggacctatgtctctgcagtccacacggaagggaattatggggagagcggaatggacgctttcaaagagctggctgcccaggaaggcctctgtatcgcccattctgacaaaatctacagcaacgctggggagaagagctttgaccgactcttgcgcaaactccgagagaggcttcccaaggctagagtggtggtctgcttctgtgaaggcatgacagtgcgaggactcctgagcgccatgcggcgccttggcgtcgtgggcgagttctcactcattggaagtgatggatgggcagacagagatgaagtcattgaaggttatgaggtggaagccaacgggggaatcacgataaagctgcagtctccagaggtcaggtcatttgatgattatttcctgaaactgaggctggacactaacacgaggaatccctggttccctgagttctggcaacatcggttccagtgccgccttccaggacaccttctggaaaatcccaactttaaacgaatctgcacaggcaatgaaagcttagaagaaaactatgtccaggacagtaagatggggtttgtcatcaatgccatctatgccatggcacatgggctgcagaacatgcaccatgccctctgccctggccacgtgggcctctgcgatgccatgaagcccatcgacggcagcaagctgctggacttcctcatcaagtcctcattcattggagtatctggagaggaggtgtggtttgatgagaaaggagacgctcctggaaggtatgatatcatgaatctgcagtacactgaagctaatcgctatgactatgtgcacgttggaacctggcatgaaggagtgctgaacattgatgattacaaaatccagatgaacaagagtggagtggtgcggtctgtgtgcagtgagccttgcttaaagggccagattaaggttatacggaaaggagaagtgagctgctgctggatttgcacggcctgcaaagagaatgaatatgtgcaagatgagttcacctgcaaagcttgtgacttgggatggtggcccaatgcagatctaacaggctgtgagcccattcctgtgcgctatcttgagtggagcaacatcgaatccattatagccatcgccttttcatgcctgggaatccttgttaccttgtttgtcaccctaatctttgtactgtaccgggacacaccagtggtcaaatcctccagtcgggagctctgctacatcatcctagctggcatcttccttggttatgtgtgcccattcactctcattgccaaacctactaccacctcctgctacctccagcgcctcttggttggcctctcctctgcgatgtgctactctgctttagtgactaaaaccaatcgtattgcacgcatcctggctggcagcaagaagaagatctgcacccggaagcccaggttcatgagtgcctgggctcaggtgatcattgcctcaattctgattagtgtgcaactaaccctggtggtaaccctgatcatcatggaaccccctatgcccattctgtcctacccaagtatcaaggaagtctaccttatctgcaataccagcaacctgggtgtggtggcccctttgggctacaatggactcctcatcatgagctgtacctactatgccttcaagacccgcaacgtgcccgccaacttcaacgaggccaaatatatcgcgttcaccatgtacaccacctgtatcatctggctagcttttgtgcccatttactttgggagcaactacaagatcatcacaacttgctttgcagtgagtctcagtgtaacagtggctctggggtgcatgttcactcccaagatgtacatcattattgccaagcctgagaggaatgtccgcagtgccttcaccacctctgatgttgtccgcatgcatgttggcgatggcaagctgccctgccgctccaacactttcctcaacatcttccgaagaaagaaggcaggggcagggaatgccaagaagaggcagccagaattctcgcccaccagccaatgtccgtcggcacatgtgcagctttgaaaacccccacactgcagtgaatgtttctaatggcaagtctgtgtcatggtctgaaccaggtggaggacaggtgcccaagggacagcatatgtggcaccgcctctctgtgcacgtgaagaccaatgagacggcctgcaaccaaacagccgtcatcaagcccctcactaaaagttaccaaggctctggcaagagcctgaccttttcagataccagcaccaagaccctttacaacgtagaggaggaggaggatgcccagccgattcgctttagcccgcctggtagcccttccatggtggtgcacaggcgcgtgccaagcgcggcgaccactccgcctctgccgtcccacctgaccgcagaggagacccccctcttcctggccgaaccagccctccccaagggcttgccccctcctctccagcagcagcagcaaccccctccacagcagaaatcgctgatggaccagctccagggagtggtcagcaacttcagtaccgcgatcccggattttcacgcggtgctggcaggccccggtggtcccgggaacgggctgcggtccctgtacccgcccccgccacctccgcagcacctgcagatgctgccgctgcagctgagcacctttggggaggagctggtctccccgcccgcggacgacgacgacgacagcgagaggtttaagctcctccaggagtacgtgtatgagcacgagcgggaagggaacacggaagaagacgaactggaagaggaggaggaggacctgcaggcggccagcaaactgaccccggatgattcgcctgcgctgacgcctccgtcgcctttccgcgactcggtggcctcgggcagctcggtgcccagctcccccgtgtccgagtcggtgctctgcacccctcccaacgtatcctacgcctctgtcattctgcgggactacaagcaaagctcttccaccctgtaagggggaagggtccacatagaaaagcaagacaagccagagatctcccacacctccagagatgtgcaaacagctgggaggaaaagcctgggagtggggggcctcgtcgggaggacaggagaccgctgctgctgctgccgctactgctgctgctgccttaagtaggaagagagggaaggacaccaagcaaaaaatgttccaggccaggattcggattcttgaattactcgaagccttctctgggaagaaagggaattctgacaaagcacaattccatatggtatgtaacttttatcacaaatcaaatagtgacatcacaaacataatgtcctcttttgcacaattgtgcatagatatatatatgcccacacacactgggccatgcttgccaaggaacagcccacgtggacatgccagtcggatcatgagttcacctgatggcattcggagtgagctggtggagccagacagagcaggtgcggggaagggaagggcccaggccagacccatcccaaacggatgatgggatgatgggacagcagctccttgctcagaagcccttctccccgctgggctgacagactcctcatcttcaggagactcaggaatggagcggcacaggggtctctcttcatccactgcaacccatccagtgccagctttgagattgcacttgaagaaaggtgcatggaccccctgctgctctgcagattccctttatttaggaaaacaggaataagagcaaaattatcaccaaaaagtgcttcatcaggcgtgctacaggaggaaggagctagaaatagaacaatccatcagcatgagactttgaaaaaaaaacacatgatcagcttctcatgttccatattcacttattggcgatttggggaaaaggccggaacaagagattgttacgagagtggcagaaacccttttgtagattgacttgtgtttgtgccaagcgggctttccattgaccttcagttaaagaacaaaccatgtgacaaaattgttaccttccacttactgtagcaaataatacctacaagttgaacttctaagatgcgtatatgtacaatttggtgccattatttctcctacgtattagagaaacaaatccatctttgaatctaatggtgtactcatagcaactattactggtttaaatgacaaataattctatcctattgtcactgaagtccttgtaactagcgagtgaatgtgttcctgtgtccttgtatatgtgcgatcgtaaaatttgtgcaatgtaatgtcaaattgactggtcaatgtcaacctagtagtcaatctaactgcaattagaaattgtcttttgaatatactatatatattttttatgttccaataatgttttgtacatcattgtcatcaatatctacagaagctctttgacggtttgaatactatggctcaaggttttcatatgcagctcggatggacatttttcttctaagatggaacttatttttcagatattttctgatgtggagatatgttattaatgaagtggtttgaaaatttgttatattaaaagtgcacaaaaactgagagtgaaaataaaaggtacattttataagcttgcacacattattaacacataagattgaacaaagcatttagattattccaggttatatcatttttttaaagattttccacagctacttgagtgtctaacatacagtaacatctaactcagctaataatttgtaaaatctttatcaatcacattttgccttcttttaatttttatgttcatggacttttattcctgtgtcttggctgtcataactttttatttctgctatttgctgttgtgtaatatccatggacatgtaatccacttactccatctttacaatccctttttaccaccaataaaaggatttttcttgctgttttgatttcttctattatttgtggaatgaattataccccccttaaatatctttgtttatgccttatgttcagtcatattttaatatgcttccttcatattgaagctgctgatttctcagccaaaaatcatcttagaatctttaaatatccattgcatcatttgttcagaatttaacatccattccaatgttggaggcttgtattacttatatttcatcatattctattgccaagtttagtcagttccacaccaagaatgaactgcatttcctttaaaaattattttaaaacacctttattgaaaagatctcatgactgagatgtggactttggttccatgttttcattgtaagaaagcagagagcggaaaatcaatggctccagtgattaatagatgggtttttagtaattgacaaattcatgagggaaagcatatgatctctttattagtgaatcatgcttattttttactcttaatgccactaatatacatccctaatatcacagggcttgtgcattcagatttttaaaaaattaggatagataaggaaacaacttatattcaagtgtaagatgatatcaggttggtctaagacttttggtgaacacgttcattcaactgtgatcactttattactctgaatgcctactattatcctgattatggggtctcctgaataaatagagtattagtccttatgtcatcattgttcaaaattggagatgtacacatacataccctataccaagagggccgaaactcttcaccttgatgtatgttctgatacaagttgttcagcttcttgtaaatgtgttttccttcggcttgttactgccttttgtcaaataatcttgacaatgctgtataataaatattttctattt

SEQ ID NO: 12338 - DNA, 6836 bp, Homo sapiens
  source 1..6836: mol_type = unassigned DNA
caggtactcaggtatgtctcaagtccatgtcctccaaacagactcagcatctagctcaccgctgccaacacgacttccactgtactcttgatcaatttaccttgatgcactaccggtgaagaacggggactcgaattcccttacaaacgcctccagcttgtagaggcggtcgtggaggacccagaggaggagacgaaggggaaggaggcggtggtggaggaggcaaaggccttggacgaccattgttggcgaggggcaccactccgggagaggcggcgctgggcgtcttgggggtgcgcgccgggagcctgcagcgggaccagcgtgggaacgcggctggcaggctgtggacctcgtcctcaccaccatggtcgggctccttttgttttttttcccagcgatctttttggaggtgtcccttctccccagaagccccggcaggaaagtgttgctggcaggagcgtcgtctcagcgctcggtggccagaatggacggagatgtcatcattggagccctcttctcagtccatcaccagcctccggccgagaaagtgcccgagaggaagtgtggggagatcagggagcagtatggcatccagagggtggaggccatgttccacacgttggataagatcaacgcggacccggtcctcctgcccaacatcaccctgggcagtgagatccgggactcctgctggcactcttccgtggctctggaacagagcattgagttcattagggactctctgatttccattcgagatgagaaggatgggatcaaccggtgtctgcctgacggccagtccctccccccaggcaggactaagaagcccattgcgggagtgatcggtcccggctccagctctgtagccattcaagtgcagaacctgctccagctcttcgacatcccccagatcgcttattcagccacaagcatcgacctgagtgacaaaactttgtacaaatacttcctgagggttgtcccttctgacactttgcaggcaagggccatgcttgacatagtcaaacgttacaattggacctatgtctctgcagtccacacggaagggaattatggggagagcggaatggacgctttcaaagagctggctgcccaggaaggcctctgtatcgcccattctgacaaaatctacagcaacgctggggagaagagctttgaccgactcttgcgcaaactccgagagaggcttcccaaggctagagtggtggtctgcttctgtgaaggcatgacagtgcgaggactcctgagcgccatgcggcgccttggcgtcgtgggcgagttctcactcattggaagtgatggatgggcagacagagatgaagtcattgaaggttatgaggtggaagccaacgggggaatcacgataaagctgcagtctccagaggtcaggtcatttgatgattatttcctgaaactgaggctggacactaacacgaggaatccctggttccctgagttctggcaacatcggttccagtgccgccttccaggacaccttctggaaaatcccaactttaaacgaatctgcacaggcaatgaaagcttagaagaaaactatgtccaggacagtaagatggggtttgtcatcaatgccatctatgccatggcacatgggctgcagaacatgcaccatgccctctgccctggccacgtgggcctctgcgatgccatgaagcccatcgacggcagcaagctgctggacttcctcatcaagtcctcattcattggagtatctggagaggaggtgtggtttgatgagaaaggagacgctcctggaaggtatgatatcatgaatctgcagtacactgaagctaatcgctatgactatgtgcacgttggaacctggcatgaaggagtgctgaacattgatgattacaaaatccagatgaacaagagtggagtggtgcggtctgtgtgcagtgagccttgcttaaagggccagattaaggttatacggaaaggagaagtgagctgctgctggatttgcacggcctgcaaagagaatgaatatgtgcaagatgagttcacctgcaaagcttgtgacttgggatggtggcccaatgcagatctaacaggctgtgagcccattcctgtgcgctatcttgagtggagcaacatcgaatccattatagccatcgccttttcatgcctgggaatccttgttaccttgtttgtcaccctaatctttgtactgtaccgggacacaccagtggtcaaatcctccagtcgggagctctgctacatcatcctagctggcatcttccttggttatgtgtgcccattcactctcattgccaaacctactaccacctcctgctacctccagcgcctcttggttggcctctcctctgcgatgtgctactctgctttagtgactaaaaccaatcgtattgcacgcatcctggctggcagcaagaagaagatctgcacccggaagcccaggttcatgagtgcctgggctcaggtgatcattgcctcaattctgattagtgtgcaactaaccctggtggtaaccctgatcatcatggaaccccctatgcccattctgtcctacccaagtatcaaggaagtctaccttatctgcaataccagcaacctgggtgtggtggcccctttgggctacaatggactcctcatcatgagctgtacctactatgccttcaagacccgcaacgtgcccgccaacttcaacgaggccaaatatatcgcgttcaccatgtacaccacctgtatcatctggctagcttttgtgcccatttactttgggagcaactacaagatcatcacaacttgctttgcagtgagtctcagtgtaacagtggctctggggtgcatgttcactcccaagatgtacatcattattgccaagcctgagaggaatgtccgcagtgccttcaccacctctgatgttgtccgcatgcatgttggcgatggcaagctgccctgccgctccaacactttcctcaacatcttccgaagaaagaaggcaggggcagggaatgccaagaagaggcagccagaattctcgcccaccagccaatgtccgtcggcacatgtgcagctttgaaaacccccacactgcagtgaatgtttctaatggcaagtctgtgtcatggtctgaaccaggtggaggacaggtgcccaagggacagcatatgtggcaccgcctctctgtgcacgtgaagaccaatgagacggcctgcaaccaaacagccgtcatcaagcccctcactaaaagttaccaaggctctggcaagagcctgaccttttcagataccagcaccaagaccctttacaacgtagaggaggaggaggatgcccagccgattcgctttagcccgcctggtagcccttccatggtggtgcacaggcgcgtgccaagcgcggcgaccactccgcctctgccgtcccacctgaccgcagaggagacccccctcttcctggccgaaccagccctccccaagggcttgccccctcctctccagcagcagcagcaaccccctccacagcagaaatcgctgatggaccagctccagggagtggtcagcaacttcagtaccgcgatcccggattttcacgcggtgctggcaggccccggtggtcccgggaacgggctgcggtccctgtacccgcccccgccacctccgcagcacctgcagatgctgccgctgcagctgagcacctttggggaggagctggtctccccgcccgcggacgacgacgacgacagcgagaggtttaagctcctccaggagtacgtgtatgagcacgagcgggaagggaacacggaagaagacgaactggaagaggaggaggaggacctgcaggcggccagcaaactgaccccggatgattcgcctgcgctgacgcctccgtcgcctttccgcgactcggtggcctcgggcagctcggtgcccagctcccccgtgtccgagtcggtgctctgcacccctcccaacgtatcctacgcctctgtcattctgcgggactacaagcaaagctcttccaccctgtaagggggaagggtccacatagaaaagcaagacaagccagagatctcccacacctccagagatgtgcaaacagctgggaggaaaagcctgggagtggggggcctcgtcgggaggacaggagaccgctgctgctgctgccgctactgctgctgctgccttaagtaggaagagagggaaggacaccaagcaaaaaatgttccaggccaggattcggattcttgaattactcgaagccttctctgggaagaaagggaattctgacaaagcacaattccatatggtatgtaacttttatcacaaatcaaatagtgacatcacaaacataatgtcctcttttgcacaattgtgcatagatatatatatgcccacacacactgggccatgcttgccaaggaacagcccacgtggacatgccagtcggatcatgagttcacctgatggcattcggagtgagctggtggagccagacagagcaggtgcggggaagggaagggcccaggccagacccatcccaaacggatgatgggatgatgggacagcagctccttgctcagaagcccttctccccgctgggctgacagactcctcatcttcaggagactcaggaatggagcggcacaggggtctctcttcatccactgcaacccatccagtgccagctttgagattgcacttgaagaaaggtgcatggaccccctgctgctctgcagattccctttatttaggaaaacaggaataagagcaaaattatcaccaaaaagtgcttcatcaggcgtgctacaggaggaaggagctagaaatagaacaatccatcagcatgagactttgaaaaaaaaacacatgatcagcttctcatgttccatattcacttattggcgatttggggaaaaggccggaacaagagattgttacgagagtggcagaaacccttttgtagattgacttgtgtttgtgccaagcgggctttccattgaccttcagttaaagaacaaaccatgtgacaaaattgttaccttccacttactgtagcaaataatacctacaagttgaacttctaagatgcgtatatgtacaatttggtgccattatttctcctacgtattagagaaacaaatccatctttgaatctaatggtgtactcatagcaactattactggtttaaatgacaaataattctatcctattgtcactgaagtccttgtaactagcgagtgaatgtgttcctgtgtccttgtatatgtgcgatcgtaaaatttgtgcaatgtaatgtcaaattgactggtcaatgtcaacctagtagtcaatctaactgcaattagaaattgtcttttgaatatactatatatattttttatgttccaataatgttttgtacatcattgtcatcaatatctacagaagctctttgacggtttgaatactatggctcaaggttttcatatgcagctcggatggacatttttcttctaagatggaacttatttttcagatattttctgatgtggagatatgttattaatgaagtggtttgaaaatttgttatattaaaagtgcacaaaaactgagagtgaaaataaaaggtacattttataagcttgcacacattattaacacataagattgaacaaagcatttagattattccaggttatatcatttttttaaagattttccacagctacttgagtgtctaacatacagtaacatctaactcagctaataatttgtaaaatctttatcaatcacattttgccttcttttaatttttatgttcatggacttttattcctgtgtcttggctgtcataactttttatttctgctatttgctgttgtgtaatatccatggacatgtaatccacttactccatctttacaatccctttttaccaccaataaaaggatttttcttgctgttttgatttcttctattatttgtggaatgaattataccccccttaaatatctttgtttatgccttatgttcagtcatattttaatatgcttccttcatattgaagctgctgatttctcagccaaaaatcatcttagaatctttaaatatccattgcatcatttgttcagaatttaacatccattccaatgttggaggcttgtattacttatatttcatcatattctattgccaagtttagtcagttccacaccaagaatgaactgcatttcctttaaaaattattttaaaacacctttattgaaaagatctcatgactgagatgtggactttggttccatgttttcattgtaagaaagcagagagcggaaaatcaatggctccagtgattaatagatgggtttttagtaattgacaaattcatgagggaaagcatatgatctctttattagtgaatcatgcttattttttactcttaatgccactaatatacatccctaatatcacagggcttgtgcattcagatttttaaaaaattaggatagataaggaaacaacttatattcaagtgtaagatgatatcaggttggtctaagacttttggtgaacacgttcattcaactgtgatcactttattactctgaatgcctactattatcctgattatggggtctcctgaataaatagagtattagtccttatgtcatcattgttcaaaattggagatgtacacatacataccctataccaagagggccgaaactcttcaccttgatgtatgttctgatacaagttgttcagcttcttgtaaatgtgttttccttcggcttgttactgccttttgtcaaataatcttgacaatgctgtataataaatattttctattt

SEQ ID NO: 12339 - DNA, 3756 bp, Homo sapiens
  source 1..3756: mol_type = unassigned DNA
gctggcaggctgtggacctcgtcctcaccaccatggtcgggctccttttgttttttttcccagcgatctttttggaggtgtcccttctccccagaagccccggcaggaaagtgttgctggcaggagcgtcgtctcagcgctcggtggccagaatggacggagatgtcatcattggagccctcttctcagtccatcaccagcctccggccgagaaagtgcccgagaggaagtgtggggagatcagggagcagtatggcatccagagggtggaggccatgttccacacgttggataagatcaacgcggacccggtcctcctgcccaacatcaccctgggcagtgagatccgggactcctgctggcactcttccgtggctctggaacagagcattgagttcattagggactctctgatttccattcgagatgagaaggatgggatcaaccggtgtctgcctgacggccagtccctccccccaggcaggactaagaagcccattgcgggagtgatcggtcccggctccagctctgtagccattcaagtgcagaacctgctccagctcttcgacatcccccagatcgcttattcagccacaagcatcgacctgagtgacaaaactttgtacaaatacttcctgagggttgtcccttctgacactttgcaggcaagggccatgcttgacatagtcaaacgttacaattggacctatgtctctgcagtccacacggaagggaattatggggagagcggaatggacgctttcaaagagctggctgcccaggaaggcctctgtatcgcccattctgacaaaatctacagcaacgctggggagaagagctttgaccgactcttgcgcaaactccgagagaggcttcccaaggctagagtggtggtctgcttctgtgaaggcatgacagtgcgaggactcctgagcgccatgcggcgccttggcgtcgtgggcgagttctcactcattggaagtgatggatgggcagacagagatgaagtcattgaaggttatgaggtggaagccaacgggggaatcacgataaagctgcagtctccagaggtcaggtcatttgatgattatttcctgaaactgaggctggacactaacacgaggaatccctggttccctgagttctggcaacatcggttccagtgccgccttccaggacaccttctggaaaatcccaactttaaacgaatctgcacaggcaatgaaagcttagaagaaaactatgtccaggacagtaagatggggtttgtcatcaatgccatctatgccatggcacatgggctgcagaacatgcaccatgccctctgccctggccacgtgggcctctgcgatgccatgaagcccatcgacggcagcaagctgctggacttcctcatcaagtcctcattcattggagtatctggagaggaggtgtggtttgatgagaaaggagacgctcctggaaggtatgatatcatgaatctgcagtacactgaagctaatcgctatgactatgtgcacgttggaacctggcatgaaggagtgctgaacattgatgattacaaaatccagatgaacaagagtggagtggtgcggtctgtgtgcagtgagccttgcttaaagggccagattaaggttatacggaaaggagaagtgagctgctgctggatttgcacggcctgcaaagagaatgaatatgtgcaagatgagttcacctgcaaagcttgtgacttgggatggtggcccaatgcagatctaacaggctgtgagcccattcctgtgcgctatcttgagtggagcaacatcgaatccattatagccatcgccttttcatgcctgggaatccttgttaccttgtttgtcaccctaatctttgtactgtaccgggacacaccagtggtcaaatcctccagtcgggagctctgctacatcatcctagctggcatcttccttggttatgtgtgcccattcactctcattgccaaacctactaccacctcctgctacctccagcgcctcttggttggcctctcctctgcgatgtgctactctgctttagtgactaaaaccaatcgtattgcacgcatcctggctggcagcaagaagaagatctgcacccggaagcccaggttcatgagtgcctgggctcaggtgatcattgcctcaattctgattagtgtgcaactaaccctggtggtaaccctgatcatcatggaaccccctatgcccattctgtcctacccaagtatcaaggaagtctaccttatctgcaataccagcaacctgggtgtggtggcccctttgggctacaatggactcctcatcatgagctgtacctactatgccttcaagacccgcaacgtgcccgccaacttcaacgaggccaaatatatcgcgttcaccatgtacaccacctgtatcatctggctagcttttgtgcccatttactttgggagcaactacaagatcatcacaacttgctttgcagtgagtctcagtgtaacagtggctctggggtgcatgttcactcccaagatgtacatcattattgccaagcctgagaggaatgtccgcagtgccttcaccacctctgatgttgtccgcatgcatgttggcgatggcaagctgccctgccgctccaacactttcctcaacatcttccgaagaaagaaggcaggggcagggaatgccaagaagaggcagccagaattctcgcccaccagccaatgtccgtcggcacatgtgcagctttgaaaacccccacactgcagtgaatgtgtggaggacaggtgcccaagggacagcatatgtggcaccgcctctctgtgcacgtgaagaccaatgagacggcctgcaaccaaacagccgtcatcaagcccctcactaaaagttaccaaggctctggcaagagcctgaccttttcagataccagcaccaagaccctttacaacgtagaggaggaggaggatgcccagccgattcgctttagcccgcctggtagcccttccatggtggtgcacaggcgcgtgccaagcgcggcgaccactccgcctctgccgtcccacctgaccgcagaggagacccccctcttcctggccgaaccagccctccccaagggcttgccccctcctctccagcagcagcagcaaccccctccacagcagaaatcgctgatggaccagctccagggagtggtcagcaacttcagtaccgcgatcccggattttcacgcggtgctggcaggccccggtggtcccgggaacgggctgcggtccctgtacccgcccccgccacctccgcagcacctgcagatgctgccgctgcagctgagcacctttggggaggagctggtctccccgcccgcggacgacgacgacgacagcgagaggtttaagctcctccaggagtacgtgtatgagcacgagcgggaagggaacacggaagaagacgaactggaagaggaggaggaggacctgcaggcggccagcaaactgaccccggatgattcgcctgcgctgacgcctccgtcgcctttccgcgactcggtggcctcgggcagctcggtgcccagctcccccgtgtccgagtcggtgctctgcacccctcccaacgtatcctacgcctctgtcattctgcgggactacaagcaaagctcttccaccctgtaagggggaagggtccacatagaaaagcaagacaagccagagatctcccacacctccagagatgtgcaaacagctgggaggaaaagcctggg

SEQ ID NO: 12340 - DNA, 3151 bp, Homo sapiens
  source 1..3151: mol_type = unassigned DNA
gcgcagagccagcgagccagcgagcgagcgagcgggagccggagcctcgcgccccccgctccactccgattctctccgcgccagagccagcgcgccaggagctgggtcccttcgcatctctcttcttgtctgtcctttcctggtccctgtttcctcctctctttgccttcgctgcttctaatctcatcccctggagacccaggtctgcgggacccatccatcccctttggggccatgggatcgctgcttgcgctcctggcactgctgctgctgtggggtgctgtggctgagggcccagccaagaaggtgctgaccctggagggagacttggtgctgggtgggctgttcccagtgcaccagaagggcggcccagcagaggactgtggtcctgtcaatgagcaccgtggcatccagcgcctggaggccatgctttttgcactggaccgcatcaaccgtgacccgcacctgctgcctggcgtgcgcctgggtgcacacatcctcgacagttgctccaaggacacacatgcgctggagcaggcactggactttgtgcgtgcctcactcagccgtggtgctgatggctcacgccacatctgccccgacggctcttatgcgacccatggtgatgctcccactgccatcactggtgttattggcggttcctacagtgatgtctccatccaggtggccaacctcttgaggctatttcagatcccacagattagctacgcctctaccagtgccaagctgagtgacaagtcccgctatgactactttgcccgcacagtgcctcctgacttcttccaagccaaggccatggctgagattctccgcttcttcaactggacctatgtgtccactgtggcgtctgagggcgactatggcgagacaggcattgaggcctttgagctagaggctcgtgcccgcaacatctgtgtggccacctcggagaaagtgggccgtgccatgagccgcgcggcctttgagggtgtggtgcgagccctgctgcagaagcccagtgcccgcgtggctgtcctgttcacccgttctgaggatgcccgggagctgcttgctgccagccagcgcctcaatgccagcttcacctgggtggccagtgatggttggggggccctggagagtgtggtggcaggcagtgagggggctgctgagggtgctatcaccatcgagctggcctcctaccccatcagtgactttgcctcctacttccagagcctggacccttggaacaacagccggaacccctggttccgtgaattctgggagcagaggttccgctgcagcttccggcagcgagactgcgcagcccactctctccgggctgtgccctttgagcaggagtccaagatcatgtttgtggtcaatgcagtgtacgccatggcccatgcgctccacaacatgcaccgtgccctctgccccaacaccacccggctctgtgacgcgatgcggccagttaacgggcgccgcctctacaaggactttgtgctcaacgtcaagtttgatgccccctttcgcccagctgacacccacaatgaggtccgctttgaccgctttggtgatggtattggccgctacaacatcttcacctatctgcgtgcaggcagtgggcgctatcgctaccagaaggtgggctactgggcagaaggcttgactctggacaccagcctcatcccatgggcctcaccctcagccggccccctgcccgcctctcgctgcagtgagccctgcctccagaatgaggtgaagagtgtgcagccgggcgaagtctgctgctggctctgcattccgtgccagccctatgagtaccgattggacgaattcacttgcgctgattgtggcctgggctactggcccaatgccagcctgactggctgcttcgaactgccccaggagtacatccgctggggcgatgcctgggctgtgggacctgtcaccatcgcctgcctcggtgccctggccaccctctttgtgctgggtgtctttgtgcggcacaatgccacaccagtggtcaaggcctcaggtcgggagctctgctacatcctgctgggtggtgtcttcctctgctactgcatgaccttcatcttcattgccaagccatccacggcagtgtgtaccttacggcgtcttggtttgggcactgccttctctgtctgctactcagccctgctcaccaagaccaaccgcattgcacgcatcttcggtggggcccgggagggtgcccagcggccacgcttcatcagtcctgcctcacaggtggccatctgcctggcacttatctcgggccagctgctcatcgtggtcgcctggctggtggtggaggcaccgggcacaggcaaggagacagcccccgaacggcgggaggtggtgacactgcgctgcaaccaccgcgatgcaagtatgttgggctcgctggcctacaatgtgctcctcatcgcgctctgcacgctttatgccttcaagactcgcaagtgccccgaaaacttcaacgaggccaagttcattggcttcaccatgtacaccacctgcatcatctggctggcattcctgcccatcttctatgtcacctccagtgactaccgggtacagaccaccaccatgtgcgtgtcagtcagcctcagcggctccgtggtgcttggctgcctctttgcgcccaagctgcacatcatcctcttccagccgcagaagaacgtggttagccaccgggcacccaccagccgctttggcagtgctgctgccagggccagctccagccttggccaagggtctggctcccagtttgtccccactgtttgcaatggccgtgaggtggtggactcgacaacgtcatcgctttgaagaccccatactcccgccctgacacagctgctcctgggaacctagtgcagacccacgtccagggccaggaggaagttggctggagcactgcaataatttattacccaccctatgtctgcccccaaagtcacttacccacctccttaccccagctcttcagactcagaagtcaggagccttggccaggagcctctgcagtggccactaactgcccttgtagctgtgtttcctcctggccaggcccagggctcagagaggagcaagccagggttcactctgccctggacccgggtggctg

SEQ ID NO: 12341 - DNA, 590 bp, Homo sapiens
  source 1..590: mol_type = unassigned DNA
ctttctgtctgtgcctccgtctttgtctcaacctctcaggcttgctcgctccctgcccagattttgtggcccaggctcctggctgtctgactccgggtttctgtccccttcctgcctctgagcttccgtctgggcctcccctctgggagacttgcgacttgaccagttttggcttcagcccccatctgggtccctgtctccatctgtgctggtcttcctccctgcttctccctcgcttgcctgggagctgggtcccttcgcatctctcttcttgtctgtcctttcctggtccctgtttcctcctctctttgccttcgctgcttctaatctcatcccctggagacccaggtctgcgggacccatccatcccctttggggccatgggatcgctgcttgcgctcctggcactgctgctgctgtggggtgctgtggctgagggcccagccaagaaggtgctgaccctggagggagacttggtgctgggtgggctgttcccagtgcaccagaagggcggcccagcagaggactgtggtcctgtcaatgagcaccgtggcatccagcgcctggaggccatgctttttgcactggac

SEQ ID NO: 12342 - DNA, 4268 bp, Homo sapiens
  source 1..4268: mol_type = unassigned DNA
gtgcagttgagtcgcgagtacggctgagctgcgtaccggcctccctggctctcacactccctctctgctcccgctctcctaatctcctctggcatgcggtcagccccctgcccagggaccacaggagagttcttgtaaggactgttagtccctgcttacctgaaagccaagcgctctagcagagctttaaagttggagccgccaccctccctaccgccccatgccccttcaccccactccgaaattcaccgacctttgcatgcactgcctaaggatttcagagtgaggcaaagcagtcggcaaatctaccctggcttttcgtataaaaatcctctcgtctaggtaccctggctcactgaagactctgcagatatacccttataagagggagggtgggggagggaaaagaacgagagagggaggaaagaatgaaaaggagaggatgccaggaggtccgtgcttctgccaagagtcccaattagatgcgacggcttcagcctggtcaaggtgaaggaaagttgcttccgcgcctaggaagtgggtttgcctgataagagaaggaggaggggactcggctgggaagagctcccctcccctccgcggaagaccactgggtcccctctttccccaacctcctccctctcttctactccacccctccgttttcccactccccactgactcggatgcctggatgttctgccaccgggcagtggtccagcgtgcagccgggagggggcaggggcagggggcactgtgacaggaagctgcgcgcacaagttggccatttcgagggcaaaataagttctcccttggatttggaaaggacaaagccagtaagctacctcttttgtgtcggatgaggaggaccaaccatgagccagagcccgggtgcaggctcaccgccgccgctgccaccgcggtcagctccagttcctgccaggagttgtcggtgcgaggaattttgtgacaggctctgttagtctgttcctcccttatttgaaggacaggccaaagatccagtttggaaatgagagaggactagcatgacacattggctccaccattgatatctcccagaggtacagaaacaggattcatgaagatgttgacaagactgcaagttcttaccttagctttgttttcaaagggatttttactctctttaggggaccataactttctaaggagagagattaaaatagaaggtgaccttgttttagggggcctgtttcctattaacgaaaaaggcactggaactgaagaatgtgggcgaatcaatgaagaccgagggattcaacgcctggaagccatgttgtttgctattgatgaaatcaacaaagatgattacttgctaccaggagtgaagttgggtgttcacattttggatacatgttcaagggatacctatgcattggagcaatcactggagtttgtcagggcatctttgacaaaagtggatgaagctgagtatatgtgtcctgatggatcctatgccattcaagaaaacatcccacttctcattgcaggggtcattggtggctcttatagcagtgtttccatacaggtggcaaacctgctgcggctcttccagatccctcagatcagctacgcatccaccagcgccaaactcagtgataagtcgcgctatgattactttgccaggaccgtgccccccgacttctaccaggccaaagccatggctgagatcttgcgcttcttcaactggacctacgtgtccacagtagcctccgagggtgattacggggagacagggatcgaggccttcgagcaggaagcccgcctgcgcaacatctgcatcgctacggcggagaaggtgggccgctccaacatccgcaagtcctacgacagcgtgatccgagaactgttgcagaagcccaacgcgcgcgtcgtggtcctcttcatgcgcagcgacgactcgcgggagctcattgcagccgccagccgcgccaatgcctccttcacctgggtggccagcgacggctggggcgcgcaggagagcatcatcaagggcagcgagcatgtggcctacggcgccatcaccctggagctggcctcccagcctgtccgccagttcgaccgctacttccagagcctcaacccctacaacaaccaccgcaacccctggttccgggacttctgggagcaaaagtttcagtgcagcctccagaacaaacgcaaccacaggcgcgtctgcgacaagcacctggccatcgacagcagcaactacgagcaagagtccaagatcatgtttgtggtgaacgcggtgtatgccatggcccacgctttgcacaaaatgcagcgcaccctctgtcccaacactaccaagctttgtgatgctatgaagatcctggatgggaagaagttgtacaaggattacttgctgaaaatcaacttcacggctccattcaacccaaataaagatgcagatagcatagtcaagtttgacacttttggagatggaatggggcgatacaacgtgttcaatttccaaaatgtaggtggaaagtattcctacttgaaagttggtcactgggcagaaaccttatcgctagatgtcaactctatccactggtcccggaactcagtccccacttcccagtgcagcgacccctgtgcccccaatgaaatgaagaatatgcaaccaggggatgtctgctgctggatttgcatcccctgtgaaccctacgaatacctggctgatgagtttacctgtatggattgtgggtctggacagtggcccactgcagacctaactggatgctatgaccttcctgaggactacatcaggtgggaagacgcctgggccattggcccagtcaccattgcctgtctgggttttatgtgtacatgcatggttgtaactgtttttatcaagcacaacaacacacccttggtcaaagcatcgggccgagaactctgctacatcttattgtttggggttggcctgtcatactgcatgacattcttcttcattgccaagccatcaccagtcatctgtgcattgcgccgactcgggctggggagttccttcgctatctgttactcagccctgctgaccaagacaaactgcattgcccgcatcttcgatggggtcaagaatggcgctcagaggccaaaattcatcagccccagttctcaggttttcatctgcctgggtctgatcctggtgcaaattgtgatggtgtctgtgtggctcatcctggaggccccaggcaccaggaggtatacccttgcagagaagcgggaaacagtcatcctaaaatgcaatgtcaaagattccagcatgttgatctctcttacctacgatgtgatcctggtgatcttatgcactgtgtacgccttcaaaacgcggaagtgcccagaaaatttcaacgaagctaagttcataggttttaccatgtacaccacgtgcatcatctggttggccttcctccctatattttatgtgacatcaagtgactacagagtgcagacgacaaccatgtgcatctctgtcagcctgagtggctttgtggtcttgggctgtttgtttgcacccaaggttcacatcatcctgtttcaaccccagaagaatgttgtcacacacagactgcacctcaacaggttcagtgtcagtggaactgggaccacatactctcagtcctctgcaagcacgtatgtgccaacggtgtgcaatgggcgggaagtcctcgactccaccacctcatctctgtgattgtgaattgcagttcagttcttgtgtttttagactgttagacaaaagtgctcacgtgcagctccagaatatggaaacagagcaaaagaacaaccctagtacctttttttagaaacagtacgataaattatttttgaggactgtatatagtgatgtgctagaactttctaggctgagtctagtgcccctattattaacaattcccccagaacatggaaataaccattgtttacagagctgagcattggtgacagggtctgacatggtcagtctactaaaaaacaaaaaaaaaaaacaaaaaaaaaaaaacaaaagaaaaaaataaaaatacggtggcaatattatgtaaccttttttcctatgaagttttttgtaggtccttgttgtaactaatttaggatgagtttctatgttgtatattaaagttacattatgtgtaacagattgattttctcagcacaaaataaaaagcatctgtattaatgtaaagatactgagaataaaaccttcaaggttttccagcatggtg

SEQ ID NO: 12343 - DNA, 1811 bp, Homo sapiens
  source 1..1811: mol_type = unassigned DNA
tccagttcctgccaggagttgtcggtgcgaggaattttgtgacaggctctgttagtctgttcctcccttatttgaaggacaggccaaagatccagtttggaaatgagagaggactagcatgacacattggctccaccattgatatctcccagaggtacagaaacaggattcatgaagatgttgacaagactgcaagttcttaccttagctttgttttcaaagggatttttactctctttaggggaccataactttctaaggagagagattaaaatagaaggtgaccttgttttagggggcctgtttcctattaacgaaaaaggcactggaactgaagaatgtgggcgaatcaatgaagaccgagggattcaacgcctggaagccatgttgtttgctattgatgaaatcaacaaagatgattacttgctaccaggagtgaagttgggtgttcacattttggatacatgttcaagggatacctatgcattggagcaatcactggagtttgtcagggcatctttgacaaaagtggatgaagctgagtatatgtgtcctgatggatcctatgccattcaagaaaacatcccacttctcattgcaggggtcattggtggctcttatagcagtgtttccatacaggtggcaaacctgctgcggctcttccagatccctcagatcagctacgcatccaccagcgccaaactcagtgataagtcgcgctatgattactttgccaggaccgtgccccccgacttctaccaggccaaagccatggctgagatcttgcgcttcttcaactggacctacgtgtccacagtagcctccgagggtgattacggggagacagggatcgaggccttcgagcaggaagcccgcctgcgcaacatctgcatcgctacggcggagaaggtgggccgctccaacatccgcaagtcctacgacagcgtgatccgagaactgttgcagaagcccaacgcgcgcgtcgtggtcctcttcatgcgcagcgacgactcgcgggagctcattgcagccgccagccgcgccaatgcctccttcacctgggtggccagcgacggctggggcgcgcaggagagcatcatcaagggcagcgagcatgtggcctacggcgccatcaccctggagctggcctcccagcctgtccgccagttcgaccgctacttccagagcctcaacccctacaacaaccaccgcaacccctggttccgggacttctgggagcaaaagtttcagtgcagcctccagaacaaacgcaaccacaggcgcgtctgcgacaagcacctggccatcgacagcagcaactacgagcaagagtccaagatcatgtttgtggtgaacgcggtgtatgccatggcccacgctttgcacaaaatgcagcgcaccctctgtcccaacactaccaagctttgtgatgctatgaagatcctggatgggaagaagttgtacaaggattacttgctgaaaatcaacttcacgggtgcagacgacaaccatgtgcatctctgtcagcctgagtggctttgtggtcttgggctgtttgtttgcacccaaggttcacatcatcctgtttcaaccccagaagaatgttgtcacacacagactgcacctcaacaggttcagtgtcagtggaactgggaccacatactctcagtcctctgcaagcacgtatgtgccaacggtgtgcaatgggcgggaagtcctcgactccaccacctcatctctgtgattgtgaattgcagttcagttcttgtgtttttagactgttagacaaaagtgctcacgtgcagctccag

SEQ ID NO: 12344 - DNA, 528 bp, Homo sapiens
  source 1..528: mol_type = unassigned DNA
agttcctgccaggagttgtcggtgcgaggtaagggtcccagaggaggacgtgtccctctggagggcgcccagccagggcgcggaagctcgggtgccgcgtggggcaggcgcagccgggaaagttgaggaattttgtgacaggctctgttagtctgttcctcccttatttgaaggacaggccaaagatccagtttggaaatgagagaggactagcatgacacattggctccaccattgatatctcccagaggtacagaaacaggattcatgaagatgttgacaagactgcaagttcttaccttagctttgttttcaaagggatttttactctctttaggggaccataactttctaaggagagagattaaaatagaaggtgaccttgttttagggggcctgtttcctattaacgaaaaaggcactggaactgaagaatgtgggcgaatcaatgaagaccgagggattcaacgcctggaagccatgttgtttgctattgatgaaatcaacaaagatgattacttgctacca

SEQ ID NO: 12345 - DNA, 1811 bp, Homo sapiens; identical to SEQ ID NO: 12343
  source 1..1811: mol_type = unassigned DNA

SEQ ID NO: 12346 - DNA, 491 bp, Homo sapiens
  source 1..491: mol_type = unassigned DNA
acaataatcaagagactacttgttcataagaagaataggctgcaaatgtaacttctattgtcttatcttttcattttttcataatgcaaatatgaccaattaaaaatgaattttgtgacaggctctgttagtctgttcctcccttatttgaaggacaggccaaagatccagtttggaaatgagagaggactagcatgacacattggctccaccattgatatctcccagaggtacagaaacaggattcatgaagatgttgacaagactgcaagttcttaccttagctttgttttcaaagggatttttactctctttaggggaccataactttctaaggagagagattaaaatagaaggtgaccttgttttagggggcctgtttcctattaacgaaaaaggcactggaactgaagaatgtgggcgaatcaatgaagaccgagggattcaacgcctggaagccatgttgtttgctattgatgaaatcaacaaag

SEQ ID NO: 12347 - DNA, 2685 bp, Homo sapiens
  source 1..2685: mol_type = unassigned DNA
gtgcagccgggagggggcaggggcagggggcactgtgacaggaagctgcgcgcacaagttggccatttcgagggcaaaataagttctcccttggatttggaaaggacaaagccagtaagctacctcttttgtgtcggatgaggaggaccaaccatgagccagagcccgggtgcaggctcaccgccgccgctgccaccgcggtcagctccagttcctgccaggagttgtcggtgcgaggtggcaaacctgctgcggctcttccagatccctcagatcagctacgcatccaccagcgccaaactcagtgataagtcgcgctatgattactttgccaggaccgtgccccccgacttctaccaggccaaagccatggctgagatcttgcgcttcttcaactggacctacgtgtccacagtagcctccgagggtgattacggggagacagggatcgaggccttcgagcaggaagcccgcctgcgcaacatctgcatcgctacggcggagaaggtgggccgctccaacatccgcaagtcctacgacagcgtgatccgagaactgttgcagaagcccaacgcgcgcgtcgtggtcctcttcatgcgcagcgacgactcgcgggagctcattgcagccgccagccgcgccaatgcctccttcacctgggtggccagcgacggctggggcgcgcaggagagcatcatcaagggcagcgagcatgtggcctacggcgccatcaccctggagctggcctcccagcctgtccgccagttcgaccgctacttccagagcctcaacccctacaacaaccaccgcaacccctggttccgggacttctgggagcaaaagtttcagtgcagcctccagaacaaacgcaaccacaggcgcgtctgcgacaagcacctggccatcgacagcagcaactacgagcaagagtccaagatcatgtttgtggtgaacgcggtgtatgccatggcccacgctttgcacaaaatgcagcgcaccctctgtcccaacactaccaagctttgtgatgctatgaagatcctggatgggaagaagttgtacaaggattacttgctgaaaatcaacttcacggctccattcaacccaaataaagatgcagatagcatagtcaagtttgacacttttggagatggaatggggcgatacaacgtgttcaatttccaaaatgtaggtggaaagtattcctacttgaaagttggtcactgggcagaaaccttatcgctagatgtcaactctatccactggtcccggaactcagtccccacttcccagtgcagcgacccctgtgcccccaatgaaatgaagaatatgcaaccaggggatgtctgctgctggatttgcatcccctgtgaaccctacgaatacctggctgatgagtttacctgtatggattgtgggtctggacagtggcccactgcagacctaactggatgctatgaccttcctgaggactacatcaggtgggaagacgcctgggccattggcccagtcaccattgcctgtctgggttttatgtgtacatgcatggttgtaactgtttttatcaagcacaacaacacacccttggtcaaagcatcgggccgagaactctgctacatcttattgtttggggttggcctgtcatactgcatgacattcttcttcattgccaagccatcaccagtcatctgtgcattgcgccgactcgggctggggagttccttcgctatctgttactcagccctgctgaccaagacaaactgcattgcccgcatcttcgatggggtcaagaatggcgctcagaggccaaaattcatcagccccagttctcaggttttcatctgcctgggtctgatcctggtgcaaattgtgatggtgtctgtgtggctcatcctggaggccccaggcaccaggaggtatacccttgcagagaagcgggaaacagtcatcctaaaatgcaatgtcaaagattccagcatgttgatctctcttacctacgatgtgatcctggtgatcttatgcactgtgtacgccttcaaaacgcggaagtgcccagaaaatttcaacgaagctaagttcataggttttaccatgtacaccacgtgcatcatctggttggccttcctccctatattttatgtgacatcaagtgactacagagtgcagacgacaaccatgtgcatctctgtcagcctgagtggctttgtggtcttgggctgtttgtttgcacccaaggttcacatcatcctgtttcaaccccagaagaatgttgtcacacacagactgcacctcaacaggttcagtgtcagtggaactgggaccacatactctcagtcctctgcaagcacgtatgtgccaacggtgtgcaatgggcgggaagtcctcgactccaccacctcatctctgtgattgtgaattgcagttcagttcttgtgtttttagactgttagacaaaagtgctcacgtgcagctccagaatatggaaacagagcaaaagaacaaccctagtacctttttttagaaacagtacgataaattatttttgaggactgtatatagtgatgtgctagaactttctaggctgagtctagtgcccctattattaacaattcccccagaacatggaaataaccattgtttacagagctgagcattggtgacagggtctgacatggtcagtctact

SEQ ID NO: 12348 - DNA, 2045 bp, Homo sapiens
  source 1..2045: mol_type = unassigned DNA
aattagatgcgacggcttcagcctggtcaaggtgaaggaaagttgcttccgcgcctaggaagtgggtttgcctgataagagaaggaggaggggactcggctgggaagagctcccctcccctccgcggaagaccactgggtcccctctttccccaacctcctccctctcttctactccacccctccgttttcccactccccactgactcggatgcctggatgttctgccaccgggcagtggtccagcgtgcagccgggagggggcaggggcagggggcactgtgacaggaagctgcgcgcacaagttggccatttcgagggcaaaataagttctcccttggatttggaaaggacaaagccagtaagctacctcttttgtgtcggatgaggaggaccaaccatgagccagagcccgggtgcaggctcaccgccgccgctgccaccgcggtcagctccagttcctgccaggagttgtcggtgcgagctccattcaacccaaataaagatgcagatagcatagtcaagtttgacacttttggagatggaatggggcgatacaacgtgttcaatttccaaaatgtaggtggaaagtattcctacttgaaagttggtcactgggcagaaaccttatcgctagatgtcaactctatccactggtcccggaactcagtccccacttcccagtgcagcgacccctgtgcccccaatgaaatgaagaatatgcaaccaggggatgtctgctgctggatttgcatcccctgtgaaccctacgaatacctggctgatgagtttacctgtatggattgtgggtctggacagtggcccactgcagacctaactggatgctatgaccttcctgaggactacatcaggtgggaagacgcctgggccattggcccagtcaccattgcctgtctgggttttatgtgtacatgcatggttgtaactgtttttatcaagcacaacaacacacccttggtcaaagcatcgggccgagaactctgctacatcttattgtttggggttggcctgtcatactgcatgacattcttcttcattgccaagccatcaccagtcatctgtgcattgcgccgactcgggctggggagttccttcgctatctgttactcagccctgctgaccaagacaaactgcattgcccgcatcttcgatggggtcaagaatggcgctcagaggccaaaattcatcagccccagttctcaggttttcatctgcctgggtctgatcctggtgcaaattgtgatggtgtctgtgtggctcatcctggaggccccaggcaccaggaggtatacccttgcagagaagcgggaaacagtcatcctaaaatgcaatgtcaaagattccagcatgttgatctctcttacctacgatgtgatcctggtgatcttatgcactgtgtacgccttcaaaacgcggaagtgcccagaaaatttcaacgaagctaagttcataggttttaccatgtacaccacgtgcatcatctggttggccttcctccctatattttatgtgacatcaagtgactacagagtgcagacgacaaccatgtgcatctctgtcagcctgagtggctttgtggtcttgggctgtttgtttgcacccaaggttcacatcatcctgtttcaaccccagaagaatgttgtcacacacagactgcacctcaacaggttcagtgtcagtggaactgggaccacatactctcagtcctctgcaagcacgtatgtgccaacggtgtgcaatgggcgggaagtcctcgactccaccacctcatctctgtgattgtgaattgcagttcagttcttgtgtttttagactgttagacaaaagtgctcacgtgcagctccagaatatggaaacagagcaaaagaacaaccctagtacctttttttagaaacagtacgataaattatttttgaggactgtatatagtgatgtgctagaactttctaggctgagtctagtgcccctattattaacaattcccccagaacatggaaataaccattgtttacagagctgagcatt

SEQ ID NO: 12349 - DNA, 3590 bp, Homo sapiens
  source 1..3590: mol_type = unassigned DNA
aatcccagcgctttgctggaggatcgcttgagcccaggaattcaagaccagcctgggcaacatggcgagaccctgtctgtcccaaaacaaaaaaacagattttaattggtttgggatgcggcctggacacagggaaattttaaagctctctaggtaactccaatgtgcgtcgaggttgcgaaccgccggcctgtcacacagagggagctcaggagatgctgagagtgggaggatgccggcttgggagcctggagttgcagcttcctgcggctggcgcgcccctccttgctcccctctacgcctctgcatcgcaccccacccctgtaccccaccttcctcccaccaaggaaacctcacctgccgcctcccgcccaggtcctttggattttgccggtgtgtgtgggtgcgcacaagaggcccctccctgccaggagagcaggtgagcctggccgcgcacgaatccgagggggcggccgcccagctgggaagcagccctgaaatagacccccgccgcccccgctgcctccttccggaatctgctcagataccccagatcagctacgcctccacagcgccagacctgagtgacaacagccgctacgacttcttctcccgcgtggtgccctcggacacgtaccaggcccaggccatggtggacatcgtccgtgccctcaagtggaactatgtgtccacagtggcctcggagggcagctatggtgagagcggtgtggaggccttcatccagaagtcccgtgaggacgggggcgtgtgcatcgcccagtcggtgaagataccacgggagcccaaggcaggcgagttcgacaagatcatccgccgcctcctggagacttcgaacgccagggcagtcatcatctttgccaacgaggatgacatcaggcgtgtgctggaggcagcacgaagggccaaccagacaggccatttcttctggatgggctctgacagctggggctccaagattgcacctgtgctgcacctggaggaggtggctgagggtgctgtcacgatcctccccaagaggatgtccgtacgagaccgtgagcgaattgggcaggattcagcttatgagcaggaggggaaggtgcagtttgtgatcgatgccgtgtacgccatgggccacgcgctgcacgccatgcaccgtgacctgtgtcccggccgcgtggggctctgcccgcgcatggaccctgtagatggcacccagctgcttaagtacatccgaaacgtcaacttctcaggcatcgcagggaaccctgtgaccttcaatgagaatggagatgcgcctgggcgctatgacatctaccaataccagctgcgcaacgattctgccgagtacaaggtcattggctcctggactgaccacctgcaccttagaatagagcggatgcactggccggggagcgggcagcagctgccccgctccatctgcagcctgccctgccaaccgggtgagcggaagaagacagtgaagggcatgccttgctgctggcactgcgagccttgcacagggtaccagtaccaggtggaccgctacacctgtaagacgtgtccctatgacatgcggcccacagagaaccgcacgggctgccggcccatccccatcatcaagcttgagtggggctcgccctgggccgtgctgcccctcttcctggccgtggtgggcatcgctgccacgttgttcgtggtgatcacctttgtgcgctacaacgacacgcccatcgtcaaggcctcgggccgtgaactgagctacgtgctgctggcaggcatcttcctgtgctatgccaccaccttcctcatgatcgctgagcccgaccttggcacctgctcgctgcgccgaatcttcctgggactagggatgagcatcagctatgcagccctgctcaccaagaccaaccgcatctaccgcatcttcgagcagggcaagcgctcggtcagtgccccacgcttcatcagccccgcctcacagctggccatcaccttcagcctcatctcgctgcagctgctgggcatctgtgtgtggtttgtggtggacccctcccactcggtggtggacttccaggaccagcggacactcgacccccgcttcgccaggggtgtgctcaagtgtgacatctcggacctgtcgctcatctgcctgctgggctacagcatgctgctcatggtcacgtgcaccgtgtatgccatcaagacacgcggcgtgcccgagaccttcaatgaggccaagcccattggcttcaccatgtacaccacttgcatcgtctggctggccttcatccccatcttctttggcacctcgcagtcggccgacaagctgtacatccagacgacgacgctgacggtctcggtgagtctgagcgcctcggtgtccctgggaatgctctacatgcccaaagtctacatcatcctcttccacccggagcagaacgtgcccaagcgcaagcgcagcctcaaagccgtcgttacggcggccaccatgtccaacaagttcacgcagaagggcaacttccggcccaacggagaggccaagtctgagctctgcgagaaccttgaggccccagcgctggccaccaaacagacttacgtcacttacaccaaccatgcaatctagcgagtccatggagctgagcagcaggaggaggagccgtgaccctgtggaaggtgcgtcgggccagggccacacccaagggcccagctgtcttgcctgcccgtgggcacccacggacgtggcttggtgctgaggatagcagagcccccagccatcactgctggcagcctgggcaaaccgggtgagcaacaggaggacgaggggccggggcggtgccaggctaccacaagaacctgcgtcttggaccattgcccctcccggccccaaaccacaggggctcaggtcgtgtgggccccagtgctagatctctccctcccttcgtctctgtctgtgctgttggcgacccctctgtctgtctccagccctgtctttctgttctcttatctctttgtttcaccttttccctctctggcgtccccggctgcttgtactcttggccttttctgtgtctcctttctggctcttgcctccgcctctctctctcatcctctttgtcctcagctcctcctgctttcttgggtcccaccagtgtcacttttctgccgttttctttcctgttctcctctgcttcattctcgtccagccattgctcccctctccctgccacccttccccagttcaccaaaccttacatgttgcaaaagagaaaaaaggaaaaaaaatcaaaacacaaaaaagccaaaacgaaaacaaatctcgagtgtgttgccaagtgctgcgtcctcctggtggcctctgtgtgtgtccctgtggcccgcagcctgcccgcctgccccgcccatctgccgtgtgtcttgcccgcctgccccgcccgtctgccgtctgtcttgcccgcctgcccgcctgcccctcctgccgaccacacggagttcagtgcctgggtgtttggtgatggttattgacgacaatgtgtagcgcatgattgtttttataccaagaacatttctaataaaaataaacacatggtttt

SEQ ID NO: 12350 - DNA, 3879 bp, Homo sapiens
  source 1..3879: mol_type = unassigned DNA
ccgagtgacaaggaggtgggagagggtagcagcatgggctacgcggttggctgccctcagtccccctgctgctgaagctgccctgcccatgcccacccaggccgtggggccaggggcctgccagggctaggagtgggcctgccgttcatgggtctctagggatttccgagatgcctgggaagagaggcttgggctggtggtgggcccggctgcccctttgcctgctcctcagcctttacggcccctggatgccttcctccctgggaaagcccaaaggccaccctcacatgaattccatccgcatagatggggacatcacactgggaggcctgttcccggtgcatggccggggctcagagggcaagccctgtggagaacttaagaaggaaaagggcatccaccggctggaggccatgctgttcgccctggatcgcatcaacaacgacccggacctgctgcctaacatcacgctgggcgcccgcattctggacacctgctccagggacacccatgccctcgagcagtcgctgacctttgtgcaggcgctcatcgagaaggatggcacagaggtccgctgtggcagtggcggcccacccatcatcaccaagcctgaacgtgtggtgggtgtcatcggtgcttcagggagctcggtctccatcatggtggccaacatccttcgcctcttcaagataccccagatcagctacgcctccacagcgccagacctgagtgacaacagccgctacgacttcttctcccgcgtggtgccctcggacacgtaccaggcccaggccatggtggacatcgtccgtgccctcaagtggaactatgtgtccacagtggcctcggagggcagctatggtgagagcggtgtggaggccttcatccagaagtcccgtgaggacgggggcgtgtgcatcgcccagtcggtgaagataccacgggagcccaaggcaggcgagttcgacaagatcatccgccgcctcctggagacttcgaacgccagggcagtcatcatctttgccaacgaggatgacatcaggcgtgtgctggaggcagcacgaagggccaaccagacaggccatttcttctggatgggctctgacagctggggctccaagattgcacctgtgctgcacctggaggaggtggctgagggtgctgtcacgatcctccccaagaggatgtccgtacgaggcttcgaccgctacttctccagccgcacgctggacaacaaccggcgcaacatctggtttgccgagttctgggaggacaacttccactgcaagctgagccgccacgccctcaagaagggcagccacgtcaagaagtgcaccaaccgtgagcgaattgggcaggattcagcttatgagcaggaggggaaggtgcagtttgtgatcgatgccgtgtacgccatgggccacgcgctgcacgccatgcaccgtgacctgtgtcccggccgcgtggggctctgcccgcgcatggaccctgtagatggcacccagctgcttaagtacatccgaaacgtcaacttctcaggcatcgcagggaaccctgtgaccttcaatgagaatggagatgcgcctgggcgctatgacatctaccaataccagctgcgcaacgattctgccgagtacaaggtcattggctcctggactgaccacctgcaccttagaatagagcggatgcactggccggggagcgggcagcagctgccccgctccatctgcagcctgccctgccaaccgggtgagcggaagaagacagtgaagggcatgccttgctgctggcactgcgagccttgcacagggtaccagtaccaggtggaccgctacacctgtaagacgtgtccctatgacatgcggcccacagagaaccgcacgggctgccggcccatccccatcatcaagcttgagtggggctcgccctgggccgtgctgcccctcttcctggccgtggtgggcatcgctgccacgttgttcgtggtgatcacctttgtgcgctacaacgacacgcccatcgtcaaggcctcgggccgtgaactgagctacgtgctgctggcaggcatcttcctgtgctatgccaccaccttcctcatgatcgctgagcccgaccttggcacctgctcgctgcgccgaatcttcctgggactagggatgagcatcagctatgcagccctgctcaccaagaccaaccgcatctaccgcatcttcgagcagggcaagcgctcggtcagtgccccacgcttcatcagccccgcctcacagctggccatcaccttcagcctcatctcgctgcagctgctgggcatctgtgtgtggtttgtggtggacccctcccactcggtggtggacttccaggaccagcggacactcgacccccgcttcgccaggggtgtgctcaagtgtgacatctcggacctgtcgctcatctgcctgctgggctacagcatgctgctcatggtcacgtgcaccgtgtatgccatcaagacacgcggcgtgcccgagaccttcaatgaggccaagcccattggcttcaccatgtacaccacttgcatcgtctggctggccttcatccccatcttctttggcacctcgcagtcggccgacaagctgtacatccagacgacgacgctgacggtctcggtgagtctgagcgcctcggtgtccctgggaatgctctacatgcccaaagtctacatcatcctcttccacccggagcagaacgtgcccaagcgcaagcgcagcctcaaagccgtcgttacggcggccaccatgtccaacaagttcacgcagaagggcaacttccggcccaacggagaggccaagtctgagctctgcgagaaccttgaggccccagcgctggccaccaaacagacttacgtcacttacaccaaccatgcaatctagcgagtccatggagctgagcagcaggaggaggagccgtgaccctgtggaaggtgcgtcgggccagggccacacccaagggcccagctgtcttgcctgcccgtgggcacccacggacgtggcttggtgctgaggatagcagagcccccagccatcactgctggcagcctgggcaaaccgggtgagcaacaggaggacgaggggccggggcggtgccaggctaccacaagaacctgcgtcttggaccattgcccctcccggccccaaaccacaggggctcaggtcgtgtgggccccagtgctagatctctccctcccttcgtctctgtctgtgctgttggcgacccctctgtctgtctccagccctgtctttctgttctcttatctctttgtttcaccttttccctctctggcgtccccggctgcttgtactcttggccttttctgtgtctcctttctggctcttgcctccgcctctctctctcatcctctttgtcctcagctcctcctgctttcttgggtcccaccagtgtcacttttctgccgttttctttcctgttctcctctgcttcattctcgtccagccattgctcccctctccctgccacccttccccagttcaccaaaccttacatgttgcaaaagagaaaaaaggaaaaaaaatcaaaacacaaaaaagccaaaacgaaaacaaatctcgagtgtgttgccaagtgctgcgtcctcctggtggcctctgtgtgtgtccctgtggcccgcagcctgcccgcctgccccgcccatctgccgtgtgtcttgcccgcctgccccgcccgtctgccgtctgtcttgcccgcctgcccgcctgcccctcctgccgaccacacggagttcagtgcctgggtgtttggtgatggttattgacgacaatgtgtagcgcatgattgtttttataccaagaacatttctaataaaaataaacacatggttttgca

SEQ ID NO: 12351 - DNA, 2574 bp, Homo sapiens
  source 1..2574: mol_type = unassigned DNA
aaatgccccagtccttccggctggctgcaagatggtgcaaactcttcccaagctatttccccatgatggcgccaagagaaaaaagaggacccttaggacttcagggccatgctttgggggtggaggacagataccccagatcagctacgcctccacagcgccagacctgagtgacaacagccgctacgacttcttctcccgcgtggtgccctcggacacgtaccaggcccaggccatggtggacatcgtccgtgccctcaagtggaactatgtgtccacagtggcctcggagggcagctatggtgagagcggtgtggaggccttcatccagaagtcccgtgaggacgggggcgtgtgcatcgcccagtcggtgaagataccacgggagcccaaggcaggcgagttcgacaagatcatccgccgcctcctggagacttcgaacgccagggcagtcatcatctttgccaacgaggatgacatcaggcgtgtgctggaggcagcacgaagggccaaccagacaggccatttcttctggatgggctctgacagctggggctccaagattgcacctgtgctgcacctggaggaggtggctgagggtgctgtcacgatcctccccaagaggatgtccgtacgaggcttcgaccgctacttctccagccgcacgctggacaacaaccggcgcaacatctggtttgccgagttctgggaggacaacttccactgcaagctgagccgccacgccctcaagaagggcagccacgtcaagaagtgcaccaaccgtgagcgaattgggcaggattcagcttatgagcaggaggggaaggtgcagtttgtgatcgatgccgtgtacgccatgggccacgcgctgcacgccatgcaccgtgacctgtgtcccggccgcgtggggctctgcccgcgcatggaccctgtagatggcacccagctgcttaagtacatccgaaacgtcaacttctcaggcatcgcagggaaccctgtgaccttcaatgagaatggagatgcgcctgggcgctatgacatctaccaataccagctgcgcaacgattctgccgagtacaaggtcattggctcctggactgaccacctgcaccttagaatagagcggatgcactggccggggagcgggcagcagctgccccgctccatctgcagcctgccctgccaaccgggtgagcggaagaagacagtgaagggcatgccttgctgctggcactgcgagccttgcacagggtaccagtaccaggtggaccgctacacctgtaagacgtgtccctatgacatgcggcccacagagaaccgcacgggctgccggcccatccccatcatcaagcttgagtggggctcgccctgggccgtgctgcccctcttcctggccgtggtgggcatcgctgccacgttgttcgtggtgatcacctttgtgcgctacaacgacacgcccatcgtcaaggcctcgggccgtgaactgagctacgtgctgctggcaggcatcttcctgtgctatgccaccaccttcctcatgatcgctgagcccgaccttggcacctgctcgctgcgccgaatcttcctgggactagggatgagcatcagctatgcagccctgctcaccaagaccaaccgcatctaccgcatcttcgagcagggcaagcgctcggtcagtgccccacgcttcatcagccccgcctcacagctggccatcaccttcagcctcatctcgctgcagctgctgggcatctgtgtgtggtttgtggtggacccctcccactcggtggtggacttccaggaccagcggacactcgacccccgcttcgccaggggtgtgctcaagtgtgacatctcggacctgtcgctcatctgcctgctgggctacagcatgctgctcatggtcacgtgcaccgtgtatgccatcaagacacgcggcgtgcccgagaccttcaatgaggccaagcccattggcttcaccatgtacaccacttgcatcgtctggctggccttcatccccatcttctttggcacctcgcagtcggccgacaagctgtacatccagacgacgacgctgacggtctcggtgagtctgagcgcctcggtgtccctgggaatgctctacatgcccaaagtctacatcatcctcttccacccggagcagaacgtgcccaagcgcaagcgcagcctcaaagccgtcgttacggcggccaccatgtccaacaagttcacgcagaagggcaacttccggcccaacggagaggccaagtctgagctctgcgagaaccttgaggccccagcgctggccaccaaacagacttacgtcacttacaccaaccatgcaatctagcgagtccatggagctgagcagcaggaggaggagccgtgaccctgtggaaggtgcgtcgggccagggccacacccaagggcccagctgtcttgcctgcccgtgggcacccacggacgtggcttggtgctgaggatagcagagcccccagccatcactgctggcagcctgggcaaaccgggtgagcaacaggaggacgaggggccggggcggtgccaggctaccac

SEQ ID NO: 12352 - DNA, 3137 bp, Homo sapiens
  source 1..3137: mol_type = unassigned DNA
gcagtgcctgacacatcccagtctttcaccgtggtgcctgtggacagatgaggagactgaggctcacaaaggaggtgacttgcccaaggtcacacagcgaggcagcttctcacctatgggagttggactttgagccctccttggaaaagggggcatggctgtgccccttggggctccttgctgggcctctgccctgcctgcctgggctcctcccggcctcccccacagatcactgttgacaaggttactgagtcagcatgtaaaacctgcaaaaataccccagatcagctacgcctccacagcgccagacctgagtgacaacagccgctacgacttcttctcccgcgtggtgccctcggacacgtaccaggcccaggccatggtggacatcgtccgtgccctcaagtggaactatgtgtccacagtggcctcggagggcagctatggtgagagcggtgtggaggccttcatccagaagtcccgtgaggacgggggcgtgtgcatcgcccagtcggtgaagataccacgggagcccaaggcaggcgagttcgacaagatcatccgccgcctcctggagacttcgaacgccagggcagtcatcatctttgccaacgaggatgacatcaggcgtgtgctggaggcagcacgaagggccaaccagacaggccatttcttctggatgggctctgacagctggggctccaagattgcacctgtgctgcacctggaggaggtggctgagggtgctgtcacgatcctccccaagaggatgtccgtacgaggcttcgaccgctacttctccagccgcacgctggacaacaaccggcgcaacatctggtttgccgagttctgggaggacaacttccactgcaagctgagccgccacgccctcaagaagggcagccacgtcaagaagtgcaccaaccgtgagcgaattgggcaggattcagcttatgagcaggaggggaaggtgcagtttgtgatcgatgccgtgtacgccatgggccacgcgctgcacgccatgcaccgtgacctgtgtcccggccgcgtggggctctgcccgcgcatggaccctgtagatggcacccagctgcttaagtacatccgaaacgtcaacttctcaggcatcgcagggaaccctgtgaccttcaatgagaatggagatgcgcctgggcgctatgacatctaccaataccagctgcgcaacgattctgccgagtacaaggtcattggctcctggactgaccacctgcaccttagaatagagcggatgcactggccggggagcgggcagcagctgccccgctccatctgcagcctgccctgccaaccgggtgagcggaagaagacagtgaagggcatgccttgctgctggcactgcgagccttgcacagggtaccagtaccaggtggaccgctacacctgtaagacgtgtccctatgacatgcggcccacagagaaccgcacgggctgccggcccatccccatcatcaagcttgagtggggctcgccctgggccgtgctgcccctcttcctggccgtggtgggcatcgctgccacgttgttcgtggtgatcacctttgtgcgctacaacgacacgcccatcgtcaaggcctcgggccgtgaactgagctacgtgctgctggcaggcatcttcctgtgctatgccaccaccttcctcatgatcgctgagcccgaccttggcacctgctcgctgcgccgaatcttcctgggactagggatgagcatcagctatgcagccctgctcaccaagaccaaccgcatctaccgcatcttcgagcagggcaagcgctcggtcagtgccccacgcttcatcagccccgcctcacagctggccatcaccttcagcctcatctcgctgcagctgctgggcatctgtgtgtggtttgtggtggacccctcccactcggtggtggacttccaggaccagcggacactcgacccccgcttcgccaggggtgtgctcaagtgtgacatctcggacctgtcgctcatctgcctgctgggctacagcatgctgctcatggtcacgtgcaccgtgtatgccatcaagacacgcggcgtgcccgagaccttcaatgaggccaagcccattggcttcaccatgtacaccacttgcatcgtctggctggccttcatccccatcttctttggcacctcgcagtcggccgacaagctgtacatccagacgacgacgctgacggtctcggtgagtctgagcgcctcggtgtccctgggaatgctctacatgcccaaagtctacatcatcctcttccacccggagcagaacgtgcccaagcgcaagcgcagcctcaaagccgtcgttacggcggccaccatgtccaacaagttcacgcagaagggcaacttccggcccaacggagaggccaagtctgagctctgcgagaaccttgaggccccagcgctggccaccaaacagacttacgtcacttacaccaaccatgcaatctagcgagtccatggagctgagcagcaggaggaggagccgtgaccctgtggaaggtgcgtcgggccagggccacacccaagggcccagctgtcttgcctgcccgtgggcacccacggacgtggcttggtgctgaggatagcagagcccccagccatcactgctggcagcctgggcaaaccgggtgagcaacaggaggacgaggggccggggcggtgccaggctaccacaagaacctgcgtcttggaccattgcccctcccggccccaaaccacaggggctcaggtcgtgtgggccccagtgctagatctctccctcccttcgtctctgtctgtgctgttggcgacccctctgtctgtctccagccctgtctttctgttctcttatctctttgtttcaccttttccctctctggcgtccccggctgcttgtactcttggccttttctgtgtctcctttctggctcttgcctccgcctctctctctcatcctctttgtcctcagctcctcctgctttcttgggtcccaccagtgtcacttttctgccgttttctttcctgttctcctctgcttcattctcgtccagccattgctcccctctccctgccacccttccccagttcaccaaaccttacatgttgcaaaagag

SEQ ID NO: 12353 - DNA, 3409 bp, Homo sapiens
  source 1..3409: mol_type = unassigned DNA
ttttctgggtgtgtgttagggaggctatgttcctgaccctccccctctggggtgagaaggggtccccgccatgtcctcggggttggtaggaggagaggattggagctgttttctccttgatgccaagatacgccaagctaggagcattctgccctttccacagtcatccaccgagaacaggcctgcaggacgggacaaggatcagagccttcctgcaaccccggccactgcctgctgtctgtgggcctggactgtgcgggcaactgtgcttggcccgagtgacaaggaggtgggagagggtagcagcatgggctacgcggttggctgccctcagtccccctgctgctgaagctgccctgcccatgcccacccaggccgtggggccaggggcctgccagggctaggagtgggcctgccgttcatgggtctctagggatttccgagatgcctgggaagagaggcttgggctggtggtgggcccggctgcccctttgcctgctcctcagcctttacggcccctggatgccttcctccctgggaaagcccaaaggccaccctcacatgaattccatccgcatagatggggacatcacactgggaggcctgttcccggtgcatggccggggctcagagggcaagccctgtggagaacttaagaaggaaaagggcatccaccggctggaggccatgctgttcgccctggatcgcatcaacaacgacccggacctgctgcctaacatcacgctgggcgcccgcattctggacacctgctccagggacacccatgccctcgagcagtcgctgacctttgtgcaggcgctcatcgagaaggatggcacagaggtccgctgtggcagtggcggcccacccatcatcaccaagcctgaacgtgtggtgggtgtcatcggtgcttcagggagctcggtctccatcatggtggccaacatccttcgcctcttcaagataccccagatcagctacgcctccacagcgccagacctgagtgacaacagccgctacgacttcttctcccgcgtggtgccctcggacacgtaccaggcccaggccatggtggacatcgtccgtgccctcaagtggaactatgtgtccacagtggcctcggagggcagctatggtgagagcggtgtggaggccttcatccagaagtcccgtgaggacgggggcgtgtgcatcgcccagtcggtgaagataccacgggagcccaaggcaggcgagttcgacaagatcatccgccgcctcctggagacttcgaacgccagggcagtcatcatctttgccaacgaggatgacatcaggcgtgtgctggaggcagcacgaagggccaaccagacaggccatttcttctggatgggctctgacagctggggctccaagattgcacctgtgctgcacctggaggaggtggctgagggtgctgtcacgatcctccccaagaggatgtccgtacgaggcttcgaccgctacttctccagccgcacgctggacaacaaccggcgcaacatctggtttgccgagttctgggaggacaacttccactgcaagctgagccgccacgccctcaagaagggcagccacgtcaagaagtgcaccaaccgtgagcgaattgggcaggattcagcttatgagcaggaggggaaggtgcagtttgtgatcgatgccgtgtacgccatgggccacgcgctgcacgccatgcaccgtgacctgtgtcccggccgcgtggggctctgcccgcgcatggaccctgtagatggcacccagctgcttaagtacatccgaaacgtcaacttctcaggcatcgcagggaaccctgtgaccttcaatgagaatggagatgcgcctgggcgctatgacatctaccaataccagctgcgcaacgattctgccgagtacaaggtcattggctcctggactgaccacctgcaccttagaatagagcggatgcactggccggggagcgggcagcagctgccccgctccatctgcagcctgccctgccaaccgggtgagcggaagaagacagtgaagggcatgccttgctgctggcactgcgagccttgcacagggtaccagtaccaggtggaccgctacacctgtaagacgtgtccctatgacatgcggcccacagagaaccgcacgggctgccggcccatccccatcatcaagcttgagtggggctcgccctgggccgtgctgcccctcttcctggccgtggtgggcatcgctgccacgttgttcgtggtgatcacctttgtgcgctacaacgacacgcccatcgtcaaggcctcgggccgtgaactgagctacgtgctgctggcaggcatcttcctgtgctatgccaccaccttcctcatgatcgctgagcccgaccttggcacctgctcgctgcgccgaatcttcctgggactagggatgagcatcagctatgcagccctgctcaccaagaccaaccgcatctaccgcatcttcgagcagggcaagcgctcggtcagtgccccacgcttcatcagccccgcctcacagctggccatcaccttcagcctcatctcgctgcagctgctgggcatctgtgtgtggtttgtggtggacccctcccactcggtggtggacttccaggaccagcggacactcgacccccgcttcgccaggggtgtgctcaagtgtgacatctcggacctgtcgctcatctgcctgctgggctacagcatgctgctcatggtcacgtgcaccgtgtatgccatcaagacacgcggcgtgcccgagaccttcaatgaggccaagcccattggcttcaccatgtacaccacttgcatcgtctggctggccttcatccccatcttctttggcacctcgcagtcggccgacaagctgtacatccagacgacgacgctgacggtctcggtgagtctgagcgcctcggtgtccctgggaatgctctacatgcccaaagtctacatcatcctcttccacccggagcagaacgtgcccaagcgcaagcgcagcctcaaagccgtcgttacggcggccaccatgtccaacaagttcacgcagaagggcaacttccggcccaacggagaggccaagtctgagctctgcgagaaccttgaggccccagcgctggccaccaaacagacttacgtcacttacaccaaccatgcaatctagcgagtccatggagctgagcagcaggaggaggagccgtgaccctgtggaaggtgcgtcgggccagggccacacccaagggcccagctgtcttgcctgcccgtgggcacccacggacgtggcttggtgctgaggatagcagagcccccagccatcactgctggcagcctgggcaaaccgggtgagcaacaggaggacgaggggccggggcggtgccaggctaccacaa

SEQ ID NO: 12354 - DNA, 2712 bp, Homo sapiens
  source 1..2712: mol_type = unassigned DNA
gatgccctggggactcacgggctgcaggtgctaccagcccagcaccccggcacagcggggaggctgaggcagacacacgctcctggagagacatgtcatgtaagataccccagatcagctacgcctccacagcgccagacctgagtgacaacagccgctacgacttcttctcccgcgtggtgccctcggacacgtaccaggcccaggccatggtggacatcgtccgtgccctcaagtggaactatgtgtccacagtggcctcggagggcagctatggtgagagcggtgtggaggccttcatccagaagtcccgtgaggacgggggcgtgtgcatcgcccagtcggtgaagataccacgggagcccaaggcaggcgagttcgacaagatcatccgccgcctcctggagacttcgaacgccagggcagtcatcatctttgccaacgaggatgacatcaggcgtgtgctggaggcagcacgaagggccaaccagacaggccatttcttctggatgggctctgacagctggggctccaagattgcacctgtgctgcacctggaggaggtggctgagggtgctgtcacgatcctccccaagaggatgtccgtacgaggcttcgaccgctacttctccagccgcacgctggacaacaaccggcgcaacatctggtttgccgagttctgggaggacaacttccactgcaagctgagccgccacgccctcaagaagggcagccacgtcaagaagtgcaccaaccgtgagcgaattgggcaggattcagcttatgagcaggaggggaaggtgcagtttgtgatcgatgccgtgtacgccatgggccacgcgctgcacgccatgcaccgtgacctgtgtcccggccgcgtggggctctgcccgcgcatggaccctgtagatggcacccagctgcttaagtacatccgaaacgtcaacttctcaggcatcgcagggaaccctgtgaccttcaatgagaatggagatgcgcctgggcgctatgacatctaccaataccagctgcgcaacgattctgccgagtacaaggtcattggctcctggactgaccacctgcaccttagaatagagcggatgcactggccggggagcgggcagcagctgccccgctccatctgcagcctgccctgccaaccgggtgagcggaagaagacagtgaagggcatgccttgctgctggcactgcgagccttgcacagggtaccagtaccaggtggaccgctacacctgtaagacgtgtccctatgacatgcggcccacagagaaccgcacgggctgccggcccatccccatcatcaagcttgagtggggctcgccctgggccgtgctgcccctcttcctggccgtggtgggcatcgctgccacgttgttcgtggtgatcacctttgtgcgctacaacgacacgcccatcgtcaaggcctcgggccgtgaactgagctacgtgctgctggcaggcatcttcctgtgctatgccaccaccttcctcatgatcgctgagcccgaccttggcacctgctcgctgcgccgaatcttcctgggactagggatgagcatcagctatgcagccctgctcaccaagaccaaccgcatctaccgcatcttcgagcagggcaagcgctcggtcagtgccccacgcttcatcagccccgcctcacagctggccatcaccttcagcctcatctcgctgcagctgctgggcatctgtgtgtggtttgtggtggacccctcccactcggtggtggacttccaggaccagcggacactcgacccccgcttcgccaggggtgtgctcaagtgtgacatctcggacctgtcgctcatctgcctgctgggctacagcatgctgctcatggtcacgtgcaccgtgtatgccatcaagacacgcggcgtgcccgagaccttcaatgaggccaagcccattggcttcaccatgtacaccacttgcatcgtctggctggccttcatccccatcttctttggcacctcgcagtcggccgacaagctgtacatccagacgacgacgctgacggtctcggtgagtctgagcgcctcggtgtccctgggaatgctctacatgcccaaagtctacatcatcctcttccacccggagcagaacgtgcccaagcgcaagcgcagcctcaaagccgtcgttacggcggccaccatgtccaacaagttcacgcagaagggcaacttccggcccaacggagaggccaagtctgagctctgcgagaaccttgaggccccagcgctggccaccaaacagacttacgtcacttacaccaaccatgcaatctagcgagtccatggagctgagcagcaggaggaggagccgtgaccctgtggaaggtgcgtcgggccagggccacacccaagggcccagctgtcttgcctgcccgtgggcacccacggacgtggcttggtgctgaggatagcagagcccccagccatcactgctggcagcctgggcaaaccgggtgagcaacaggaggacgaggggccggggcggtgccaggctaccacaagaacctgcgtcttggaccattgcccctcccggccccaaaccacaggggctcaggtcgtgtgggccccagtgctagatctctccctcccttcgtctctgtctgtgctgttggcgacccctctgtctgtctccagccctgtctttctgttctcttatctctttg

SEQ ID NO: 12355 - DNA, 3471 bp, Homo sapiens
  source 1..3471: mol_type = unassigned DNA
agtaaacatgctcttctctagcacttgggacttcttggtgtcttaggagagacctgaggagctgtgtgtgtgtgtgcacgcacatgtgcgtgtgtgtgcatgcgtgtgtgtgtgttgtgtcctgtggccccaggccagcagggtgcctggcacagagcagccactccttccagagcgtaccctgttctctccagaatgcctgccgcctggccacttgcatcctctgaggactcagcccagtgtcactgcctttgggcagccttccctggcggccatctccctgcccacagggggcgtgtgcatcgcccagtcggtgaagataccacgggagcccaaggcaggcgagttcgacaagatcatccgccgcctcctggagacttcgaacgccagggcagtcatcatctttgccaacgaggatgacatcaggcgtgtgctggaggcagcacgaagggccaaccagacaggccatttcttctggatgggctctgacagctggggctccaagattgcacctgtgctgcacctggaggaggtggctgagggtgctgtcacgatcctccccaagaggatgtccgtacgaggcttcgaccgctacttctccagccgcacgctggacaacaaccggcgcaacatctggtttgccgagttctgggaggacaacttccactgcaagctgagccgccacgccctcaagaagggcagccacgtcaagaagtgcaccaaccgtgagcgaattgggcaggattcagcttatgagcaggaggggaaggtgcagtttgtgatcgatgccgtgtacgccatgggccacgcgctgcacgccatgcaccgtgacctgtgtcccggccgcgtggggctctgcccgcgcatggaccctgtagatggcacccagctgcttaagtacatccgaaacgtcaacttctcaggcatcgcagggaaccctgtgaccttcaatgagaatggagatgcgcctgggcgctatgacatctaccaataccagctgcgcaacgattctgccgagtacaaggtcattggctcctggactgaccacctgcaccttagaatagagcggatgcactggccggggagcgggcagcagctgccccgctccatctgcagcctgccctgccaaccgggtgagcggaagaagacagtgaagggcatgccttgctgctggcactgcgagccttgcacagggtaccagtaccaggtggaccgctacacctgtaagacgtgtccctatgacatgcggcccacagagaaccgcacgggctgccggcccatccccatcatcaagcttgagtggggctcgccctgggccgtgctgcccctcttcctggccgtggtgggcatcgctgccacgttgttcgtggtgatcacctttgtgcgctacaacgacacgcccatcgtcaaggcctcgggccgtgaactgagctacgtgctgctggcaggcatcttcctgtgctatgccaccaccttcctcatgatcgctgagcccgaccttggcacctgctcgctgcgccgaatcttcctgggactagggatgagcatcagctatgcagccctgctcaccaagaccaaccgcatctaccgcatcttcgagcagggcaagcgctcggtcagtgccccacgcttcatcagccccgcctcacagctggccatcaccttcagcctcatctcgctgcagctgctgggcatctgtgtgtggtttgtggtggacccctcccactcggtggtggacttccaggaccagcggacactcgacccccgcttcgccaggggtgtgctcaagtgtgacatctcggacctgtcgctcatctgcctgctgggctacagcatgctgctcatggtcacgtgcaccgtgtatgccatcaagacacgcggcgtgcccgagaccttcaatgaggccaagcccattggcttcaccatgtacaccacttgcatcgtctggctggccttcatccccatcttctttggcacctcgcagtcggccgacaagctgtacatccagacgacgacgctgacggtctcggtgagtctgagcgcctcggtgtccctgggaatgctctacatgcccaaagtctacatcatcctcttccacccggagcagaacgtgcccaagcgcaagcgcagcctcaaagccgtcgttacggcggccaccatgtccaacaagttcacgcagaagggcaacttccggcccaacggagaggccaagtctgagctctgcgagaaccttgaggccccagggagctcataggccactgactccacccaactctggccaggagaaaattcttcctttaactgagctggaccctgaccttcatgcctccctactggtcccatggtggacccctctgctcaccccatcctcaagcagtttgcttcgtccacatgtgatagactgatagttggacaccaaacttctgcctgtgttagtgggcttccagttacactgctgtgacaaagaggtcccagaactgagcagctcaaatcagacagatgtttgttgctctctgccgtaataggacatggtgggtgggtgggagtgaggacccaggatccttccatcttgttgctccattggctccctgaagattgaggctagatgacctcaatggttgttctgctcatggaagggaaaagagaagacgcatgggggaaagacccattttaattgaatgacatgggagctgcacacagtccttccatgtgtatttcatgaggaagaacacagtcagcgctggccaccaaacagacttacgtcacttacaccaaccatgcaatctagcgagtccatggagctgagcagcaggaggaggagccgtgaccctgtggaaggtgcgtcgggccagggccacacccaagggcccagctgtcttgcctgcccgtgggcacccacggacgtggcttggtgctgaggatagcagagcccccagccatcactgctggcagcctgggcaaaccgggtgagcaacaggaggacgaggggccggggcggtgccaggctaccacaagaacctgcgtcttggaccattgcccctcccggccccaaaccacaggggctcaggtcgtgtgggccccagtgctagatctctccctcccttcgtctctgtctgtgctgttggcgacccctctgtctgtctccagccctgtctttctgttctcttatctctttgtttcaccttttccctctctggcgtccccggctgcttgtactcttggccttttctgtgtctcctttctggctcttgcctccgcctctctctctcatcctctttgtcctcagctcctcctgctttcttgggtcccaccagtgtcacttttctgccgttttctttcctgttctcctctgcttcattctcgtccagccattgctcccctctccctgccacccttccccagttcaccaaaccttacatgttgcaaaagagaaaaaaggaaaaaaaatcaaaacacaaaaaagccaaaacg

SEQ ID NO: 12356 - DNA, 6143 bp, Homo sapiens
  source 1..6143: mol_type = unassigned DNA
cggaggcccgggcaggccggctgagctaactccccagagccgaagtggaaggcgcgccccgagcgccttctccccaggaccccggtgtccctccccgcgccccgagcccgcgctctccttcccccgccctcagagcgctccccgcccctctgtctccccgcagcccgctagacgagccgatggcgcggccccggagagcccgggagccgctgctcgtggcgctgctgccgctggcgtggctggcgcaggcgggcctggcgcgcgcggcgggctctgtgcgcctggcgggcggcctgacgctgggcggcctgttcccggtgcacgcgcggggcgcggcgggccgggcgtgcgggcagctgaagaaggagcagggcgtgcaccggctggaggccatgctgtacgcgctggaccgcgtcaacgccgaccccgagctgctgcccggcgtgcgcctgggcgcgcggctgctggacacctgctcgcgggacacctacgcgctggagcaggcgctgagcttcgtgcaggcgctgatccgcggccgcggcgacggcgacgaggtgggcgtgcgctgcccgggaggcgtccctccgctgcgccccgcgccccccgagcgcgtcgtggccgtcgtgggcgcctcggccagctccgtctccatcatggtcgccaacgtgctgcgcctgtttgcgataccccagatcagctatgcctccacagccccggagctcagcgactccacacgctatgacttcttctcccgggtggtgccacccgactcctaccaggcgcaggccatggtggacatcgtgagggcactgggatggaactatgtgtccacgctggcctccgagggcaactatggcgaaagtggggttgaggccttcgttcagatctcccgagaggctgggggggtctgtattgcccagtctatcaagattcccagggaaccaaagccaggagagttcagcaaggtgatcaggagactcatggagacgcccaacgcccggggcatcatcatctttgccaatgaggatgacatcaggcgggtcctggaggcagctcgccaggccaacctgaccggccacttcctgtgggtcggctcagacagctggggagccaagacctcacccatcttgagcctggaggacgtggccgttggggccatcaccatcctgcccaaaagggcctccatcgacggatttgaccagtacttcatgactcgatccctggagaacaaccgcaggaacatctggttcgccgagttctgggaagagaattttaactgcaaactgaccagctcaggtacccagtcagacgattccacccgcaaatgcacaggcgaggaacgcatcggccgggactccacctacgagcaggagggcaaggtgcagtttgtgattgatgcggtgtacgccattgcccacgccctccacagcatgcaccaggcgctctgccctgggcacacaggcctgtgcccggcgatggaacccactgatgggcggatgcttctgcagtacattcgagctgtccgcttcaatggcagcgcaggaacccctgtgatgttcaacgagaacggagatgcgcccgggcggtacgacatcttccagtaccaggcgaccaatggcagtgccagcagtggcgggtaccaggcagtgggccagtgggcagagaccctcagactggatgtggaggccctgcagtggtctggcgacccccacgaggtgccctcgtctctgtgcagcctgccctgcgggccgggggagcggaagaagatggtgaagggcgtcccctgctgttggcactgcgaggcctgtgacgggtaccgcttccaggtggacgagttcacatgcgaggcctgtcctggggacatgaggcccacgcccaaccacacgggctgccgccccacacctgtggtgcgcctgagctggtcctccccctgggcagccccgccgctcctcctggccgtgctgggcatcgtggccactaccacggtggtggccaccttcgtgcggtacaacaacacgcccatcgtccgggcctcgggccgagagctcagctacgtcctcctcaccggcatcttcctcatctacgccatcaccttcctcatggtggctgagcctggggccgcggtctgtgccgcccgcaggctcttcctgggcctgggcacgaccctcagctactctgccctgctcaccaagaccaaccgtatctaccgcatctttgagcagggcaagcgctcggtcacaccccctcccttcatcagccccacctcacagctggtcatcaccttcagcctcacctccctgcaggtggtggggatgatagcatggctgggggcccggcccccacacagcgtgattgactatgaggaacagcggacggtggaccccgagcaggccagaggggtgctcaagtgcgacatgtcggatctgtctctcatcggctgcctgggctacagcctcctgctcatggtcacgtgcacagtgtacgccatcaaggcccgtggcgtgcccgagaccttcaacgaggccaagcccatcggcttcaccatgtacaccacctgcatcatctggctggcattcgtgcccatcttctttggcactgcccagtcagctgaaaagatctacatccagacaaccacgctaaccgtgtccttgagcctgagtgcctcggtgtccctcggcatgctctacgtacccaaaacctacgtcatcctcttccatccagagcagaatgtgcagaagcgaaagcggagcctcaaggccacctccacggtggcagccccacccaagggcgaggatgcagaggcccacaagtagcagggcaggtgggaacgggactgcttgctgcctctcctttcttcctcttgcctcgaggtggaagctgtatagagcccgggtccacggtgaacagtcagtggcagggagtttgccaagaccatgctccgcgtcggtggggctggccttgagaaggaactggacccagctctaccccgattccagcatgtgagcttcatgcttcctcaccacagaccagactcgcttcccatggtgggaaacagccaccgagaaggttctagctctagaaagggactaaacttattctctcatccgaagtccaaagaggatgatgaagccctgggctttgcctggtttgcgggagatttcctcccctcagtcaacccccataacctggggattgggcagtgtggaagaacgtgtagaccccagaatgaaacatggggttggagtggaggaggagctgtctcagcaagaggagacctggggctgtgcatctggatggaggcactcaggcctgggtaggattcctctggcacggagggagagaccctgggtgagacccctgtgagcatgggaagggcctgcagtgggcgcgggagtgagctgaggaactggggtgcgcccccatgagattcccaatgccatgggctttcccccatccccccgggattgggcaaggtcagacttagagtacagctgttttcctcccctctgtgtactcccttaaatcaccccaaccttggccaggcatggtggctcacacctgtaatcccagcactttgggaggccgaggcaggtggatcacctgaggtccggagttcgagaccagcctggccaatgtggtgaaaccctgtctctactaaaaatacaaaaattagccaggtgtgatggtgggtgcctgtaatcccagttacttgggaggctgaggcaggagaatcgcttgaacctgggaggtggaggttgcagtgagctgtgattgtgccactgtactccagcctgggtgacagagcgagactctgtctcaaaaaaacaaaacaaaaaaacaccaaaaaaacccccaaacctgaagaaattcagatacacgtgtgtaatgttagtgatgtgagaacaaggagcaggggtgcatttgtgttgtgttcgggttggggatgggtttaggagctccaggttgggagcagtgacagagagtcatggccgtggtgagggtgaatcccaagtggatggctcaggacgggtatggaaacccttcattcctcataggtactgggaagtccatttgcaagctgagcgccaggcctggggaggaagaggcttgggctgcagatgcacgcacatttgtttttcactgatagtttttacaaaaagcttggtttaagttatggagttttatgtccctgggagtagaatttacatttgttaaattgaccactgtttaagatcagtatacattctctagtctgtgatgtctggagctagttttgagggtgaaccacactttatccaacatacaaactttcccatgcagcttctctggtgcgcagttggttttgaccgtgggactaggtgcttctgcaggttttaagtaattaacttaaaagcttctcctctgagaaacatttctgttgcgctactgactctccttctccacatttgttgtgttcctagggcttctctatagtgcacattaggacgtttcatttgttgctgaatgctttccagaattatttattccatagggtttctctcctgtgcagctctctcatgggtaatggggcgtgttttcttgccaaaggcggttccaccctcgtgattgtatagggctcttctcctgtatgaactctgagatcagtgagctctgatctccaagggaaagttttcctgcatttgctgttttctcatgtctctcccagtgtgaattctttggtgtgcagtgcgctctggcttctagctgaaaacttttccacagttttacattcatgtggttttctccactgtgaactctgtgattcagaatcagaagcagttcttagtagaggcatttctacactgattgcactgaggatttctccccagtgtgaagtttctggcatagagtcctggcttcccgcagacgactttcacactctgccatgttcatgcctgtgggcctctctggcaggaactctgatgcaccgcgaggcccatgtactcctgtggctttctcacattcggtctacttgcagggtatctccacagcatgcaccattctgggtacagggggacatcctctgttactgaagatgttgtcatatttagtaccttcacaaggtttctctccttccagaattttctgatgtacacaaataactgacttccacaagagggcttttccacactcggtgtgtgcatacagtttctgcctgtgatcatttctttatgttattattttattttttcgagatagggtcttgctcaatttcttaggctggagtgcagtggcacgatcatagctcactgaagtttcgacctgggctcaagcaatcctcccgcttcagcctcctgagtagctggtgcgcacgaccatacccagctaatgttttattttttgtagagacgaggtctcactatgttgcccaggctggtctcgaacttctgagctcgagcgatcctcctgcctccacctcccaaagtgttcggattacaaacgtgagccatcgcacctagcctctttgatcatttctgtggtgttcagtggaggttgacagctccctaaagattttcctgtttttttgcatgcatgggtttgaattctttgaggtccaatttatttggacccctgaataaagttttgtgggttttcttctatgtgtggaatttataaggcattcttccagtgtggtttctcttatgtcgagtgagagctgacctgcaccgaaggttttgtcccatttgttgcccttgaattatttgtatgaattatatgttccagtgaaaatggagttctgggttggaggcttattccatgtttacacaattaaaattgcagtgttcctctctgggatgagagctctaaagcagagtaagattacgttctgatgtaagctttaaccacctatttataaggtctcacctgtggtccactgtgttgagacttctacagaagagcttctgtatagtaaccattttcttaggctgtctcacttgtgtgaatcttctgacacatttattatagctttgtcccatttcttatcctttttgctctttagaaatttccctttaatttattacattcattgcttactgtaaagagtccaggtaactgactttattcagttacttcctgttcaataaatttaacttttcccaaaa

SEQ ID NO: 12357 - DNA, 3273 bp, Homo sapiens
  source 1..3273: mol_type = unassigned DNA
atgcagctggatgggctgcaggccctctgctgggggtccttgttcaggacacagcttgtaccagtatatgtggcggtcctgccctctccccagccctgcatacctcccacctgcacagcattcacggaattctcaggcccactcgcaaaacaccacagcttccagcctttccaggtggctgctccagctggccccaggtccccaccccaacccttccatctcccatctgtgtcccaggtccatgccacacaccttctgtgccccgtccgtgtcctgggccccccttaccctccctctcttgagttactgacctccatccacagcccagctgtccttcctgccccacagataccccagatcagctatgcctccacagccccggagctcagcgactccacacgctatgacttcttctcccgggtggtgccacccgactcctaccaggcgcaggccatggtggacatcgtgagggcactgggatggaactatgtgtccacgctggcctccgagggcaactatggcgaaagtggggttgaggccttcgttcagatctcccgagaggctggtgagctgggggctccgaggcaccaaggagtctacatagtgtgggcccggggccctcagttggggcagaagcagaaagatggggggcccaggtccatgctgggccgaggttgcctggctggtgctccatgtgggcgggacctctttgttttggacgactcagccctgcctcaggcttggcggagggtgcaggccagacttcacccctgcagacccttcagccagcctacacagtcctctgcagcggtggccaggtggtctatcaagattcccagggaaccaaagccaggagagttcagcaaggtgatcaggagactcatggagacgcccaacgcccggggcatcatcatctttgccaatgaggatgacatcagccctgctcctaccaggcgggtcctggaggcagctcgccaggccaacctgaccggccacttcctgtgggtcggctcagacagctggggagccaagacctcacccatcttgagcctggaggacgtggccgttggggccatcaccatcctgcccaaaagggcctccatcgacggatttgaccagtacttcatgactcgatccctggagaacaaccgcaggaacatctggttcgccgagttctgggaagagaattttaactgcaaactgaccagctcaggtacccagtcagacgattccacccgcaaatgcacaggtgagagctgcccagggtggacaggcgaggaacgcatcggccgggactccacctacgagcaggagggcaaggtgcagtttgtgattgatgcggtgtacgccattgcccacgccctccacagcatgcaccaggcgctctgccctgggcacacaggcctgtgcccggcgatggaacccactgatgggcggatgcttctgcagtacattcgatgtccgcttcaatggctgaatcgcatcccattgtgtgaatggccccgtcgtgttcgtccattcttctgtcagtggacgctcgggttgctttcatcttgtggctatgtgaataacgctgctgtgaacgtggctgtacaagcatttcttgccaccctgctttctagtctctcgagtatctacccgggagtggaactgctgggtcatgtgtttaatcttttgaggaggctccacactgttttctgcagcggctgcagccttttcccacccaccgtgcacaagggcagcgcaggaacccctgtgatgttcaacgagaacggagatgcgcccgggcggtacgacatcttccagtaccaggcgaccaatggcagtgccagcagtggcgggtaccaggcagtgggccagtgggcagagaccctcagactggatgtgagtgtgcagaccgagccccaggtgggcatgggcccaggatcccggaggcagacgccccagcctgtgttttgtgcgtcccaggtggaggccctgcagtggtctggcgacccccacgaggtgccctcgtctctgtgcagcctgccctgcgggccgggggagcggaagaagatggtgaagggcgtcccctgctgttggcactgcgaggcctgtgacgggtaccgcttccaggtggacgagttcacatgcgaggcctgtcctggggacatgaggcccacgcccaaccacacgggctgccgccccacacctgtggtgcgcctgagctggtcctccccctgggcagccccgccgctcctcctggccgtgctgggcatcgtggccactaccacggtggtggccaccttcgtgcggtacaacaacacgcccatcgtccgggcctcgggccgagagctcagctacgtcctcctcaccggcatcttcctcatctacgccatcaccttcctcatggtggctgagcctggggccgcggtctgtgccgcccgcaggctcttcctgggcctgggcacgaccctcagctactctgccctgctcaccaagaccaaccgtatctaccgcatctttgagcagggcaagcgctcggtcacaccccctcccttcatcagccccacctcacagctggtcatcaccttcagcctcacctccctgcagataaatgccgtttttagagtcactcttttctattttggttccttgcagtggcactatctcagctccctgcaagctctgccttccggagatctttctgtacaacacctgagtgcctcggtgtccctcggcatgctctactccaagagcaagacaccagtggatttggaggtggggagtgagccatggggatatctgggggatggggtcctgcaggcggagcactggggtgaggggcggggagactggcctcatgtgaaggtcatggtcgtggtgtaccagagcagtcttgtgtactacatgaagcaggcgcaggctggacgtgtgaagacagagctgctgaaggtggcacatcaccaggtggccaagtctgtccctgaagagtcccaaatcgtggtccttcatcttgtcacagctgggtatgtcgacatggccattaggactacaagagcaagcctgcacttaatgccgctgacgctagttcctggagccgcggctgaggtgaatgagactcaagtggctgcacgccttggtcctggctcaacggtaggcacataccaagtagtggtagttctcatgcgttcattacagatagacaaaaccaccaaccaactcagcttagaaacgtgcttctcagggattcaagggtttctcgccagtgtgaattctttggtgatggataag

SEQ ID NO: 12358 - DNA, 2673 bp, Homo sapiens
  source 1..2673: mol_type = unassigned DNA
tgaaccgacagcggctggcgcagcccgctagacgagccgatggcgcggccccggagagcccgggagccgctgctcgtggcgctgctgccgctggcgtggctggcgcaggcgggcctggcgcgcgcggcgggctctgtgcgcctggcgggcggcctgacgctgggcggcctgttcccggtgcacgcgcggggcgcggcgggccgggcgtgcgggcagctgaagaaggagcagggcgtgcaccggctggaggccatgctgtacgcgctggaccgcgtcaacgccgaccccgagctgctgcccggcgtgcgcctgggcgcgcggctgctggacacctgctcgcgggacacctacgcgctggagcaggcgctgagcttcgtgcaggcgctgatccgcggccgcggcgacggcgacgaggtgggcgtgcgctgcccgggaggcgtccctccgctgcgccccgcgccccccgagcgcgtcgtggccgtcgtgggcgcctcggccagctccgtctccatcatggtcgccaacgtgctgcgcctgtttgcgataccccagatcagctatgcctccacagccccggagctcagcgactccacacgctatgacttcttctcccgggtggtgccacccgactcctaccaggcgcaggccatggtggacatcgtgagggcactgggatggaactatgtgtccacgctggcctccgagggcaactatggcgaaagtggggttgaggccttcgttcagatctcccgagaggctgggggggtctgtattgcccagtctatcaagattcccagggaaccaaagccaggagagttcagcaaggtgatcaggagactcatggagacgcccaacgcccggggcatcatcatctttgccaatgaggatgacatcaggcgggtcctggaggcagctcgccaggccaacctgaccggccacttcctgtgggtcggctcagacagctggggagccaagacctcacccatcttgagcctggaggacgtggccgttggggccatcaccatcctgcccaaaagggcctccatcgacggatttgaccagtacttcatgactcgatccctggagaacaaccgcaggaacatctggttcgccgagttctgggaagagaattttaactgcaaactgaccagctcaggtacccagtcagacgattccacccgcaaatgcacaggcgaggaacgcatcggccgggactccacctacgagcaggagggcaaggtgcagtttgtgattgatgcggtgtacgccattgcccacgccctccacagcatgcaccaggcgctctgccctgggcacacaggcctgtgcccggcgatggaacccactgatgggcggatgcttctgcagtacattcgagctgtccgcttcaatggcagcgcaggaacccctgtgatgttcaacgagaacggagatgcgcccgggcggtacgacatcttccagtaccaggcgaccaatggcagtgccagcagtggcgggtaccaggcagtgggccagtgggcagagaccctcagactggatgtggaggccctgcagtggtctggcgacccccacgaggtgccctcgtctctgtgcagcctgccctgcgggccgggggagcggaagaagatggtgaagggcgtcccctgctgttggcactgcgaggcctgtgacgggtaccgcttccaggtggacgagttcacatgcgaggcctgtcctggggacatgaggcccacgcccaaccacacgggctgccgccccacacctgtggtgcgcctgagctggtcctccccctgggcagccccgccgctcctcctggccgtgctgggcatcgtggccactaccacggtggtggccaccttcgtgcggtacaacaacacgcccatcgtccgggcctcgggccgagagctcagctacgtcctcctcaccggcatcttcctcatctacgccatcaccttcctcatggtggctgagcctggggccgcggtctgtgccgcccgcaggctcttcctgggcctgggcacgaccctcagctactctgccctgctcaccaagaccaaccgtatctaccgcatctttgagcagggcaagcgctcggtcacaccccctcccttcatcagccccacctcacagctggtcatcaccttcagcctcacctccctgcaggtggtggggatgatagcatggctgggggcccggcccccacacagcgtgattgactatgaggaacagcggacggtggaccccgagcaggccagaggggtgctcaagtgcgacatgtcggatctgtctctcatcggctgcctgggctacagcctcctgctcatggtcacgtgcacagtgtacgccatcaaggcccgtggcgtgcccgagaccttcaacgaggccaagcccatcggcttcaccatgtacaccacctgcatcatctggctggcattcgtgcccatcttctttggcactgcccagtcagctgaaaagatctacatccagacaaccacgctaaccgtgtccttgagcctgagtgcctcggtgtccctcggcatgctctacgtacccaaaacctacgtcatcctcttccatccagagcagaatgtgcagaagcgaaagcggagcctcaaggccacctccacggtggcagccccacccaagggcgaggatgcagaggcccacaagtag

SEQ ID NO: 12359 - DNA, 4127 bp, Homo sapiens
  source 1..4127: mol_type = unassigned DNA
agtgctgggctgttggagagagcgagcagcaagccggtgagcgcgagcgcggcgcgccggccggctaacccgagagcgcgaggcgccccaggctggcaggcgccgcgggacccctcaccctctctggtcgcccctccccggattcccccaccctccgtgcctgcaggagcccctgggctttcccggaggagctcgccctgaagggcccggacctcggcgagcccaccaccgttccctccagcgccgccgccgccaccgcagcagccggagcagcatggtccagctgaggaagctgctccgcgtcctgactttgatgaagttcccctgctgcgtgctggaggtgctcctgtgcgcgctggcggcggcggcgcgcggccaggagatgtacgccccgcactcaatccggatcgagggggacgtcaccctcggggggctgttccccgtgcacgccaagggtcccagcggagtgccctgcggcgacatcaagagggaaaacgggatccacaggctggaagcgatgctctacgccctggaccagatcaacagtgatcccaacctactgcccaacgtgacgctgggcgcgcggatcctggacacttgttccagggacacttacgcgctcgaacagtcgcttactttcgtccaggcgctcatccagaaggacacctccgacgtgcgctgcaccaacggcgaaccgccggttttcgtcaagccggagaaagtagttggagtgattggggcttcggggagttcggtctccatcatggtagccaacatcctgaggctcttccagatcccccagattagttatgcatcaacggcacccgagctaagtgatgaccggcgctatgacttcttctctcgcgtggtgccacccgattccttccaagcccaggccatggtagacattgtaaaggccctaggctggaattatgtgtctaccctcgcatcggaaggaagttatggagagaaaggtgtggagtccttcacgcagatttccaaagaggcaggtggactctgcattgcccagtccgtgagaatcccccaggaacgcaaagacaggaccattgactttgatagaattatcaaacagctcctggacacccccaactccagggccgtcgtgatttttgccaacgatgaggatataaagcagatccttgcagcagccaaaagagctgaccaagttggccattttctttgggtgggatcagacagctggggatccaaaataaacccactgcaccagcatgaagatatcgcagaaggggccatcaccattcagcccaagcgagccacggtggaagggtttgatgcctactttacgtcccgtacacttgaaaacaacagaagaaatgtatggtttgccgaatactgggaggaaaacttcaactgcaagttgacgattagtgggtcaaaaaaagaagacacagatcgcaaatgcacaggacaggagagaattggaaaagattccaactatgagcaggagggtaaagtccagttcgtgattgacgcagtctatgctatggctcacgcccttcaccacatgaacaaggatctctgtgctgactaccggggtgtctgcccagagatggagcaagctggaggcaagaagttgctgaagtatatacgcaatgttaatttcaatggtagtgctggcactccagtgatgtttaacaagaacggggatgcacctgggcgttatgacatctttcagtaccagaccacaaacaccagcaacccgggttaccgtctgatcgggcagtggacagacgaacttcagctcaatatagaagacatgcagtggggtaaaggagtccgagagatacccgcctcagtgtgcacactaccatgtaagccaggacagagaaagaagacacagaaaggaactccttgctgttggacctgtgagccttgcgatggttaccagtaccagtttgatgagatgacatgccagcattgcccctatgaccagaggcccaatgaaaatcgaaccggatgccaggatattcccatcatcaaactggagtggcactccccctgggctgtgattcctgtcttcctggcaatgttggggatcattgccaccatctttgtcatggccactttcatccgctacaatgacacgcccattgtccgggcatctgggcgggaactcagctatgttcttttgacgggcatctttctttgctacatcatcactttcctgatgattgccaaaccagatgtggcagtgtgttctttccggcgagttttcttgggcttgggtatgtgcatcagttatgcagccctcttgacgaaaacaaatcggatttatcgcatatttgagcagggcaagaaatcagtaacagctcccagactcataagcccaacatcacaactggcaatcacttccagtttaatatcagttcagcttctaggggtgttcatttggtttggtgttgatccacccaacatcatcatagactatgatgaacacaagacaatgaaccctgagcaagccagaggggttctcaagtgtgacattacagatctccaaatcatttgctccttgggatatagcattcttctcatggtcacatgtactgtgtatgccatcaagactcggggtgtacccgagaattttaacgaagccaagcccattggattcactatgtacacgacatgtatagtatggcttgccttcattccaattttttttggcaccgctcaatcagcggaaaagctctacatacaaactaccacgcttacaatctccatgaacctaagtgcatcagtggcgctggggatgctatacatgccgaaagtgtacatcatcattttccaccctgaactcaatgtccagaaacggaagcgaagcttcaaggcggtagtcacagcagccaccatgtcatcgaggctgtcacacaaacccagtgacagacccaacggtgaggcaaagaccgagctctgtgaaaacgtagacccaaacagccctgctgcaaaaaagaagtatgtcagttataataacctggttatctaacctgttccattccatggaaccatggaggaggaagaccctcagttattttgtcacccaacctggcataggactctttggtcctacccgcttcccatcaccggaggagcttccccggccgggagaccagtgttagaggatccaagcgacctaaacagctgctttatgaaatatccttactttatctgggcttaataagtcactgacatcagcactgccaactcggctgcaattgtggaccttccctaccaaagggagtgttgaaactcaagtcccgccctggctctttagaatggaccactgagagccacaggaccgttttggggctgacctgtcttattacgtatgtacttctaggttgcaaggttttgaaattttctgtacagtttgtgaggacctttgcactttgccatctgatgtcgtacctcggttcactgtttgttttcgaatgccttgttttcatagagccctattctctcagacggtggaatatttggaaaaattttaaaacaattaaaattttaaagcaatcttggcagactaaaacaagtacatctgtacatgactgtataattacgattatagtaccactgcacatcatgtttttttttttaagacaaaaaagatgtttaaagaccaaaaactgtgctgagaaagtatgccccacctatctttggtatatgataggttacataaaaggaaggtattggctgaactgaatagaggtcttgatctttggaatgcatgccagtaatgtattttacagtacatgtttattatgttcaatatttgtatttgtgttctcttttgttatttttaattagggtatatgaatattttgcaataattttaataattattaagctgtttgaaggaaagaatatggatttttcatgtcttgaggttttgttcatgccccctttgactgatcagtgtgataaggactttaggaaaaaaagcatgtatgttttttactgtttgtaataagtactttcgttaatcttgctgcttatgtgccaatttagtggaaaaaaacaacccttgctgaaaaattccctctttccattctctttcaattctgtgatattgtccaagaatgtatcaataa

SEQ ID NO: 12360 - DNA, 2901 bp, Homo sapiens
  source 1..2901: mol_type = unassigned DNA
ggtcgcccctccccggattcccccaccctccgtgcctgcaggagcccctgggctttcccggaggagctcgccctgaagggcccggacctcggcgagcccaccaccgttccctccagcgccgccgccgccaccgcagcagccggagcagcatggtccagctgaggaagctgctccgcgtcctgactttgatgaagttcccctgctgcgtgctggaggtgctcctgtgcgcgctggcggcggcggcgcgcggccaggagatgtacgccccgcactcaatccggatcgagggggacgtcaccctcggggggctgttccccgtgcacgccaagggtcccagcggagtgccctgcggcgacatcaagagggaaaacgggatccacaggctggaagcgatgctctacgccctggaccagatcaacagtgatcccaacctactgcccaacgtgacgctgggcgcgcggatcctggacacttgttccagggacacttacgcgctcgaacagtcgcttactttcgtccaggcgctcatccagaaggacacctccgacgtgcgctgcaccaacggcgaaccgccggttttcgtcaagccggagaaagtagttggagtgattggggcttcggggagttcggtctccatcatggtagccaacatcctgaggctcttccagatcccccagattagttatgcatcaacggcacccgagctaagtgatgaccggcgctatgacttcttctctcgcgtggtgccacccgattccttccaagcccaggccatggtagacattgtaaaggccctaggctggaattatgtgtctaccctcgcatcggaaggaagttatggagagaaaggtgtggagtccttcacgcagatttccaaagaggcaggtggactctgcattgcccagtccgtgagaatcccccaggaacgcaaagacaggaccattgactttgatagaattatcaaacagctcctggacacccccaactccagggccgtcgtgatttttgccaacgatgaggatataaagcagatccttgcagcagccaaaagagctgaccaagttggccattttctttgggtgggatcagacagctggggatccaaaataaacccactgcaccagcatgaagatatcgcagaaggggccatcaccattcagcccaagcgagccacggtggaagggtttgatgcctactttacgtcccgtacacttgaaaacaacagaagaaatgtatggtttgccgaatactgggaggaaaacttcaactgcaagttgacgattagtgggtcaaaaaaagaagacacagatcgcaaatgcacaggacaggagagaattggaaaagattccaactatgagcaggagggtaaagtccagttcgtgattgacgcagtctatgctatggctcacgcccttcaccacatgaacaaggatctctgtgctgactaccggggtgtctgcccagagatggagcaagctggaggcaagaagttgctgaagtatatacgcaatgttaatttcaatggtagtgctggcactccagtgatgtttaacaagaacggggatgcacctgggcgttatgacatctttcagtaccagaccacaaacaccagcaacccgggttaccgtctgatcgggcagtggacagacgaacttcagctcaatatagaagacatgcagtggggtaaaggagtccgagagatacccgcctcagtgtgcacactaccatgtaagccaggacagagaaagaagacacagaaaggaactccttgctgttggacctgtgagccttgcgatggttaccagtaccagtttgatgagatgacatgccagcattgcccctatgaccagaggcccaatgaaaatcgaaccggatgccaggatattcccatcatcaaactggagtggcactccccctgggctgtgattcctgtcttcctggcaatgttggggatcattgccaccatctttgtcatggccactttcatccgctacaatgacacgcccattgtccgggcatctgggcgggaactcagctatgttcttttgacgggcatctttctttgctacatcatcactttcctgatgattgccaaaccagatgtggcagtgtgttctttccggcgagttttcttgggcttgggtatgtgcatcagttatgcagccctcttgacgaaaacaaatcggatttatcgcatatttgagcagggcaagaaatcagtaacagctcccagactcataagcccaacatcacaactggcaatcacttccagtttaatatcagttcagcttctaggggtgttcatttggtttggtgttgatccacccaacatcatcatagactatgatgaacacaagacaatgaaccctgagcaagccagaggggttctcaagtgtgacattacagatctccaaatcatttgctccttgggatatagcattcttctcatggtcacatgtactgtgtatgccatcaagactcggggtgtacccgagaattttaacgaagccaagcccattggattcactatgtacacgacatgtatagtatggcttgccttcattccaattttttttggcaccgctcaatcagcggaaaagctctacatacaaactaccacgcttacaatctccatgaacctaagtgcatcagtggcgctggggatgctatacatgccgaaagtgtacatcatcattttccaccctgaactcaatgtccagaaacggaagcgaagcttcaaggcggtagtcacagcagccaccatgtcatcgaggctgtcacacaaacccagtgacagacccaacggtgaggcaaagaccgagctctgtgaaaacgtagacccaaacagtgagaagtgcaactgctactgaccatctgcactggcatctagtcaagcgattg

SEQ ID NO: 12361 - DNA, 2769 bp, Homo sapiens
  source 1..2769: mol_type = unassigned DNA
atggtccagctgaggaagctgctccgcgtcctgactttgatgaagttcccctgctgcgtgctggaggtgctcctgtgcgcgctggcggcggcggcgcgcggccaggagatgtacgccccgcactcaatccggatcgagggggacgtcaccctcggggggctgttccccgtgcacgccaagggtcccagcggagtgccctgcggcgacatcaagagggaaaacgggatccacaggctggaagcgatgctctacgccctggaccagatcaacagtgatcccaacctactgcccaacgtgacgctgggcgcgcggatcctggacacttgttccagggacacttacgcgctcgaacagtcgcttactttcgtccaggcgctcatccagaaggacacctccgacgtgcgctgcaccaacggcgaaccgccggttttcgtcaagccggagaaagtagttggagtgattggggcttcggggagttcggtctccatcatggtagccaacatcctgaggctcttccagatcccccagattagttatgcatcaacggcacccgagctaagtgatgaccggcgctatgacttcttctctcgcgtggtgccacccgattccttccaagcccaggccatggtagacattgtaaaggccctaggctggaattatgtgtctaccctcgcatcggaaggaagttatggagagaaaggtgtggagtccttcacgcagatttccaaagaggcaggtggactctgcattgcccagtccgtgagaatcccccaggaacgcaaagacaggaccattgactttgatagaattatcaaacagctcctggacacccccaactccagggccgtcgtgatttttgccaacgatgaggatataaagcagatccttgcagcagccaaaagagctgaccaagttggccattttctttgggtgggatcagacagctggggatccaaaataaacccactgcaccagcatgaagatatcgcagaaggggccatcaccattcagcccaagcgagccacggtggaagggtttgatgcctactttacgtcccgtacacttgaaaacaacagaagaaatgtatggtttgccgaatactgggaggaaaacttcaactgcaagttgacgattagtgggtcaaaaaaagaagacacagatcgcaaatgcacaggacaggagagaattggaaaagattccaactatgagcaggagggtaaagtccagttcgtgattgacgcagtctatgctatggctcacgcccttcaccacatgaacaaggatctctgtgctgactaccggggtgtctgcccagagatggagcaagctggaggcaagaagttgctgaagtatatacgcaatgttaatttcaatggtagtgctggcactccagtgatgtttaacaagaacggggatgcacctgggcgttatgacatctttcagtaccagaccacaaacaccagcaacccgggttaccgtctgatcgggcagtggacagacgaacttcagctcaatatagaagacatgcagtggggtaaaggagtccgagagatacccgcctcagtgtgcacactaccatgtaagccaggacagagaaagaagacacagaaaggaactccttgctgttggacctgtgagccttgcgatggttaccagtaccagtttgatgagatgacatgccagcattgcccctatgaccagaggcccaatgaaaatcgaaccggatgccaggatattcccatcatcaaactggagtggcactccccctgggctgtgattcctgtcttcctggcaatgttggggatcattgccaccatctttgtcatggccactttcatccgctacaatgacacgcccattgtccgggcatctgggcgggaactcagctatgttcttttgacgggcatctttctttgctacatcatcactttcctgatgattgccaaaccagatgtggcagtgtgttctttccggcgagttttcttgggcttgggtatgtgcatcagttatgcagccctcttgacgaaaacaaatcggatttatcgcatatttgagcagggcaagaaatcagtaacagctcccagactcataagcccaacatcacaactggcaatcacttccagtttaatatcagttcagcttctaggggtgttcatttggtttggtgttgatccacccaacatcatcatagactatgatgaacacaagacaatgaaccctgagcaagccagaggggttctcaagtgtgacattacagatctccaaatcatttgctccttgggatatagcattcttctcatggtcacatgtactgtgtatgccatcaagactcggggtgtacccgagaattttaacgaagccaagcccattggattcactatgtacacgacatgtatagtatggcttgccttcattccaattttttttggcaccgctcaatcagcggaaaagctctacatacaaactaccacgcttacaatctccatgaacctaagtgcatcagtggcgctggggatgctatacatgccgaaagtgtacatcatcattttccaccctgaactcaatgtccagaaacggaagcgaagcttcaaggcggtagtcacagcagccaccatgtcatcgaggctgtcacacaaacccagtgacagacccaacggtgaggcaaagaccgagctctgtgaaaacgtagacccaaacaactgtataccaccagtaagaaagagtgtacaaaagtctgttacttggtacactatcccaccaacagtatag

SEQ ID NO: 12362 - DNA, 2736 bp, Homo sapiens
  source 1..2736: mol_type = unassigned DNA
atggtccagctgaggaagctgctccgcgtcctgactttgatgaagttcccctgctgcgtgctggaggtgctcctgtgcgcgctggcggcggcggcgcgcggccaggagatgtacgccccgcactcaatccggatcgagggggacgtcaccctcggggggctgttccccgtgcacgccaagggtcccagcggagtgccctgcggcgacatcaagagggaaaacgggatccacaggctggaagcgatgctctacgccctggaccagatcaacagtgatcccaacctactgcccaacgtgacgctgggcgcgcggatcctggacacttgttccagggacacttacgcgctcgaacagtcgcttactttcgtccaggcgctcatccagaaggacacctccgacgtgcgctgcaccaacggcgaaccgccggttttcgtcaagccggagaaagtagttggagtgattggggcttcggggagttcggtctccatcatggtagccaacatcctgaggctcttccagatcccccagattagttatgcatcaacggcacccgagctaagtgatgaccggcgctatgacttcttctctcgcgtggtgccacccgattccttccaagcccaggccatggtagacattgtaaaggccctaggctggaattatgtgtctaccctcgcatcggaaggaagttatggagagaaaggtgtggagtccttcacgcagatttccaaagaggcaggtggactctgcattgcccagtccgtgagaatcccccaggaacgcaaagacaggaccattgactttgatagaattatcaaacagctcctggacacccccaactccagggccgtcgtgatttttgccaacgatgaggatataaagcagatccttgcagcagccaaaagagctgaccaagttggccattttctttgggtgggatcagacagctggggatccaaaataaacccactgcaccagcatgaagatatcgcagaaggggccatcaccattcagcccaagcgagccacggtggaagggtttgatgcctactttacgtcccgtacacttgaaaacaacagaagaaatgtatggtttgccgaatactgggaggaaaacttcaactgcaagttgacgattagtgggtcaaaaaaagaagacacagatcgcaaatgcacaggacaggagagaattggaaaagattccaactatgagcaggagggtaaagtccagttcgtgattgacgcagtctatgctatggctcacgcccttcaccacatgaacaaggatctctgtgctgactaccggggtgtctgcccagagatggagcaagctggaggcaagaagttgctgaagtatatacgcaatgttaatttcaatggtagtgctggcactccagtgatgtttaacaagaacggggatgcacctgggcgttatgacatctttcagtaccagaccacaaacaccagcaacccgggttaccgtctgatcgggcagtggacagacgaacttcagctcaatatagaagacatgcagtggggtaaaggagtccgagagatacccgcctcagtgtgcacactaccatgtaagccaggacagagaaagaagacacagaaaggaactccttgctgttggacctgtgagccttgcgatggttaccagtaccagtttgatgagatgacatgccagcattgcccctatgaccagaggcccaatgaaaatcgaaccggatgccaggatattcccatcatcaaactggagtggcactccccctgggctgtgattcctgtcttcctggcaatgttggggatcattgccaccatctttgtcatggccactttcatccgctacaatgacacgcccattgtccgggcatctgggcgggaactcagctatgttcttttgacgggcatctttctttgctacatcatcactttcctgatgattgccaaaccagatgtggcagtgtgttctttccggcgagttttcttgggcttgggtatgtgcatcagttatgcagccctcttgacgaaaacaaatcggatttatcgcatatttgagcagggcaagaaatcagtaacagctcccagactcataagcccaacatcacaactggcaatcacttccagtttaatatcagttcagcttctaggggtgttcatttggtttggtgttgatccacccaacatcatcatagactatgatgaacacaagacaatgaaccctgagcaagccagaggggttctcaagtgtgacattacagatctccaaatcatttgctccttgggatatagcattcttctcatggtcacatgtactgtgtatgccatcaagactcggggtgtacccgagaattttaacgaagccaagcccattggattcactatgtacacgacatgtatagtatggcttgccttcattccaattttttttggcaccgctcaatcagcggaaaagctctacatacaaactaccacgcttacaatctccatgaacctaagtgcatcagtggcgctggggatgctatacatgccgaaagtgtacatcatcattttccaccctgaactcaatgtccagaaacggaagcgaagcttcaaggcggtagtcacagcagccaccatgtcatcgaggctgtcacacaaacccagtgacagacccaacggtgaggcaaagaccgagctctgtgaaaacgtagacccaaacataacctctgaggacctcagcttgcacaaagaggattga

SEQ ID NO: 12363 - DNA, 2472 bp, Homo sapiens
  source 1..2472: mol_type = unassigned DNA
atggtccagctgaggaagctgctccgcgtcctgactttgatgaagttcccctgctgcgtgctggaggtgctcctgtgcgcgctggcggcggcggcgcgcggccaggagatgtacgccccgcactcaatccggatcgagggggacgtcaccctcggggggctgttccccgtgcacgccaagggtcccagcggagtgccctgcggcgacatcaagagggaaaacgggatccacaggctggaagcgatgctctacgccctggaccagatcaacagtgatcccaacctactgcccaacgtgacgctgggcgcgcggatcctggacacttgttccagggacacttacgcgctcgaacagtcgcttactttcgtccaggcgctcatccagaaggacacctccgacgtgcgctgcaccaacggcgaaccgccggttttcgtcaagccggagaaagtagttggagtgattggggcttcggggagttcggtctccatcatggtagccaacatcctgaggctcttccagatcccccagattagttatgcatcaacggcacccgagctaagtgatgaccggcgctatgacttcttctctcgcgtggtgccacccgattccttccaagcccaggccatggtagacattgtaaaggccctaggctggaattatgtgtctaccctcgcatcggaaggaagttatggagagaaaggtgtggagtccttcacgcagatttccaaagaggcaggtggactctgcattgcccagtccgtgagaatcccccaggaacgcaaagacaggaccattgactttgatagaattatcaaacagctcctggacacccccaactccagggccgtcgtgatttttgccaacgatgaggatataaagcagatccttgcagcagccaaaagagctgaccaagttggccattttctttgggtgggatcagacagctggggatccaaaataaacccactgcaccagcatgaagatatcgcagaaggggccatcaccattcagcccaagcgagccacggtggaagggtttgatgcctactttacgtcccgtacacttgaaaacaacagaagaaatgtatggtttgccgaatactgggaggaaaacttcaactgcaagttgacgattagtgggtcaaaaaaagaagacacagatcgcaaatgcacaggacaggagagaattggaaaagattccaactatgagcaggagggtaaagtccagttcgtgattgacgcagtctatgctatggctcacgcccttcaccacatgaacaaggatctctgtgctgactaccggggtgtctgcccagagatggagcaagctggaggcaagaagttgctgaagtatatacgcaatgttaatttcaatggtgatgctggcactccagtgatgtttaacaagaacggggatgcacctgggcgttatgacatctttcagtaccagaccacaaacaccagcaacccgggttaccgtctgatcgggcagtggacagacgaacttcagctcaatatagaagacatgcagtggggtaaaggagtccgagagatacccgcctcagtgtgcacactaccatgtaagccaggacagagaaagaagacacagaaaggaactccttgctgttggacctgtgagccttgcgatggttaccagtaccagtttgatgagatgacatgccagcattgcccctatgaccagaggcccaatgaaaatcgaaccggatgccaggatattcccatcatcaaactggagtggcactccccctgggctgtgattcctgtcttcctggcaatgttggggatcattgccaccatctttgtcatggccactttcatccgctacaatgacacgcccattgtccgggcatctgggcgggaactcagctatgttcttttgacgggcatctttctttgctacatcatcactttcctgatgattgccaaaccagatgtggcagtgtgttctttccggcgagttttcttgggcttgggtatgtgcatcagttatgcagccctcttgacgaaaacaaatcggatttatcgcatatttgagcagggcaagaaatcagtaacagctcccagactcataagcccaacatcacaactggcaatcacttccagtttaatatcagttcagcttctaggggtgttcatttggtttggtgttgatccacccaacatcatcatagactatgatgaacacaagacaatgaaccctgagcaagccagaggggttctcaagtgtgacattacagatctccaaatcatttgctccttgggatatagcattcttctcatggtcacatgtactgtgtatgccatcaagactcggggtgtacccgagaattttaacgaagccaagcccattggattcactatgtacacgacatgtatagtatggcttgccttcattccaattttttttggcaccgctcaatcagcggaaaaggtaattttatgctgtatatca

SEQ ID NO: 12364 - DNA, 2775 bp, Homo sapiens
  source 1..2775: mol_type = unassigned DNA
atggtccagctgaggaagctgctccgcgtcctgactttgatgaagttcccctgctgcgtgctggaggtgctcctgtgcgcgctggcggcggcggcgcgcggccaggagatgtacgccccgcactcaatccggatcgagggggacgtcaccctcggggggctgttccccgtgcacgccaagggtcccagcggagtgccctgcggcgacatcaagagggaaaacgggatccacaggctggaagcgatgctctacgccctggaccagatcaacagtgatcccaacctactgcccaacgtgacgctgggcgcgcggatcctggacacttgttccagggacacttacgcgctcgaacagtcgcttactttcgtccaggcgctcatccagaaggacacctccgacgtgcgctgcaccaacggcgaaccgccggttttcgtcaagccggagaaagtagttggagtgattggggcttcggggagttcggtctccatcatggtagccaacatcctgaggctcttccagatcccccagattagttatgcatcaacggcacccgagctaagtgatgaccggcgctatgacttcttctctcgcgtggtgccacccgattccttccaagcccaggccatggtagacattgtaaaggccctaggctggaattatgtgtctaccctcgcatcggaaggaagttatggagagaaaggtgtggagtccttcacgcagatttccaaagaggcaggtggactctgcattgcccagtccgtgagaatcccccaggaacgcaaagacaggaccattgactttgatagaattatcaaacagctcctggacacccccaactccagggccgtcgtgatttttgccaacgatgaggatataaagcagatccttgcagcagccaaaagagctgaccaagttggccattttctttgggtgggatcagacagctggggatccaaaataaacccactgcaccagcatgaagatatcgcagaaggggccatcaccattcagcccaagcgagccacggtggaagggtttgatgcctactttacgtcccgtacacttgaaaacaacagaagaaatgtatggtttgccgaatactgggaggaaaacttcaactgcaagttgacgattagtgggtcaaaaaaagaagacacagatcgcaaatgcacaggacaggagagaattggaaaagattccaactatgagcaggagggtaaagtccagttcgtgattgacgcagtctatgctatggctcacgcccttcaccacatgaacaaggatctctgtgctgactaccggggtgtctgcccagagatggagcaagctggaggcaagaagttgctgaagtatatacgcaatgttaatttcaatggtagtgctggcactccagtgatgtttaacaagaacggggatgcacctgggcgttatgacatctttcagtaccagaccacaaacaccagcaacccgggttaccgtctgatcgggcagtggacagacgaacttcagctcaatatagaagacatgcagtggggtaaaggagtccgagagatacccgcctcagtgtgcacactaccatgtaagccaggacagagaaagaagacacagaaaggaactccttgctgttggacctgtgagccttgcgatggttaccagtaccagtttgatgagatgacatgccagcattgcccctatgaccagaggcccaatgaaaatcgaaccggatgccaggatattcccatcatcaaactggagtggcactccccctgggctgtgattcctgtcttcctggcaatgttggggatcattgccaccatctttgtcatggccactttcatccgctacaatgacacgcccattgtccgggcatctgggcgggaactcagctatgttcttttgacgggcatctttctttgctacatcatcactttcctgatgattgccaaaccagatgtggcagtgtgttctttccggcgagttttcttgggcttgggtatgtgcatcagttatgcagccctcttgacgaaaacaaatcggatttatcgcatatttgagcagggcaagaaatcagtaacagctcccagactcataagcccaacatcacaactggcaatcacttccagtttaatatcagttcagcttctaggggtgttcatttggtttggtgttgatccacccaacatcatcatagactatgatgaacacaagacaatgaaccctgagcaagccagaggggttctcaagtgtgacattacagatctccaaatcatttgctccttgggatatagcattcttctcatggtcacatgtactgtgtatgccatcaagactcggggtgtacccgagaattttaacgaagccaagcccattggattcactatgtacacgacatgtatagtatggcttgccttcattccaattttttttggcaccgctcaatcagcggaaaagctctacatacaaactaccacgcttacaatctccatgaacctaagtgcatcagtggcgctggggatgctatacatgccgaaagtgtacatcatcattttccaccctgaactcaatgtccagaaacggaagcgaagcttcaaggcggtagtcacagcagccaccatgtcatcgaggctgtcacacaaacccagtgacagacccaacggtgaggcaaagaccgagctctgtgaaaacgtagacccaaacatttttttttttggctgtacagtggaacttggattacactttaaattaactttctctaggaatcaaagtaacctctga

SEQ ID NO: 12365 - DNA, 4057 bp, Homo sapiens
  source 1..4057: mol_type = unassigned DNA
gatttttaaaaatcagaactattgacatttctggtctcctcgtcgcttcaggctgaagagcggagggggatccgcgggccgagggtccccctccctgcccgcgccagggccgctgggtgacaccgaaatccagaggctcccgcccctcgggggttcctcctcccgcttcccgaggtgactggttggcgcgaagcgattggcgatcccgggcgcgatcctggccgcggctccccgcgccgcgccgggtgaatggccgcgggcggaggatcgggaggcgccgggcgcagaccaatcgcggccgccggtgggagtatttgttattcacatggaagagacttggcgcctgctaggccagctcagccccctcagcccagagatcagccacaagtgcggccgctgtgctcgcctcacgcggcggcggcggcggcggcggcggcgctgacatggagctgcgggcccccggcgggcttcctcaccgcgccctctgcggggagcagggaataattctgctacaaggctgatttcaaggacatgaattgttgacctcatcccaacatcagaacctcagatgttctaatttttgcaccattccaggcaagttgatcttataaggaaataaaattgaaccttaggggtctgatggaaattcactgtgacattcaaatcaagaaaacttgctaatgcccacagagccttttccccatgggccctgatggtagcctccagaaggtgcagcctcaggtggtgccctttcttctgtggcaagaataaactttgggtcttggattgcaataccacctgtggagaaaatggtatgcgagggaaagcgatcagcctcttgcccttgtttcttcctcttgaccgccaagttctactggatcctcacaatgatgcaaagaactcacagccaggagtatgcccattccatacgggtggatggggacattattttggggggtctcttccctgtccacgcaaagggagagagaggggtgccttgtggggagctgaagaaggaaaaggggattcacagactggaggccatgctttatgcaattgaccagattaacaaggaccctgatctcctttccaacatcactctgggtgtccgcatcctcgacacgtgctctagggacacctatgctttggagcagtctctaacattcgtgcaggcattaatagagaaagatgcttcggatgtgaagtgtgctaatggagatccacccattttcaccaagcccgacaagatttctggcgtcataggtgctgcagcaagctccgtgtccatcatggttgctaacattttaagactttttaagatacctcaaatcagctatgcatccacagccccagagctaagtgataacaccaggtatgactttttctctcgagtggttccgcctgactcctaccaagcccaagccatggtggacatcgtgacagcactgggatggaattatgtttcgacactggcttctgaggggaactatggtgagagcggtgtggaggccttcacccagatctcgagggagattggtggtgtttgcattgctcagtcacagaaaatcccacgtgaaccaagacctggagaatttgaaaaaattatcaaacgcctgctagaaacacctaatgctcgagcagtgattatgtttgccaatgaggatgacatcaggaggatattggaagcagcaaaaaaactaaaccaaagtgggcattttctctggattggctcagatagttggggatccaaaatagcacctgtctatcagcaagaggagattgcagaaggggctgtgacaattttgcccaaacgagcatcaattgatggatttgatcgatactttagaagccgaactcttgccaataatcgaagaaatgtgtggtttgcagaattctgggaggagaattttggctgcaagttaggatcacatgggaaaaggaacagtcatataaagaaatgcacagggctggagcgaattgctcgggattcatcttatgaacaggaaggaaaggtccaatttgtaattgatgctgtatattccatggcttacgccctgcacaatatgcacaaagatctctgccctggatacattggcctttgtccacgaatgagtaccattgatgggaaagagctacttggttatattcgggctgtaaattttaatggcagtgctggcactcctgtcacttttaatgaaaacggagatgctcctggacgttatgatatcttccagtatcaaataaccaacaaaagcacagagtacaaagtcatcggccactggaccaatcagcttcatctaaaagtggaagacatgcagtgggctcatagagaacatactcacccggcgtctgtctgcagcctgccgtgtaagccaggggagaggaagaaaacggtgaaaggggtcccttgctgctggcactgtgaacgctgtgaaggttacaactaccaggtggatgagctgtcctgtgaactttgccctctggatcagagacccaacatgaaccgcacaggctgccagcttatccccatcatcaaattggagtggcattctccctgggctgtggtgcctgtgtttgttgcaatattgggaatcatcgccaccacctttgtgatcgtgacctttgtccgctataatgacacacctatcgtgagggcttcaggacgcgaacttagttacgtgctcctaacggggatttttctctgttattcaatcacgtttttaatgattgcagcaccagatacaatcatatgctccttccgacgggtcttcctaggacttggcatgtgtttcagctatgcagcccttctgaccaaaacaaaccgtatccaccgaatatttgagcaggggaagaaatctgtcacagcgcccaagttcattagtccagcatctcagctggtgatcaccttcagcctcatctccgtccagctccttggagtgtttgtctggtttgttgtggatcccccccacatcatcattgactatggagagcagcggacactagatccagagaaggccaggggagtgctcaagtgtgacatttctgatctctcactcatttgttcacttggatacagtatcctcttgatggtcacttgtactgtttatgccattaaaacgagaggtgtcccagagactttcaatgaagccaaacctattggatttaccatgtataccacctgcatcatttggttagctttcatccccatcttttttggtacagcccagtcagcagaaaagatgtacatccagacaacaacacttactgtctccatgagtttaagtgcttcagtatctctgggcatgctctatatgcccaaggtttatattataatttttcatccagaacagaatgttcaaaaacgcaagaggagcttcaaggctgtggtgacagctgccaccatgcaaagcaaactgatccaaaaaggaaatgacagaccaaatggcgaggtgaaaagtgaactctgtgagagtcttgaaaccaacacttcctctaccaagacaacatatatcagttacagcaatcattcaatctgaaacagggaaatggcacaatctgaagagatgtggtatatgatcttaaatgatgaacatgagaccgcaaaaattcactcctggagatctccgtagactacaatcaatcaaatcaatagtcagtcttgtaaggaacaaaaattagccatgagccaaaagtatcaataaacggggagtgaagaaacccgttttatacaataaaaccaatgagtgtcaagctaaagtattgcttattcatgagcagttaaaacaaatcacaaaaggaaaactaatgttagctcgtgaaaaaaaatgctgttgaaataaataatgtctgatgttattcttgtatttttctgtgattgtgagaactcccgttcctgtcccacattgtttaacttgtataagacaatgagtctgtttcttgtaatggctgaccagattgaagccctgggttgtgctaaaaataaatgcaatgattgatgcatgcaattttttatacaaataatttatttctaataataaaggaatgttttgcaaatgtt

SEQ ID NO: 12366 - DNA, 3850 bp, Homo sapiens
  source 1..3850: mol_type = unassigned DNA
acattacagtaaagaggttcagaaaagagggagactttacccggaactcccaaggcttggagatgtgatcccccaaaagtttagtcggcgaatgggagactgaagggtgacgggaagggggcaggcgcgctcggcgctctgactgggcgtgcggcggcaggattttaaagcgctctgcctcggatcgtctgccctgggtgacctcccggacctgccctggtggaatccggacttgccccgccgagatgacgaggaataattctgctacaaggctgatttcaaggacatgaattgttgacctcatcccaacatcagaacctcagatgttctaatttttgcaccattccaggcaagttgatcttataaggaaataaaattgaaccttaggggtctgatggaaattcactgtgacattcaaatcaagaaaacttgctaatgcccacagagccttttccccatgggccctgatggtagcctccagaaggtgcagcctcaggtggtgccctttcttctgtggcaagaataaactttgggtcttggattgcaataccacctgtggagaaaatggtatgcgagggaaagcgatcagcctcttgcccttgtttcttcctcttgaccgccaagttctactggatcctcacaatgatgcaaagaactcacagccaggagtatgcccattccatacgggtggatggggacattattttggggggtctcttccctgtccacgcaaagggagagagaggggtgccttgtggggagctgaagaaggaaaaggggattcacagactggaggccatgctttatgcaattgaccagattaacaaggaccctgatctcctttccaacatcactctgggtgtccgcatcctcgacacgtgctctagggacacctatgctttggagcagtctctaacattcgtgcaggcattaatagagaaagatgcttcggatgtgaagtgtgctaatggagatccacccattttcaccaagcccgacaagatttctggcgtcataggtgctgcagcaagctccgtgtccatcatggttgctaacattttaagactttttaagatacctcaaatcagctatgcatccacagccccagagctaagtgataacaccaggtatgactttttctctcgagtggttccgcctgactcctaccaagcccaagccatggtggacatcgtgacagcactgggatggaattatgtttcgacactggcttctgaggggaactatggtgagagcggtgtggaggccttcacccagatctcgagggagattggtggtgtttgcattgctcagtcacagaaaatcccacgtgaaccaagacctggagaatttgaaaaaattatcaaacgcctgctagaaacacctaatgctcgagcagtgattatgtttgccaatgaggatgacatcaggaggatattggaagcagcaaaaaaactaaaccaaagtgggcattttctctggattggctcagatagttggggatccaaaatagcacctgtctatcagcaagaggagattgcagaaggggctgtgacaattttgcccaaacgagcatcaattgatggatttgatcgatactttagaagccgaactcttgccaataatcgaagaaatgtgtggtttgcagaattctgggaggagaattttggctgcaagttaggatcacatgggaaaaggaacagtcatataaagaaatgcacagggctggagcgaattgctcgggattcatcttatgaacaggaaggaaaggtccaatttgtaattgatgctgtatattccatggcttacgccctgcacaatatgcacaaagatctctgccctggatacattggcctttgtccacgaatgagtaccattgatgggaaagagctacttggttatattcgggctgtaaattttaatggcagtgctggcactcctgtcacttttaatgaaaacggagatgctcctggacgttatgatatcttccagtatcaaataaccaacaaaagcacagagtacaaagtcatcggccactggaccaatcagcttcatctaaaagtggaagacatgcagtgggctcatagagaacatactcacccggcgtctgtctgcagcctgccgtgtaagccaggggagaggaagaaaacggtgaaaggggtcccttgctgctggcactgtgaacgctgtgaaggttacaactaccaggtggatgagctgtcctgtgaactttgccctctggatcagagacccaacatgaaccgcacaggctgccagcttatccccatcatcaaattggagtggcattctccctgggctgtggtgcctgtgtttgttgcaatattgggaatcatcgccaccacctttgtgatcgtgacctttgtccgctataatgacacacctatcgtgagggcttcaggacgcgaacttagttacgtgctcctaacggggatttttctctgttattcaatcacgtttttaatgattgcagcaccagatacaatcatatgctccttccgacgggtcttcctaggacttggcatgtgtttcagctatgcagcccttctgaccaaaacaaaccgtatccaccgaatatttgagcaggggaagaaatctgtcacagcgcccaagttcattagtccagcatctcagctggtgatcaccttcagcctcatctccgtccagctccttggagtgtttgtctggtttgttgtggatcccccccacatcatcattgactatggagagcagcggacactagatccagagaaggccaggggagtgctcaagtgtgacatttctgatctctcactcatttgttcacttggatacagtatcctcttgatggtcacttgtactgtttatgccattaaaacgagaggtgtcccagagactttcaatgaagccaaacctattggatttaccatgtataccacctgcatcatttggttagctttcatccccatcttttttggtacagcccagtcagcagaaaagatgtacatccagacaacaacacttactgtctccatgagtttaagtgcttcagtatctctgggcatgctctatatgcccaaggtttatattataatttttcatccagaacagaatgttcaaaaacgcaagaggagcttcaaggctgtggtgacagctgccaccatgcaaagcaaactgatccaaaaaggaaatgacagaccaaatggcgaggtgaaaagtgaactctgtgagagtcttgaaaccaacagtaagtcatctgtagagtttccgatggtcaagagcgggagcacttcctaatagatcttcctctaccaagacaacatatatcagttacagcaatcattcaatctgaaacagggaaatggcacaatctgaagagatgtggtatatgatcttaaatgatgaacatgagaccgcaaaaattcactcctggagatctccgtagactacaatcaatcaaatcaatagtcagtcttgtaaggaacaaaaattagccatgagccaaaagtatcaataaacggggagtgaagaaacccgttttatacaataaaaccaatgagtgtcaagctaaagtattgcttattcatgagcagttaaaacaaatcacaaaaggaaaactaatgttagctcgtgaaaaaaaatgctgttgaaataaataatgtctgatgttattcttgtatttttctgtgattgtgagaactcccgttcctgtcccacattgtttaacttgtataagacaatgagtctgtttcttgtaatggctgaccagattgaagccctgggttgtgctaaaaataaatgcaatgattgatgcatgcaattttttatacaaataatttatttctaataataaagg

SEQ ID NO: 12367 - DNA, 1506 bp, Homo sapiens
  source 1..1506: mol_type = unassigned DNA
atggtatgcgagggaaagcgatcagcctcttgcccttgtttcttcctcttgaccgccaagttctactggatcctcacaatgatgcaaagaactcacagccaggagtatgcccattccatacgggtggatggggacattattttggggggtctcttccctgtccacgcaaagggagagagaggggtgccttgtggggagctgaagaaggaaaaggggattcacagactggaggccatgctttatgcaattgaccagattaacaaggaccctgatctcctttccaacatcactctgggtgtccgcatcctcgacacgtgctctagggacacctatgctttggagcagtctctaacattcgtgcaggcattaatagagaaagatgcttcggatgtgaagtgtgctaatggagatccacccattttcaccaagcccgacaagatttctggcgtcataggtgctgcagcaagctccgtgtccatcatggttgctaacattttaagactttttaagatacctcaaatcagctatgcatccacagccccagagctaagtgataacaccaggtatgactttttctctcgagtggttccgcctgactcctaccaagcccaagccatggtggacatcgtgacagcactgggatggaattatgtttcgacactggcttctgaggggaactatggtgagagcggtgtggaggccttcacccagatctcgagggagattggtggtgtttgcattgctcagtcacagaaaatcccacgtgaaccaagacctggagaatttgaaaaaattatcaaacgcctgctagaaacacctaatgctcgagcagtgattatgtttgccaatgaggatgacatcaggaggatattggaagcagcaaaaaaactaaaccaaagtgggcattttctctggattggctcagatagttggggatccaaaatagcacctgtctatcagcaagaggagattgcagaaggggctgtgacaattttgcccaaacgagcatcaattgatggatttgatcgatactttagaagccgaactcttgccaataatcgaagaaatgtgtggtttgcagaattctgggaggagaattttggctgcaagttaggatcacatgggaaaaggaacagtcatataaagaaatgcacagggctggagcgaattgctcgggattcatcttatgaacaggaaggaaaggtccaatttgtaattgatgctgtatattccatggcttacgccctgcacaatatgcacaaagatctctgccctggatacattggcctttgtccacgaatgagtaccattgatgggaaagagctacttggttatattcgggctgtaaattttaatggttgccgaagagggatccagatgtctctaccctggccaactctttttactccttcattttccagtagttgggcagtgctggcactcctgtcacttttaatgaaaacggagatgctcctggacgttatgatatcttccagtatcaaataa

SEQ ID NO: 12368 - DNA, 551 bp, Homo sapiens
  source 1..551: mol_type = unassigned DNA
aagaatacactagagtctgggctactaccgcgattgaatacaaatcctgccaactgacagaactggaaaacagggttggtggtggagatacaagaaaaatcatgaacgggagaaaagcattcctatggtagcttgtattttgcttgaaagaaaaatagagaaaaagagccaccagcaggaataattctgctacaaggctgatttcaaggacatgaattgttgacctcatcccaacatcagaacctcagatgttctaatttttgcaccattccaggcaagttgatcttataaggaaataaaattgaaccttaggggtctgatggaaattcactgtgacattcaaatcaagaaaacttgctaatgcccacagagccttttccccatgggccctgatggtagcctccagaaggtgcagcctcaggtggtgccctttcttctgtggcaagaataaactttgggtcttggattgcaataccacctgtggagaaaatggtatgcgagggaaagcgatcagcctcttgcccttgtttcttcctcttgaccgccaagtt

SEQ ID NO: 12369 - DNA, 3559 bp, Homo sapiens
  source 1..3559: mol_type = unassigned DNA
gaataattctgctacaaggctgatttcaaggacatgaattgttgacctcatcccaacatcagaacctcagatgttctaatttttgcaccattccaggcaagttgatcttataaggaaataaaattgaaccttaggggtctgatggaaattcactgtgacattcaaatcaagaaaacttgctaatgcccacagagccttttccccatgggccctgatggtagcctccagaaggtgcagcctcaggtggtgccctttcttctgtggcaagaataaactttgggtcttggattgcaataccacctgtggagaaaatggtatgcgagggaaagcgatcagcctcttgcccttgtttcttcctcttgaccgccaagttctactggatcctcacaatgatgcaaagaactcacagccaggagtatgcccattccatacgggtggatggggacattattttggggggtctcttccctgtccacgcaaagggagagagaggggtgccttgtggggagctgaagaaggaaaaggggattcacagactggaggccatgctttatgcaattgaccagattaacaaggaccctgatctcctttccaacatcactctgggtgtccgcatcctcgacacgtgctctagggacacctatgctttggagcagtctctaacattcgtgcaggcattaatagagaaagatgcttcggatgtgaagtgtgctaatggagatccacccattttcaccaagcccgacaagatttctggcgtcataggtgctgcagcaagctccgtgtccatcatggttgctaacattttaagactttttaagatacctcaaatcagctatgcatccacagccccagagctaagtgataacaccaggtatgactttttctctcgagtggttccgcctgactcctaccaagcccaagccatggtggacatcgtgacagcactgggatggaattatgtttcgacactggcttctgaggggaactatggtgagagcggtgtggaggccttcacccagatctcgagggagattggtggtgtttgcattgctcagtcacagaaaatcccacgtgaaccaagacctggagaatttgaaaaaattatcaaacgcctgctagaaacacctaatgctcgagcagtgattatgtttgccaatgaggatgacatcaggaggatattggaagcagcaaaaaaactaaaccaaagtgggcattttctctggattggctcagatagttggggatccaaaatagcacctgtctatcagcaagaggagattgcagaaggggctgtgacaattttgcccaaacgagcatcaattgatggatttgatcgatactttagaagccgaactcttgccaataatcgaagaaatgtgtggtttgcagaattctgggaggagaattttggctgcaagttaggatcacatgggaaaaggaacagtcatataaagaaatgcacagggctggagcgaattgctcgggattcatcttatgaacaggaaggaaaggtccaatttgtaattgatgctgtatattccatggcttacgccctgcacaatatgcacaaagatctctgccctggatacattggcctttgtccacgaatgagtaccattgatgggaaagagctacttggttatattcgggctgtaaattttaatggcagtgctggcactcctgtcacttttaatgaaaacggagatgctcctggacgttatgatatcttccagtatcaaataaccaacaaaagcacagagtacaaagtcatcggccactggaccaatcagcttcatctaaaagtggaagacatgcagtgggctcatagagaacatactcacccggcgtctgtctgcagcctgccgtgtaagccaggggagaggaagaaaacggtgaaaggggtcccttgctgctggcactgtgaacgctgtgaaggttacaactaccaggtggatgagctgtcctgtgaactttgccctctggatcagagacccaacatgaaccgcacaggctgccagcttatccccatcatcaaattggagtggcattctccctgggctgtggtgcctgtgtttgttgcaatattgggaatcatcgccaccacctttgtgatcgtgacctttgtccgctataatgacacacctatcgtgagggcttcaggacgcgaacttagttacgtgctcctaacggggatttttctctgttattcaatcacgtttttaatgattgcagcaccagatacaatcatatgctccttccgacgggtcttcctaggacttggcatgtgtttcagctatgcagcccttctgaccaaaacaaaccgtatccaccgaatatttgagcaggggaagaaatctgtcacagcgcccaagttcattagtccagcatctcagctggtgatcaccttcagcctcatctccgtccagctccttggagtgtttgtctggtttgttgtggatcccccccacatcatcattgactatggagagcagcggacactagatccagagaaggccaggggagtgctcaagtgtgacatttctgatctctcactcatttgttcacttggatacagtatcctcttgatggtcacttgtactgtttatgccattaaaacgagaggtgtcccagagactttcaatgaagccaaacctattggatttaccatgtataccacctgcatcatttggttagctttcatccccatcttttttggtacagcccagtcagcagaaaagatgtacatccagacaacaacacttactgtctccatgagtttaagtgcttcagtatctctgggcatgctctatatgcccaaggtttatattataatttttcatccagaacagaatgttcaaaaacgcaagaggagcttcaaggctgtggtgacagctgccaccatgcaaagcaaactgatccaaaaaggaaatgacagaccaaatggcgaggtgaaaagtgaactctgtgagagtcttgaaaccaacacttcctctaccaagacaacatatatcagttacagcaatcattcaatctgaaacagggaaatggcacaatctgaagagatgtggtatatgatcttaaatgatgaacatgagaccgcaaaaattcactcctggagatctccgtagactacaatcaatcaaatcaatagtcagtcttgtaaggaacaaaaattagccatgagccaaaagtatcaataaacggggagtgaagaaacccgttttatacaataaaaccaatgagtgtcaagctaaagtattgcttattcatgagcagttaaaacaaatcacaaaaggaaaactaatgttagctcgtgaaaaaaaatgctgttgaaataaataatgtctgatgttattcttgtatttttctgtgattgtgagaactcccgttcctgtcccacattgtttaacttgtataagacaatgagtctgtttcttgtaatggctgaccagattgaagccctgggttgtgctaaaaataaatgcaatgattgatgcatgcaattttttatacaaataatttatttctaataataaaggaatgttttgcaaatgtt

SEQ ID NO: 12370 - DNA, 1247 bp, Homo sapiens
  source 1..1247: mol_type = unassigned DNA
gcccaaactgtgaagcctggtgtcagagagtgtctgcgcacccaagatagcgggggaataattctgctacaaggctgatttcaaggacatgaattgttgacctcatcccaacatcagaacctcagatgttctaatttttgcaccattccaggcaagttgatcttataaggaaataaaattgaaccttaggggtctgatggaaattcactgtgacattcaaatcaagaaaacttgctaatgcccacagagccttttccccatgggccctgatggtagcctccagaaggtgcagcctcaggtggtgccctttcttctgtggcaagaataaactttgggtcttggattgcaataccacctgtggagaaaatggtatgcgagggaaagcgatcagcctcttgcccttgtttcttcctcttgaccgccaagttctactggatcctcacaatgatgcaaagaactcacagccaggagtatgcccattccatacgggtggatggggacattattttggggggtctcttccctgtccacgcaaagggagagagaggggtgccttgtggggagctgaagaaggaaaaggggattcacagactggaggccatgctttatgcaattgaccagattaacaaggaccctgatctcctttccaacatcactctgggtgtccgcatcctcgacacgtgctctagggacacctatgctttggagcagtctctaacattcgtgcaggcattaatagagaaagatgcttcggatgtgaagtgtgctaatggagatccacccattttcaccaagcccgacaagatttctggcgtcataggtgctgcagcaagctccgtgtccatcatggttgctaacattttaagactttttaagatacctcaaatcagctatgcatccacagccccagagctaagtgataacaccaggtatgactttttctctcgagtggttccgcctgactcctaccaagcccaagccatggtggacatcgtgacagcactgggatggaattatgtttcgacactggcttctgaggggaactatggtgagagcggtgtggaggccttcacccagatctcgagggagattggtggtgtttgcattgctcagtcacagaaaatcccacgtgaaccaagacctggagaatttgaaaaaattatcaaacgcctgctagaaacacctaatgctcgagcagtgattatgtttgccaatgaggatgacatcaggaggatattggaagcagc

SEQ ID NO: 12371 - DNA, 4719 bp, Homo sapiens
  source 1..4719: mol_type = unassigned DNA
gtaaaactattccccgtgaaggcggcagggcagaggtccagggcgggctttgctgggagcctcgggaccccgggttgggggccgtggggcggcacctggcgagctggcgggtgggcggcgagccgaggcttcccggcctggcggcaactcgcccctctgccctcagccctcccggctccgctcccttcccccacgccgccctgcccctcccccacgcccctttctctttctttctttctttcccagttcgcttgcccccaccccagcggcgcccgccgggctcctcgcccaatggccgcggggcccgggaccgcatcagctgatcggcccgggctcctggccgctgggagccaatcagggcaccgggggcggccccgggccgcggataaagggtgcggggctgctggcggctctgcagagtcgagagtgggagaagagcggagcgtgtgagcagtactgcggcctcctctcctctcctaacctcgctctcgcggcctagctttacccgcccgcctgctcggcgaccagcggggatcctcccccagccgcaagtccacgaagaaagcaacgaatgaaaattatgaagacaacgagaagtcagactcctccgggtcgcgctccagctgcttcggcttcgtcgcctactctgtgaactccggggagagatctcgagtcaagattaagaccttaacccaccaacctgcctgttcggacaccccccgggccggccgctgtctgtccccttctccatcgccctctcccagaaagctccggtgcttggaccagctagagtctgagaaagaggagaggcgcgaacgccactccaaaaagagaagggttaaagagggcaaccctaacgatacgcttgactttctgtggctgggaacaccttccaccatgaccacctcagcaagttcccacttaaataaaggcatcaagcaggtgtacatgtccctgcctcagggtgagaaagtccaggccatgtatatctggatcgatggtactggagaaggactgcgctgcaagacccggaccctggacagtgagcccaagtgtgtggaagagttgcctgagtggaatttcgatggctctagtactttacagtctgagggttccaacagtgacatgtatctcgtgcctgctgccatgtttcgggaccccttccgtaaggaccctaacaagctggtgttatgtgaagttttcaagtacaatcgaaggcctgcagagaccaatttgaggcacacctgtaaacggataatggacatggtgagcaaccagcacccctggtttggcatggagcaggagtataccctcatggggacagatgggcacccctttggttggccttccaacggcttcccagggccccagggtccatattactgtggtgtgggagcagacagagcctatggcagggacatcgtggaggcccattaccgggcctgcttgtatgctggagtcaagattgcggggactaatgccgaggtcatgcctgcccagtgggaatttcagattggaccttgtgaaggaatcagcatgggagatcatctctgggtggcccgtttcatcttgcatcgtgtgtgtgaagactttggagtgatagcaacctttgatcctaagcccattcctgggaactggaatggtgcaggctgccataccaacttcagcaccaaggccatgcgggaggagaatggtctgaagtacatcgaggaggccattgagaaactaagcaagcggcaccagtaccacatccgtgcctatgatcccaagggaggcctggacaatgcccgacgtctaactggattccatgaaacctccaacatcaacgacttttctgctggtgtagccaatcgtagcgccagcatacgcattccccggactgttggccaggagaagaagggttactttgaagatcgtcgcccctctgccaactgcgaccccttttcggtgacagaagccctcatccgcacgtgtcttctcaatgaaaccggcgatgagcccttccagtacaaaaattaagtggactagacctccagctgttgagcccctcctagttcttcatcccactccaactcttccccctctcccagttgtcccgattgtaactcaaagggtggaatatcaaggtcgtttttttcattccatgtgcccagttaatcttgctttctttgtttggctgggatagaggggtcaagttattaatttcttcacacctaccctcctttttttccctatcactgaagctttttagtgcattagtggggaggagggtggggagacataaccactgcttccatttaatggggtgcacctgtccaataggcgtagctatccggacagagcacgtttgcagaagggggtctcttcttccaggtagctgaaaggggaagacctgacgtactctggttaggttaggacttgccctcgtggtggaaacttttcttaaaaagttataaccaacttttctattaaaagtgggaattaggagagaaggtaggggttgggaatcagagagaatggctttggtctcttgcttgtgggactagcctggcttgggactaaatgccctgctctgaacacgaagcttagtataaactgatggatatccctaccttgaaagaagaaaaggttcttactgcttggtccttgatttatcacacaaagcagaatagtatttttatatttaaatgtaaagacaaaaaactatatgtatggttttgtggattatgtgtgttttgctaaaggaaaaaaccatccaggtcacggggcaccaaatttgagacaaatagtcggattagaaataaagcatctcattttgagtagagagcaagggaagtggttcttagatggtgatctgggattaggccctcaagacccttttgggtttctgccctgcccaccctctggagaaggtgggcactggattagttaacagacaacacgttactagcagtcacttgatctccgtggctttggtttaaaagacacacttgtccacataggtttagagataagagttggctggtcaacttgagcatgttactgacagagggggtattggggttattttctggtaggaatagcatgtcactaaagcaggccttttgatattaaattttttaaaaagcaaaattatagaagtttagattttaatcaaatttgtagggtttctaggtaatttttacagaattgcttgtttgcttcaactgtctcctacctctgctcttggaggagatggggacagggctggagtcaaaacacttgtaattttgtatcttgatgtctttgttaagactgctgaagaattattttttttcttttataataaggaataaaccccacctttattccttcatttcatctaccattttctggttcttgtgttggctgtggcaggccagctgtggttttcttttgccatgacaacttctaattgccatgtacagtatgttcaaagtcaaataactcctcattgtaaacaaactgtgtaactgcccaaagcagcacttataaatcagcctaacataagatctctctgatgtgtttgtgattctttcaaatccctatgtgccattatatttctttatttcctaaaacaggcaaaataagctcaagtttatgtactctgagtttttaaaacactggagtgatgttgctgaccagccgtttcctgtacctctctaagttgggtatttgggacttaagggattaagtttttcacctagacttagttacacacaatcttggcatttcctagcctagaggtttgtagcagggtacaagccccactcctcccccttcctttgctcccctgagtttggttttggcttaccataacattgttttgaccattcctagcctaatacaatagcctaacataatgtaagattaactggctttacgatttctattctctgctctcagtgataagaaacaaatattagctaccctgctaccctggttgaagccttccaaggctggctatgccctaggcatgggctcatccttgggtgtatcttgccttgcaggaagaccagtggaccgattgtgattctcaaaagctctgtgttgtcacctgtgcccttgccccttgctcttatcttggtccgtgtatctgggagttcttccaccttatcttggccaattcctaccttcgttcattcctcatgaggttgggtaaaagctccctccggctcccatgatgctgtgcatatacctagcaaaaagcaattattggacacattggagtgcaatattattaatagcattaatactactaataatgtgggcaatagtgattgtttttaaaaggcagtatactcttaccagtgcgaggtagctggggcctgtgatagtttttagagataagttcttcaggcaactgtgtattttacactagtcaagtaatcctagatatccgtggtttttcttaagaaagttggctcgtaatatgatttaatattcaaagtagagtcatctacctattagcttgctggcgtggtcctagtttatgcctgtttcagcatgattgttgagtaccctgtttcatccttagcattttcttgattttgttgttaaatgatgtatacccttatttccattgaatctgtgcttccacccccccaactgaagttgtcttccctttgcttggccacccttacagcctcttggatggtgtatcctacagtgtaagcactaaactgaagaggcagtgacctg

SEQ ID NO: 12372 - DNA, 4364 bp, Homo sapiens
  source 1..4364: mol_type = unassigned DNA
gtaaaactattccccgtgaaggcggcagggcagaggtccagggcgggctttgctgggagcctcgggaccccgggttgggggccgtggggcggcacctggcgagctggcgggtgggcggcgagccgaggcttcccggcctggcggcaactcgcccctctgccctcagccctcccggctccgctcccttcccccacgccgccctgcccctcccccacgcccctttctctttctttctttctttcccagttcgcttgcccccaccccagcggcgcccgccgggctcctcgcccaatggccgcggggcccgggaccgcatcagctgatcggcccgggctcctggccgctgggagccaatcagggcaccgggggcggccccgggccgcggataaagggtgcggggctgctggcggctctgcagagtcgagagtgggagaagagcggagcgtgtgagcagtactgcggcctcctctcctctcctaacctcgctctcgcggcctagctttacccgcccgcctgctcggcgaccagaacaccttccaccatgaccacctcagcaagttcccacttaaataaaggcatcaagcaggtgtacatgtccctgcctcagggtgagaaagtccaggccatgtatatctggatcgatggtactggagaaggactgcgctgcaagacccggaccctggacagtgagcccaagtgtgtggaagagttgcctgagtggaatttcgatggctctagtactttacagtctgagggttccaacagtgacatgtatctcgtgcctgctgccatgtttcgggaccccttccgtaaggaccctaacaagctggtgttatgtgaagttttcaagtacaatcgaaggcctgcagagaccaatttgaggcacacctgtaaacggataatggacatggtgagcaaccagcacccctggtttggcatggagcaggagtataccctcatggggacagatgggcacccctttggttggccttccaacggcttcccagggccccagggtccatattactgtggtgtgggagcagacagagcctatggcagggacatcgtggaggcccattaccgggcctgcttgtatgctggagtcaagattgcggggactaatgccgaggtcatgcctgcccagtgggaatttcagattggaccttgtgaaggaatcagcatgggagatcatctctgggtggcccgtttcatcttgcatcgtgtgtgtgaagactttggagtgatagcaacctttgatcctaagcccattcctgggaactggaatggtgcaggctgccataccaacttcagcaccaaggccatgcgggaggagaatggtctgaagtacatcgaggaggccattgagaaactaagcaagcggcaccagtaccacatccgtgcctatgatcccaagggaggcctggacaatgcccgacgtctaactggattccatgaaacctccaacatcaacgacttttctgctggtgtagccaatcgtagcgccagcatacgcattccccggactgttggccaggagaagaagggttactttgaagatcgtcgcccctctgccaactgcgaccccttttcggtgacagaagccctcatccgcacgtgtcttctcaatgaaaccggcgatgagcccttccagtacaaaaattaagtggactagacctccagctgttgagcccctcctagttcttcatcccactccaactcttccccctctcccagttgtcccgattgtaactcaaagggtggaatatcaaggtcgtttttttcattccatgtgcccagttaatcttgctttctttgtttggctgggatagaggggtcaagttattaatttcttcacacctaccctcctttttttccctatcactgaagctttttagtgcattagtggggaggagggtggggagacataaccactgcttccatttaatggggtgcacctgtccaataggcgtagctatccggacagagcacgtttgcagaagggggtctcttcttccaggtagctgaaaggggaagacctgacgtactctggttaggttaggacttgccctcgtggtggaaacttttcttaaaaagttataaccaacttttctattaaaagtgggaattaggagagaaggtaggggttgggaatcagagagaatggctttggtctcttgcttgtgggactagcctggcttgggactaaatgccctgctctgaacacgaagcttagtataaactgatggatatccctaccttgaaagaagaaaaggttcttactgcttggtccttgatttatcacacaaagcagaatagtatttttatatttaaatgtaaagacaaaaaactatatgtatggttttgtggattatgtgtgttttgctaaaggaaaaaaccatccaggtcacggggcaccaaatttgagacaaatagtcggattagaaataaagcatctcattttgagtagagagcaagggaagtggttcttagatggtgatctgggattaggccctcaagacccttttgggtttctgccctgcccaccctctggagaaggtgggcactggattagttaacagacaacacgttactagcagtcacttgatctccgtggctttggtttaaaagacacacttgtccacataggtttagagataagagttggctggtcaacttgagcatgttactgacagagggggtattggggttattttctggtaggaatagcatgtcactaaagcaggccttttgatattaaattttttaaaaagcaaaattatagaagtttagattttaatcaaatttgtagggtttctaggtaatttttacagaattgcttgtttgcttcaactgtctcctacctctgctcttggaggagatggggacagggctggagtcaaaacacttgtaattttgtatcttgatgtctttgttaagactgctgaagaattattttttttcttttataataaggaataaaccccacctttattccttcatttcatctaccattttctggttcttgtgttggctgtggcaggccagctgtggttttcttttgccatgacaacttctaattgccatgtacagtatgttcaaagtcaaataactcctcattgtaaacaaactgtgtaactgcccaaagcagcacttataaatcagcctaacataagatctctctgatgtgtttgtgattctttcaaatccctatgtgccattatatttctttatttcctaaaacaggcaaaataagctcaagtttatgtactctgagtttttaaaacactggagtgatgttgctgaccagccgtttcctgtacctctctaagttgggtatttgggacttaagggattaagtttttcacctagacttagttacacacaatcttggcatttcctagcctagaggtttgtagcagggtacaagccccactcctcccccttcctttgctcccctgagtttggttttggcttaccataacattgttttgaccattcctagcctaatacaatagcctaacataatgtaagattaactggctttacgatttctattctctgctctcagtgataagaaacaaatattagctaccctgctaccctggttgaagccttccaaggctggctatgccctaggcatgggctcatccttgggtgtatcttgccttgcaggaagaccagtggaccgattgtgattctcaaaagctctgtgttgtcacctgtgcccttgccccttgctcttatcttggtccgtgtatctgggagttcttccaccttatcttggccaattcctaccttcgttcattcctcatgaggttgggtaaaagctccctccggctcccatgatgctgtgcatatacctagcaaaaagcaattattggacacattggagtgcaatattattaatagcattaatactactaataatgtgggcaatagtgattgtttttaaaaggcagtatactcttaccagtgcgaggtagctggggcctgtgatagtttttagagataagttcttcaggcaactgtgtattttacactagtcaagtaatcctagatatccgtggtttttcttaagaaagttggctcgtaatatgatttaatattcaaagtagagtcatctacctattagcttgctggcgtggtcctagtttatgcctgtttcagcatgattgttgagtaccctgtttcatccttagcattttcttgattttgttgttaaatgatgtatacccttatttccattgaatctgtgcttccacccccccaactgaagttgtcttccctttgcttggccacccttacagcctcttggatggtgtatcctacagtgtaagcactaaactgaagaggcagtgacctga

SEQ ID NO: 12373 - DNA, 3942 bp, Homo sapiens
  source 1..3942: mol_type = unassigned DNA
gcagagtcgagagtgggagaagagcggagcgtgtgagcagtactgcggcctcctctcctctcctaacctcgctctcgcggcctagctttacccgcccgcctgctcggcgaccaggtaagcccccggacggcccggtgtcacgcaagcgaggcgcgccgcccctgctaccccgcgaggcgcgccgcccagcctcttttttcggctgcctgcccctccagtcccagccctacgctgcggcctctccggcccatgcctgagatccggcatgagtgctcctcccgcgtgcttccgccgctggtggcttggacccgtcggggctggcgctggtggggcgcgcccttggccaggctctgggaagggcggggtgagttgttttgatcttcttttcactacttgcggccgaagcgccgcccctggaggccgttgggccggcctgcgccctggggctcgcagtggtttgtttgcgctgtggatggagtggcggtgcggtcccctgtggagcgcaaacaaggcgcttggttggcgcgggcgcctggctgccttcctcgtggtggggccttcggagcaatcgtcctggttctggcgatggttgagacgcctcgattgcggcgtgtaacggtgagcgttgtttgggcggccggctcccgcctcggggtcccgggggccttccaatgtgaccgaacaatggagagcccgggcctcggcgcagtcagtggagaagccggtccgggcggaggcagcagcagcgcgcagtccctacggcctgcgcccccaccctcccccggaccccccaacccctcggcggcagggtatggccacctccgtgaggccctgagattcggacgggggcccgaggggcagggcgcccactttagggacatttcagtgggaaggggctgctctcaaagtggataattataactccctcgggggcgggaagcggggatcctcccccagccgcaagtccacgaagaaagcaacgaatgaaaattatgaagacaacgagaagtcagactcctccgggtcgcgctccagctgcttcggcttcgtcgcctactctgtgaactccggggagagatctcgagtcaagattaagaccttaacccaccaacctgcctgttcggacaccccccgggccggccgctgtctgtccccttctccatcgccctctcccagaaagctccggtgcttggaccagctagagtctgagaaagaggagaggcgcgaacgccactccaaaaagagaagggttaaagagggcaaccctaacgatacgcttgactttctgtggctgggaacaccttccaccatgaccacctcagcaagttcccacttaaataaaggcatcaagcaggtgtacatgtccctgcctcagggtgagaaagtccaggccatgtatatctggatcgatggtactggagaaggactgcgctgcaagacccggaccctggacagtgagcccaagtgtgtggaagagttgcctgagtggaatttcgatggctctagtactttacagtctgagggttccaacagtgacatgtatctcgtgcctgctgccatgtttcgggaccccttccgtaaggaccctaacaagctggtgttatgtgaagttttcaagtacaatcgaaggcctgcagagaccaatttgaggcacacctgtaaacggataatggacatggtgagcaaccagcacccctggtttggcatggagcaggagtataccctcatggggacagatgggcacccctttggttggccttccaacggcttcccagggccccagggtccatattactgtggtgtgggagcagacagagcctatggcagggacatcgtggaggcccattaccgggcctgcttgtatgctggagtcaagattgcggggactaatgccgaggtcatgcctgcccagtgggaatttcagattggaccttgtgaaggaatcagcatgggagatcatctctgggtggcccgtttcatcttgcatcgtgtgtgtgaagactttggagtgatagcaacctttgatcctaagcccattcctgggaactggaatggtgcaggctgccataccaacttcagcaccaaggccatgcgggaggagaatggtctgaagtacatcgaggaggccattgagaaactaagcaagcggcaccagtaccacatccgtgcctatgatcccaagggaggcctggacaatgcccgacgtctaactggattccatgaaacctccaacatcaacgacttttctgctggtgtagccaatcgtagcgccagcatacgcattccccggactgttggccaggagaagaagggttactttgaagatcgtcgcccctctgccaactgcgaccccttttcggtgacagaagccctcatccgcacgtgtcttctcaatgaaaccggcgatgagcccttccagtacaaaaattaagtggactagacctccagctgttgagcccctcctagttcttcatcccactccaactcttccccctctcccagttgtcccgattgtaactcaaagggtggaatatcaaggtcgtttttttcattccatgtgcccagttaatcttgctttctttgtttggctgggatagaggggtcaagttattaatttcttcacacctaccctcctttttttccctatcactgaagctttttagtgcattagtggggaggagggtggggagacataaccactgcttccatttaatggggtgcacctgtccaataggcgtagctatccggacagagcacgtttgcagaagggggtctcttcttccaggtagctgaaaggggaagacctgacgtactctggttaggttaggacttgccctcgtggtggaaacttttcttaaaaagttataaccaacttttctattaaaagtgggaattaggagagaaggtaggggttgggaatcagagagaatggctttggtctcttgcttgtgggactagcctggcttgggactaaatgccctgctctgaacacgaagcttagtataaactgatggatatccctaccttgaaagaagaaaaggttcttactgcttggtccttgatttatcacacaaagcagaatagtatttttatatttaaatgtaaagacaaaaaactatatgtatggttttgtggattatgtgtgttttgctaaaggaaaaaaccatccaggtcacggggcaccaaatttgagacaaatagtcggattagaaataaagcatctcattttgagtagagagcaagggaagtggttcttagatggtgatctgggattaggccctcaagacccttttgggtttctgccctgcccaccctctggagaaggtgggcactggattagttaacagacaacacgttactagcagtcacttgatctccgtggctttggtttaaaagacacacttgtccacataggtttagagataagagttggctggtcaacttgagcatgttactgacagagggggtattggggttattttctggtaggaatagcatgtcactaaagcaggccttttgatattaaattttttaaaaagcaaaattatagaagtttagattttaatcaaatttgtagggtttctaggtaatttttacagaattgcttgtttgcttcaactgtctcctacctctgctcttggaggagatggggacagggctggagtcaaaacacttgtaattttgtatcttgatgtctttgttaagactgctgaagaattattttttttcttttataataaggaataaaccccacctttattccttcatttcatctaccattttctggttcttgtgttggctgtggcaggccagctgtggttttcttttgccatgacaacttctaattgccatgtacagtatgttcaaagtcaaataactcctcattgtaaacaaactgtgtaactgcccaaagcagcacttataaatcagcctaacataaga

SEQ ID NO: 12374 - DNA, 4065 bp, Homo sapiens
  source 1..4065: mol_type = unassigned DNA
actacttgcggccgaagcgccgcccctggaggccgttgggccggcctgcgccctggggctcgcagtggtttgtttgcgctgtggatggagtggcggtgcggtcccctgtggagcgcaaacaaggcgcttggttggcgcgggcgcctggctgccttcctcgtggtggggccttcggagcaatcgtcctggttctggcgatggttgagacgcctcgattgcggcgtgtaacgaacaccttccaccatgaccacctcagcaagttcccacttaaataaaggcatcaagcaggtgtacatgtccctgcctcagggtgagaaagtccaggccatgtatatctggatcgatggtactggagaaggactgcgctgcaagacccggaccctggacagtgagcccaagtgtgtggaagagttgcctgagtggaatttcgatggctctagtactttacagtctgagggttccaacagtgacatgtatctcgtgcctgctgccatgtttcgggaccccttccgtaaggaccctaacaagctggtgttatgtgaagttttcaagtacaatcgaaggcctgcagagaccaatttgaggcacacctgtaaacggataatggacatggtgagcaaccagcacccctggtttggcatggagcaggagtataccctcatggggacagatgggcacccctttggttggccttccaacggcttcccagggccccagggtccatattactgtggtgtgggagcagacagagcctatggcagggacatcgtggaggcccattaccgggcctgcttgtatgctggagtcaagattgcggggactaatgccgaggtcatgcctgcccagtgggaatttcagattggaccttgtgaaggaatcagcatgggagatcatctctgggtggcccgtttcatcttgcatcgtgtgtgtgaagactttggagtgatagcaacctttgatcctaagcccattcctgggaactggaatggtgcaggctgccataccaacttcagcaccaaggccatgcgggaggagaatggtctgaagtacatcgaggaggccattgagaaactaagcaagcggcaccagtaccacatccgtgcctatgatcccaagggaggcctggacaatgcccgacgtctaactggattccatgaaacctccaacatcaacgacttttctgctggtgtagccaatcgtagcgccagcatacgcattccccggactgttggccaggagaagaagggttactttgaagatcgtcgcccctctgccaactgcgaccccttttcggtgacagaagccctcatccgcacgtgtcttctcaatgaaaccggcgatgagcccttccagtacaaaaattaagtggactagacctccagctgttgagcccctcctagttcttcatcccactccaactcttccccctctcccagttgtcccgattgtaactcaaagggtggaatatcaaggtcgtttttttcattccatgtgcccagttaatcttgctttctttgtttggctgggatagaggggtcaagttattaatttcttcacacctaccctcctttttttccctatcactgaagctttttagtgcattagtggggaggagggtggggagacataaccactgcttccatttaatggggtgcacctgtccaataggcgtagctatccggacagagcacgtttgcagaagggggtctcttcttccaggtagctgaaaggggaagacctgacgtactctggttaggttaggacttgccctcgtggtggaaacttttcttaaaaagttataaccaacttttctattaaaagtgggaattaggagagaaggtaggggttgggaatcagagagaatggctttggtctcttgcttgtgggactagcctggcttgggactaaatgccctgctctgaacacgaagcttagtataaactgatggatatccctaccttgaaagaagaaaaggttcttactgcttggtccttgatttatcacacaaagcagaatagtatttttatatttaaatgtaaagacaaaaaactatatgtatggttttgtggattatgtgtgttttgctaaaggaaaaaaccatccaggtcacggggcaccaaatttgagacaaatagtcggattagaaataaagcatctcattttgagtagagagcaagggaagtggttcttagatggtgatctgggattaggccctcaagacccttttgggtttctgccctgcccaccctctggagaaggtgggcactggattagttaacagacaacacgttactagcagtcacttgatctccgtggctttggtttaaaagacacacttgtccacataggtttagagataagagttggctggtcaacttgagcatgttactgacagagggggtattggggttattttctggtaggaatagcatgtcactaaagcaggccttttgatattaaattttttaaaaagcaaaattatagaagtttagattttaatcaaatttgtagggtttctaggtaatttttacagaattgcttgtttgcttcaactgtctcctacctctgctcttggaggagatggggacagggctggagtcaaaacacttgtaattttgtatcttgatgtctttgttaagactgctgaagaattattttttttcttttataataaggaataaaccccacctttattccttcatttcatctaccattttctggttcttgtgttggctgtggcaggccagctgtggttttcttttgccatgacaacttctaattgccatgtacagtatgttcaaagtcaaataactcctcattgtaaacaaactgtgtaactgcccaaagcagcacttataaatcagcctaacataagatctctctgatgtgtttgtgattctttcaaatccctatgtgccattatatttctttatttcctaaaacaggcaaaataagctcaagtttatgtactctgagtttttaaaacactggagtgatgttgctgaccagccgtttcctgtacctctctaagttgggtatttgggacttaagggattaagtttttcacctagacttagttacacacaatcttggcatttcctagcctagaggtttgtagcagggtacaagccccactcctcccccttcctttgctcccctgagtttggttttggcttaccataacattgttttgaccattcctagcctaatacaatagcctaacataatgtaagattaactggctttacgatttctattctctgctctcagtgataagaaacaaatattagctaccctgctaccctggttgaagccttccaaggctggctatgccctaggcatgggctcatccttgggtgtatcttgccttgcaggaagaccagtggaccgattgtgattctcaaaagctctgtgttgtcacctgtgcccttgccccttgctcttatcttggtccgtgtatctgggagttcttccaccttatcttggccaattcctaccttcgttcattcctcatgaggttgggtaaaagctccctccggctcccatgatgctgtgcatatacctagcaaaaagcaattattggacacattggagtgcaatattattaatagcattaatactactaataatgtgggcaatagtgattgtttttaaaaggcagtatactcttaccagtgcgaggtagctggggcctgtgatagtttttagagataagttcttcaggcaactgtgtattttacactagtcaagtaatcctagatatccgtggtttttcttaagaaagttggctcgtaatatgatttaatattcaaagtagagtcatctacctattagcttgctggcgtggtcctagtttatgcctgtttcagcatgattgttgagtaccctgtttcatccttagcattttcttgattttgttgttaaatgatgtatacccttatttccattgaatctgtgcttccacccccccaactgaagttgtcttccctttgcttggccacccttacagcctcttggatggtgtatcctacagtgtaagcactaaactgaagaggcagtgacctg

SEQ ID NO: 12375 - DNA, 1244 bp, Homo sapiens
  source 1..1244: mol_type = unassigned DNA
aagagggcaaccctaacgatacgcttgactttctgtggctgggaacaccttccaccatgaccacctcagcaagttcccacttaaataaaggcatcaagcaggtgtacatgtccctgcctcagggtgagaaagtccaggccatgtatatctggatcgatggtactggagaaggactgcgctgcaagacccggaccctggacagtgagcccaagtgtgtggaagagttgcctgagtggaatttcgatggctctagtactttacagtctgagggttccaacagtgacatgtatctcgtgcctgctgccatgtttcgggaccccttccgtaaggaccctaacaagctggtgttatgtgaagttttcaagtacaatcgaaggcctgcagagaccaatttgaggcacacctgtaaacggataatggacatggtgagcaaccagcacccctggtttggcatggagcaggagtataccctcatggggacagatgggcacccctttggttggccttccaacggcttccagggccccagggtccatattactgtggtgtgggagcagacagagcctatggcagggacatcgtggaggcccattaccgggcctgcttgtatgctggagtcaagattgcggggactaatgccgaggtcatgcctgcccagtgggaatttcagattggaccttgtgaaggaatcagcatgggagatcatctctgggtggcccgtttcatcttgcatcgtgtgtgtgaagactttggagtgatagcaacctttgatcctaagcccattcctgggaactggaatggtgcaggctgccataccaacttcagcaccaaggccatgcgggaggagaatggtctgaagtacatcgaggaggccattgagaaactaagcaagcggcaccagtaccacatccgtgcctatgatcccaagggaggcctggacaatgcccgacgtctaactggattccatgaaacctccaacatcaacgacttttctgctggtgtagccaatcgtagcgccagcatacgcattccccggactgttggccaggagaagaagggttactttgaagatcgtcgcccctctgccaactgcgaccccttttcggtgacagaagccctcatccgcacgtgtcttctcaatgaaaccggcgatgagcccttccagtacaaaaattaagtggactagacctccagctgttgagcccctcctagttcttcatcccactccaactcttccccctctc

SEQ ID NO: 12376 - DNA, 3813 bp, Homo sapiens
  source 1..3813: mol_type = unassigned DNA
ataaaacctggagcgcaggatcgcgcccaggagcggcgagctagcggacgcaaagactgggcatgctccgcggcggcgcaggttttggtcacaagtaggaagaagccagtgcaccagaccggcaaagagaagcgggagccgccgcggcagcgcggccgtggggtccgccgccgccgcatcggagcgggaggaggagcagcggggagggcgaggccgccgggccgagagccgtcccgcctgctctcggtcttctgccttcgcctccgcgcggtgcgtcggacccagggtctgtcacctgggcgccaggggccgccgccggggagccggagcgggcaggaccctccctccgccgactgcggcccgagagcgcccccgcggggtggagcggcagccgccttctgcgggcggctgagtgtccgtctcgcgcccggagcgggcgaccgccgtcagcccggaggaggaggaggaggaggagggggcggccatggggctgctgtcccagggctcgccgctgagctgggaggaaaccaagcgccatgccgaccacgtgcggcggcacgggatcctccagttcctgcacatctaccacgccgtcaaggaccggcacaaggacgttctcaagtggggcgatgaggtggaatacatgttggtatcttttgatcatgaaaataaaaaagtccggttggtcctgtctggggagaaagttcttgaaactctgcaagagaagggggaaaggacaaacccaaaccatcctaccctttggagaccagagtatgggagttacatgattgaagggacaccaggacagccctacggaggaacaatgtccgagttcaatacagttgaggccaacatgcgaaaacgccggaaggaggctacttctatattagaagaaaatcaggctctttgcacaataacttcatttcccagattaggctgtcctgggttcacactgcccgaggtcaaacccaacccagtggaaggaggagcttccaagtccctcttctttccagatgaagcaataaacaagcaccctcgcttcagtaccttaacaagaaatatccgacataggagaggagaaaaggttgtcatcaatgtaccaatatttaaggacaagaatacaccatctccatttatagaaacatttactgaggatgatgaagcttcaagggcttctaagccggatcatatttacatggatgccatgggatttggaatgggcaattgctgtctccaggtgacattccaagcctgcagtatatctgaggccagatacctttatgatcagttggctactatctgtccaattgttatggctttgagtgctgcatctcccttttaccgaggctatgtgtcagacattgattgtcgctggggagtgatttctgcatctgtagatgatagaactcgggaggagcgaggactggagccattgaagaacaataactataggatcagtaaatcccgatatgactcaatagacagctatttatctaagtgtggtgagaaatataatgacatcgacttgacgatagataaagagatctacgaacagctgttgcaggaaggcattgatcatctcctggcccagcatgttgctcatctctttattagagacccactgacactgtttgaagagaaaatacacctggatgatgctaatgagtctgaccattttgagaatattcagtccacaaattggcagacaatgagatttaagccccctcctccaaactcagacattggatggagagtagaatttcgacccatggaggtgcaattaacagactttgagaactctgcctatgtggtgtttgtggtactgctcaccagagtgatcctttcctacaaattggattttctcattccactgtcaaaggttgatgagaacatgaaggtagcacagaaaagagatgctgtcttgcagggaatgttttatttcaggaaagatatttgcaaaggtggcaatgcagtggtggatggttgtggcaaggcccagaacagcacggagctcgctgcagaggagtacaccctcatgagcatagacaccatcatcaatgggaaggaaggtgtgtttcctggactgatcccaattctgaactcttaccttgaaaacatggaagtggatgtggacaccagatgtagtattctgaactacctaaagctaattaagaagagagcatctggagaactaatgacagttgccagatggatgagggagtttatcgcaaaccatcctgactacaagcaagacagtgtcataactgatgaaatgaattatagccttattttgaagtgtaaccaaattgcaaatgaattatgtgaatgcccagagttacttggatcagcatttaggaaagtaaaatatagtggaagtaaaactgactcatccaactagacattctacagaaagaaaaatgcattattgacgaactggctacagtaccatgcctctcagccagcccgtgtgtataatatgaagaccaaatgatagaactgtactgttttctgggccagtgagccagaaattgattaaggctttctttggtaggtaaatctagagtttatacagtgtacatgtacatagtaaagtatttttgattaacaatgtattttaataacatatctaaagtcatcatgaactggcttgtacatttttaaattcttactctggagcaacctactgtctaagcagttttgtaaatgtactggtaattgtacaatacttgcattccagagttaaaatgtttactgtaaatttttgttcttttaaagactacctgggacctgatttattgaaatttttctctttaaaaacattttctctcgttaattttcctttgtcatttcctttgttgtctacattaaatcacttgaatccattgaaagtgcttcaagggtaatcttgggtttctagcaccttatctatgatgtttcttttgcaattggaataatcacttggtcaccttgccccaagctttcccctctgaataaatacccattgaactctgatggctgttatcaaaggaacttttctttgtttaaatttgctgatgcaggaattaagtttaaacacaactctatagaaagaaaggagattattacccagaattcacatgtagtgattattaaggacaatttttttttttaactaaaaaagttggcggcaggggtggggggtggcaatcatttttcttcctatacatacaaaggatattgtcaaaaatggcgttcttctcttgtggcctgttattctgattgctgctgtatacagttttgtcactctttagtttttagttaagcatactgatagactttcctctaaaagccattcactccagattttacctggggaatattctacatactgcttactttctctataaaactcatcaataaatcatgaaaggcactgagttttgtaaatcaggaccctaaatgtttaattgtaaataagtttcagataattattatagctttgcgttgaagtttgttgttttttttctcaactagttaagtcaactgcttctgaaataactctgtattgtagattatgcagatctttacaggcataaatatttaaactgtaatatgctaacttgaagagattgcaataaagctgcttcagctaaccctgtttatgtttaaatactagggtttgttctatattttatacatgcattttggatgattaaagaatgcctggttttcgtttgcaatttgcttgtgtaaatcaggttgtaaaaaggcagataaattgaaatgtttgtggtatgaggaaataaaagaatggaattagctttcattcagaaa

SEQ ID NO: 12377 - DNA, 4857 bp, Homo sapiens
  source 1..4857: mol_type = unassigned DNA
gctgcggccgcagtagccggagccggagccgcagccaccggtgccttcctttcccgccgccgcccagccgccgtccggcctccctcgggcccgagcgcagaccaggctccagccgcgcggcgccggcagcctcgcgctccctctcgggtctctctcgggcctcgggcaccgcgtcctgtggggcggccgcctgcctgcccgcccgcccgcagccccttcgctgcgcggcccctgggcggccgctgccatgggcaccgacagccgcgcggccaaggcgctcctggcgcgggcccgcaccctgcacctgcagacggggaacctgctgaactggggccgcctgcggaagaagtgcccgtccacgcacagcgaggagcttcatgattgtatccaaaaaaccttgaatgaatggagttcccaaatcaacccagatttggtcagggagtttccagatgtcttggaatgcactgtatctcatgcagtagaaaagataaatcctgatgaaagagaagaaatgaaagtttctgcaaaactgttcattgtagaatcaaactcttcatcatcaactagaagtgcagttgacatggcctgttcagtccttggagttgcacagctggattctgtgatcattgcttcacctcctattgaagatggagttaatctttccttggagcatttacagccttactgggaggaattagaaaacttagttcagagcaaaaagattgttgccataggtacctctgatctagacaaaacacagttggaacagctgtatcagtgggcacaggtaaaaccaaatagtaaccaagttaatcttgcctcctgctgtgtgatgccaccagatttgactgcatttgctaaacaatttgacatacagctgttgactcacaatgatccaaaagaactgctttctgaagcaagtttccaagaagctcttcaggaaagcattcctgacattcaagcgcacgagtgggtgccgctgtggctactgcggtattcggtcattgtgaaaagtagaggaattatcaaatcaaaaggctacattttacaagctaaaagaaggggttcttaactgacttaggagcataacttacctgtaatttccttcaatatgagagaaaattgagatgtgtaaaaatctagttactgcctgtaaatggtgtcattgaggcagatattctttcgtcatatttgacagtatgttgtctgtcaagttttaaatacttatcttgcctccatatcaatccattctcatgaacctctgtattgctttccttaaactattgttttctaattgaaattgtctataaagaaaatacttgcaatatatttttcctttatttttatgactaatataaatcaagaaaatttgttgttagatatattttggcctaggtatcagggtaatgtatatacatattttttatttccaaaaaaaattcattaattgcttcttaactcttattataaccaagcaatttaattacaattgttaaaactgaaatactggaagaagatatttttcctgtcattgatgagatatatcagagtaactggagtagctgggatttactagtagtgtaaataaaattcactcttcaatacatgaatggaaacttaaatttttttttatgtgtccttgcttatagtttagctgtaataatttaaccttgtattcttgtgccatattctgtctttttattacttataaagacaaaccaaagtaaatctgaaaggagactagaagctttgaaattattgtttgggggttttataaaagcaactactgtcacctccatccagattcttttaaattattgatccatccatagtatatattgctactcattcaagaatcctcaataagtattgagtatttaccatatgttgggatactgtgggctctggagagaggagggggcaatagagctaggaattaagaatcagttgagtaaaatgtgtaatatttattccccattaataactgactaggaaggactaaaagccagaaaggggatgaaaaaaaaatccttaattcagggccgacattatctacttaaacaactttgagatatggtcttaattattttaaagcagaataatataattgaaagtttatagctaaaagagactatataggtcatttagtataattcttcattagtttacgaaccacaaaattgcaaataaataagctatgaactttgatgtacactataaatctccttaattctataaatttgtgtctgtaacctgaatagtttgaaaacttctttaaaaatctcttgtatttcatccgggcgcagtggctcacacctgtaatcccagcactttgggaggccgaggtgggcagatcacgaggtcaggagtttgagaccagcctgaccaacatggtaaaaccccatctctactaaaatacaaaaattggctgggcgtggtggcactcgcctgtaatctcagctacttgggaggctgaggcaggagaatcgcttgaacccgggaggcggaggttacagtgagccgagatcacatcactgcactccagcctgggcgacagagcgagactccatctcaaaaaaaaaaaaaaactcttgtatctcaatatttttaaaccacaggcctaaataaaactaattttgctcaagttttctcaacctagggaaaaagaactatggttccatattcaaaataaatattatagacccttttcctaagtaggattttgtggtttactgattgggtaatttgatcattaaaattatgtgaaatctgcccgggcacacctcatgcctgtaatcccagcactctgggaggccaaggcagatgatcacctgaggtcaggagttctagaccagcctggctaacatggtgaaaccctgtatctgctaaaaatacaaaaattagccaggcgtggtggcgggctcctgtaatcccagctactttggaggcgaggcacgagaatcgcttgaacctgggaggcggagtttgcagtgagccgagatcacgccattgcactccagcctgggcgacagagcgagactgcgtctcaaaaaaaaaaaaaaaagaaaaattatgtgaaatcatgtgatttgcctgggaaaacttgtttagatattgagctacttatgccttctagcctttatattaattgtatgtaatgttattaaatatatatatagttcatctttacatttggaaatgcccaacatttttttcatataagtccttaaacaagcgttcattttattttaaatctatacagtgaactggccaagatattttaagagggaactttaatatcccatttattgtttttataaccctggacttataaaaatgggttgtttgaagggttattttgaaagtgggggaaaaaaaaacttagttgctaatgtatctaaacttcagcagagctttttggtgatctcctacctgcaccctcaactcttgacaaagaagcaagactatagattcattttctgaaggggatcatgtatggaattttttgatgagtttttacttttacctctctactcttgattttctattattgaatactcttttaaaacactgatttttaaggctttatatatgttttccaggctgatgttcacatctttttttcatgaactatcagaatatagtgaacacttttcaaatatttaaggacttaatgtttaaaaagccataaaatagagagtggtaatactaccaaataattacttaaaactgaaagctaagttatcaatagtttatataagagatgttttctgaggagatgtgcatccagtgagaccaaggtagaaagtttatataattgttttttttccagtaaatatgaaaaaaaaagctgtagcttgtttattacatgtccaaaatacagtggagccttactttaacacaatgtactgtaacttggaatttgttctgttatgagtctatcttgaattcccatccatgaaactgtagtcaccaaaagcaacaagtattttcacatgatgtaaaagaccatactatgatggccattgctagaaattgaatcacaaataatagctaataatttttcatttttcaaaaaagatcatttggatagcagctatgtataaaatggaaaataaaaaattattctattttgcatgaatagttcagactttcccataccacagccaagcagtaactaaaattaggatcttaattttcaatgataaaaggtctaaggttcatttaattatgctcctttaacactgtctttctagatttttcacccagtattttcaaaatttgggaatgtaaacaattgatatatttattgtatgttggctagcagttcatccttctgcaaaatatgcattcagagaaatgtgaagcttgttttaatgaagacttaaaccatttgtgtcatttgtgttttcatattcaaatacaccaaattaaaattctgaacctatatttttcatcattaacttcctaatataccagaacatatacctttttcatgtaaagttggcaatgggatatggcagttttatttttgaaaaatatgtaacatgactttaatatttttatagttttcagaattagaaacataggaagggaaaatgttttaattagataagtcaactttttatgtgtctgtagtggtgtactataatagcaaattataaagcattattaaatgtttataataatttttaatattacctacattatgaatttaactaaaataaagtgtgagttgtatattttttaattgggttgtttcaatagctggaagcatcctgaagcattatattgatttttgaactatttgaactcaaactgagtatgatttgaaaataaattaataatttaaaaaca

SEQ ID NO: 12378 - DNA, 2456 bp, Homo sapiens
  source 1..2456: mol_type = unassigned DNA
actaccgcgaggaacagcgcccaaagtcacgcgaagatgcagtttctccgtatccgcaggcttctttcgctggcgccattacctgagttctcctccagcgtttccgcaccctctccgattagcggtcccaggagtttccaaggtaaccgcgcagtagggcggatctcattaggcggaaagcgaaacccggaagtgacgctcttaccgggtgtcagcagcgagagggttcgaagatggcggcgcgcaagggtcggcggcgcacgtgtgaaaccggggaacccatggaagccgagtccggcgacacaagttccgagggcccggcccaggtctacctgcccggccgggggccgccgctacgcgaaggggaggagctggtcatggacgaggaggcctatgtgctctaccaccgagcgcagactggcgccccctgtctcagctttgacatagtccgggatcacctgggagacaaccggacagagcttcctcttacactttacttgtgtgctgggacccaggctgagagcgcccagagcaacagactgatgatgcttcggatgcacaatctgcatgggacaaagcccccaccctcagagggcagtgatgaagaagaagaggaggaagatgaagaggatgaagaagagcggaaacctcagctggagctggccatggtgccccactatggtggcatcaaccgagttcgggtgtcatggctgggtgaagagcctgtggctggggtgtggtcagagaagggccaggtggaggtgtttgcgctgcggcggcttctgcaggtggtggaggagccccaggccctggcagccttcctccgggatgagcaggcccaaatgaagcccatcttctccttcgctggacacatgggcgagggctttgcccttgactggtccccccgggtgaccggtcgcctgctgaccggtgactgtcaaaagaacatccacctctggacacctacggacggcggctcctggcacgtggaccagcggccattcgtgggccacacacgctctgtggaggacctgcagtggtcaccgactgagaacacggtgtttgcctcctgctcagctgacgcctccatccgcatctgggacatccgggcagcccccagcaaggcctgcatgctcaccacagccaccgcccatgatggggacgtcaatgtcatcagctggagccgccgggagcccttcctgctcagtggcggggatgatggggccctcaagatctgggaccttcggcagttcaagtctggttccccagtggccaccttcaagcagcacgtggcccccgtgacctccgtcgagtggcacccccaggacagcggggtctttgcagcctcgggtgcagaccaccagatcacacagtgggacctggcagtggagcgggaccctgaggcgggcgacgtggaggccgaccccggactggccgacctcccgcagcagctgctgttcgtgcaccagggcgagaccgagctgaaggagctgcactggcacccgcagtgcccagggctcctggtcagcacggcgctgtcaggcttcaccatcttccgcaccatcagcgtctgaggcgtcccactggctctgatcttgcttcctgcttggaaactgaagtcgaattgggctcccctggaaggggttcattcaggtctgttgactgagactggccggcctgtgggctgccgtgatggattctgtttgacgtattgttctctagaaggcctggctctgatccagtgacccctctcaccaaagaactcggtttaaccagggctctgtaagaccactcccacccagagacttgtgtggcctggtgtggcctgtgtgtcggattccttcctgtcagctgtgacccatttgacctgtgtccccagaacccagttttttgtttgtttgtttgagacggagtcttggtctgtcgcccaggctggagtgcagtagcacgatcttggctcactgcaacctccgcctcctgggttaaagtgattctctcagctcagtctcccaggtagctgggattacaggcatgtgccaccacaccccgttaatttttgtatttttagtagagacggggtttcaccatgttggccaggctggtctcaaattcttgatctcaagtgatctgtccgccccggcctcccagagtgctgggttgggattacaggcgtgagccaccgcgtccggctcaggacccagttttggctgctggttcccagcaggggactcgggggatatacagtggctgcaccaaattggaggtgtgggttcctccaacacaatttgcttctgcccgttgtcttcctgccagctgggtttggccaggatttctccgtgtgggggctacatgcgaccctctcccctcctccctgactttagaggctggtgctgtgtcgggaggaaggtcagggctcctgagcagcaataaaggaccaggaagaggcctgaggtgta

SEQ ID NO: 12379 - DNA, 3976 bp, Homo sapiens
  source 1..3976: mol_type = unassigned DNA
gcggggatgcggctgtgggcgccggggccgggtagctgctccaggcgcgcgagctaaccgagtgcggcgagggcctaccaggggcgacagggtttctctccgcaagcgcgcgatgcagcgggcggcggcgctggtccggcggggctgtggtccccggacccccagctcctggggccgcagccagagcagcgcggccgccgaggcctcggcggtgctcaaggtgcggcccgagcgcagccggcgcgagcgcatcctcacgctggagtccatgaacccgcaggtgaaggcggtggagtacgccgtgcggggacccatcgtgctcaaggccggcgagatcgagctcgagctgcagcggggtatcaaaaagccattcacagaggtcatccgagccaacatcggggacgcccaggctatggggcagcagccaatcaccttcctccggcaggtgatggcactatgcacctacccaaacctgctggacagccccagcttcccagaagatgctaagaaacgtgcccggcggatcctgcaggcttgtggcgggaacagcctggggtcctacagtgctagccagggtgtcaactgcatccgtgaagatgtggctgcctacatcaccaggagggatggcggtgtgcctgcggaccccgacaacatctacctgaccacgggagctagtgacggcatttctacgatcctgaagatcctcgtctccgggggcggcaagtcacggacaggtgtgatgatccccatcccacaatatcccctctattcagctgtcatctctgagctcgacgccatccaggtgaattactacctggacgaggagaactgctgggcgctgaatgtgaatgagctccggcgggcggtgcaggaggccaaagaccactgtgatcctaaggtgctctgcataatcaaccctgggaaccccacaggccaggtacaaagcagaaagtgcatagaagatgtgatccactttgcctgggaagagaagctctttctcctggctgatgaggtgtaccaggacaacgtgtactctccagattgcagattccactccttcaagaaggtgctgtacgagatggggcccgagtactccagcaacgtggagctcgcctccttccactccacctccaagggctacatgggcgagtgtggttacagaggaggctacatggaggtgatcaacctgcaccctgagatcaagggccagctggtgaagctgctgtcggtgcgcctgtgccccccagtgtctgggcaggccgccatggacattgtcgtgaaccccccggtggcaggagaggagtcctttgagcaattcagccgagagaaggagtcggtcctgggtaatctggccaaaaaagcaaagctgacggaagacctgtttaaccaagtcccaggaattcactgcaaccccttgcagggggccatgtacgccttccctcggatcttcattcctgccaaagctgtggaggctgctcaggcccatcaaatggctccagacatgttctactgcatgaagctcctggaggagactggcatctgtgtcgtgcccggcagtggctttgggcagagggaaggcacttaccacttcaggatgactatcctccctccagtggagaagctgaaaacggtgctgcagaaggtgaaagacttccacatcaacttcctggagaagtacgcgtgaggacgcctgagccccagcgggagacctgtccttggctcttcctcccaatgcccgtcaggctgaactcgcctcccccgtgactctgcctcgggcctcgcagaggccgctggtcacttcgtcatcattttgcccctggagacgtctttctttgtgccttgatgttgagagcgcctctcttttgagcaaacaagcattctatatgcaaccagagtagaggggacctgctcagcaggtgtgaccagggttctctgaatctgttattgtttttgcttctggaaagttcatttggggtttacaacaactaggatgtgttgggtgagatgtttcagatctggagaaatgagcaggtgtcgggaaatgtgtgacttaaccgtggtgagggctggaaatccaaactcaccaccatgatctgtgaaataaagcccttagcggtgtgaagcatccggtcctttgaacagaagggcctggaaggcccctggggctgagaaagggtccgcccggtggcctggaggcaggcgccgggagcgcagtagcacgtggactgggcaggatgttgcactagcttggggtagatgctgggggctgcggccacggtcagagggccccactgtgaggcgtgggtgtgagccaggctgcaggaggaactgggcctccgcttcccagcaacgcagccaggcctgagaattctgtgcgcccggcgggctttgggaatgaggggttcccttgaacatgcgtaggctggaaccccgtctgagaggtctccctgaatttcagtgacacatagtgcagcccggcagtgtcccacttccgtggagagagccgctggaatggtgtggacccatcccgcgggtgaccggtgcctgttctcccctgaccgagcctgtgagcacatcgccccctgctggcgacagcggggaaatgagggctgaaaatatcctccccacaagggcaatccccgggacctgccgagcagccaaggccctgtcctttcttgaatggtggcgagctgaatctggtcggtttcctagcttttaggtggtaaaagtgcctggcagcttggctgccgtggaggagtcagtcgtggttggaggttcattgccgtgctttcatgcagagtgttttgccttcatgttagcttccggctcccctcccaggctgcagactctgacctgtggcatcaggcttctcccagtacaggagggtgccatcccccagcatgcggcttctctgccattagcagccctgggcgggccgaccacactcgaggctgcggtgctacgggcttagccctcgcctccctcactgggagcttccccatcctccctgccttccccagtgggaagttagggaagctcaggagcctgggaccccgcatgtcccaaaatgggattggagaagctggagagaaagcagaagaggccgaggagtgaggcagcagcctctatgctgtgatttccacaccgggtccgtgcagaggaaacagaaactcccaactgtccttacccaccgacatcacagcccctatgaagaaagtagccacaatctcaaataacaaaagggaatgttctaaaactttttcttccttaaaaaatggagaaaattgcacttgtgcttgctgtgtggtatataaaccaggattagtcccagggtcgtgaggtttctggtgaaaaggttaaatcgtagaagctagtatattttttatatttttgtaacaattgcttttttcatgggggaggcggggttagtatttatagtcctaacaagtccagtaattttttataaatcttcagattataaacagcccctaaaaactttacaacgtttacacagttttttaaaaagagactgtatacacttgatttgctttcaaaataaataaggtcagctagtctaggaggttaacgtcgggtaggaatgctgatcatgataggtttggttttctacagattctgttccggtgcctttcctatccaggcaccacctgagaaagttgtcatttgaggtcgcacttggaagttacatctgtgaagtttctgtcattcgtccagatctgtgtgtgtagcatgtgctgaggaagcacgtgctgggctgtgcctcagacagtgcatcaccgggcacccagaggcttgcctggctattcctgttctggtgtgtgtggagtgttggggaggaacagatgcagatcaacctgtggctgttttcccgtctaggttctcacaggtatctcctgacagaggtacttaacaatggctctgctggaaatttctataaataaaatgtccaaaatggtga

SEQ ID NO: 12380 - DNA, 3873 bp, Homo sapiens
  source 1..3873: mol_type = unassigned DNA
aattgttgagcgggccgtgctgccaggcaccgcacgttgtgtgtctgccctactctcgtggaaccaaggtccagtggagagaggaacataagcgaatgaagaaagaagcaatagagtctcagtgataagttcttggaaaaaaggtctttgccaatcctgattcccggaagagagtcggcagaattccttcctttaggcccctctggagccttggccgaccagccacttctgtggtctggggacagtcaccgagggtatcaaaaagccattcacagaggtcatccgagccaacatcggggacgcccaggctatggggcagcagccaatcaccttcctccggcaggtgatggcactatgcacctacccaaacctgctggacagccccagcttcccagaagatgctaagaaacgtgcccggcggatcctgcaggcttgtggcgggaacagcctggggtcctacagtgctagccagggtgtcaactgcatccgtgaagatgtggctgcctacatcaccaggagggatggcggtgtgcctgcggaccccgacaacatctacctgaccacgggagctagtgacggcatttctacgatcctgaagatcctcgtctccgggggcggcaagtcacggacaggtgtgatgatccccatcccacaatatcccctctattcagctgtcatctctgagctcgacgccatccaggtgaattactacctggacgaggagaactgctgggcgctgaatgtgaatgagctccggcgggcggtgcaggaggccaaagaccactgtgatcctaaggtgctctgcataatcaaccctgggaaccccacaggccaggtacaaagcagaaagtgcatagaagatgtgatccactttgcctgggaagagaagctctttctcctggctgatgaggtgtaccaggacaacgtgtactctccagattgcagattccactccttcaagaaggtgctgtacgagatggggcccgagtactccagcaacgtggagctcgcctccttccactccacctccaagggctacatgggcgagtgtggttacagaggaggctacatggaggtgatcaacctgcaccctgagatcaagggccagctggtgaagctgctgtcggtgcgcctgtgccccccagtgtctgggcaggccgccatggacattgtcgtgaaccccccggtggcaggagaggagtcctttgagcaattcagccgagagaaggagtcggtcctgggtaatctggccaaaaaagcaaagctgacggaagacctgtttaaccaagtcccaggaattcactgcaaccccttgcagggggccatgtacgccttccctcggatcttcattcctgccaaagctgtggaggctgctcaggcccatcaaatggctccagacatgttctactgcatgaagctcctggaggagactggcatctgtgtcgtgcccggcagtggctttgggcagagggaaggcacttaccacttcaggatgactatcctccctccagtggagaagctgaaaacggtgctgcagaaggtgaaagacttccacatcaacttcctggagaagtacgcgtgaggacgcctgagccccagcgggagacctgtccttggctcttcctcccaatgcccgtcaggctgaactcgcctcccccgtgactctgcctcgggcctcgcagaggccgctggtcacttcgtcatcattttgcccctggagacgtctttctttgtgccttgatgttgagagcgcctctcttttgagcaaacaagcattctatatgcaaccagagtagaggggacctgctcagcaggtgtgaccagggttctctgaatctgttattgtttttgcttctggaaagttcatttggggtttacaacaactaggatgtgttgggtgagatgtttcagatctggagaaatgagcaggtgtcgggaaatgtgtgacttaaccgtggtgagggctggaaatccaaactcaccaccatgatctgtgaaataaagcccttagcggtgtgaagcatccggtcctttgaacagaagggcctggaaggcccctggggctgagaaagggtccgcccggtggcctggaggcaggcgccgggagcgcagtagcacgtggactgggcaggatgttgcactagcttggggtagatgctgggggctgcggccacggtcagagggccccactgtgaggcgtgggtgtgagccaggctgcaggaggaactgggcctccgcttcccagcaacgcagccaggcctgagaattctgtgcgcccggcgggctttgggaatgaggggttcccttgaacatgcgtaggctggaaccccgtctgagaggtctccctgaatttcagtgacacatagtgcagcccggcagtgtcccacttccgtggagagagccgctggaatggtgtggacccatcccgcgggtgaccggtgcctgttctcccctgaccgagcctgtgagcacatcgccccctgctggcgacagcggggaaatgagggctgaaaatatcctccccacaagggcaatccccgggacctgccgagcagccaaggccctgtcctttcttgaatggtggcgagctgaatctggtcggtttcctagcttttaggtggtaaaagtgcctggcagcttggctgccgtggaggagtcagtcgtggttggaggttcattgccgtgctttcatgcagagtgttttgccttcatgttagcttccggctcccctcccaggctgcagactctgacctgtggcatcaggcttctcccagtacaggagggtgccatcccccagcatgcggcttctctgccattagcagccctgggcgggccgaccacactcgaggctgcggtgctacgggcttagccctcgcctccctcactgggagcttccccatcctccctgccttccccagtgggaagttagggaagctcaggagcctgggaccccgcatgtcccaaaatgggattggagaagctggagagaaagcagaagaggccgaggagtgaggcagcagcctctatgctgtgatttccacaccgggtccgtgcagaggaaacagaaactcccaactgtccttacccaccgacatcacagcccctatgaagaaagtagccacaatctcaaataacaaaagggaatgttctaaaactttttcttccttaaaaaatggagaaaattgcacttgtgcttgctgtgtggtatataaaccaggattagtcccagggtcgtgaggtttctggtgaaaaggttaaatcgtagaagctagtatattttttatatttttgtaacaattgcttttttcatgggggaggcggggttagtatttatagtcctaacaagtccagtaattttttataaatcttcagattataaacagcccctaaaaactttacaacgtttacacagttttttaaaaagagactgtatacacttgatttgctttcaaaataaataaggtcagctagtctaggaggttaacgtcgggtaggaatgctgatcatgataggtttggttttctacagattctgttccggtgcctttcctatccaggcaccacctgagaaagttgtcatttgaggtcgcacttggaagttacatctgtgaagtttctgtcattcgtccagatctgtgtgtgtagcatgtgctgaggaagcacgtgctgggctgtgcctcagacagtgcatcaccgggcacccagaggcttgcctggctattcctgttctggtgtgtgtggagtgttggggaggaacagatgcagatcaacctgtggctgttttcccgtctaggttctcacaggtatctcctgacagaggtacttaacaatggctctgctggaaatttctataaataaaatgtccaaaatggtg

SEQ ID NO: 12381 - DNA, 1947 bp, Homo sapiens
  source 1..1947: mol_type = unassigned DNA
gaaatctcttgattcctagtctctcgatatggcacctccgtcagtctttgccgaggttccgcaggcccagcctgtcctggtcttcaagctcactgccgacttcagggaggatccggacccccgcaaggtcaacctgggagtgggagcatatcgcacggatgactgccatccctgggttttgccagtagtgaagaaagtggagcagaagattgctaatgacaatagcctaaatcacgagtatctgccaatcctgggcctggctgagttccggagctgtgcttctcgtcttgcccttggggatgacagcccagcactcaaggagaagcgggtaggaggtgtgcaatctttggggggaacaggtgcacttcgaattggagctgatttcttagcgcgttggtacaatggaacaaacaacaagaacacacctgtctatgtgtcctcaccaacctgggagaatcacaatgctgtgttttccgctgctggttttaaagacattcggtcctatcgctactgggatgcagagaagagaggattggacctccagggcttcctgaatgatctggagaatgctcctgagttctccattgttgtcctccacgcctgtgcacacaacccaactgggattgacccaactccggagcagtggaagcagattgcttctgtcatgaagcaccggtttctgttccccttctttgactcagcctatcagggcttcgcatctggaaacctggagagagatgcctgggccattcgctattttgtgtctgaaggcttcgagttcttctgtgcccagtccttctccaagaacttcgggctctacaatgagagagtcgggaatctgactgtggttggaaaagaacctgagagcatcctgcaagtcctttcccagatggagaagatcgtgcggattacttggtccaatccccccgcccagggagcacgaattgtggccagcaccctctctaaccctgagctctttgaggaatggacaggtaatgtgaagacaatggctgaccggattctgaccatgagatctgaactcagggcacgactagaagccctcaaaacccctgggacctggaaccacatcactgatcaaattggcatgttcagcttcactgggttgaaccccaagcaggttgagtatctggtcaatgaaaagcacatctacctgctgccaagtggtcgaatcaacgtgagtggcttaaccaccaaaaatctagattacgtggccacctccatccatgaagcagtcaccaaaatccagtgaagaaacaccacccgtccagtaccaccaaagtagttctctgtcatgtgtgttccctgcctgcacaaacctacatgtacataccatggattagagacacttgcaggactgaaaggctgctctggtgaggcagcctctgtttaaaccggccccacatgaagagaacatcccttgagacgaatttggagactgggattagagcctttggaggtcaaagcaaattaagatttttatttaagaataaaagagtactttgatcatgagacataggtatcttgtccctctcactaaaaaggagtgttgtgtgtggcggccacgtgcttctatgtggtgtttgactctgtacaaattctagtcccaaagatcaagttgtctgaaggagccaaagtgtgaatgtgggtgtcggctgcggcattaaattcatcatctcaacccagagtgtctggtctccctgctctttctgcatggttgtgtccctagtcctaagctttggttctttagggtgactgtggtaagaaggatatttaatcatgacatgcacggacacgtacatatttaactgaaacaagttttaccaaacagtatttactcgtgatgtgcgtagtgcattctgatatttttgagccattctattgtgttctacttcacctaaaaaaataaaataaaaatgttgatcaaga

SEQ ID NO: 12382 - DNA, 1536 bp, Homo sapiens
  source 1..1536: mol_type = unassigned DNA
gtcgcaacggccagacctgacctgccagctccgggcgtggggtgaaatctcttgattcctagtctctcgatatggcacctccgtcagtctttgccgaggttccgcaggcccagcctgtcctggtcttcaagctcactgccgacttcagggaggatccggacccccgcaaggtcaacctgggagtgggagcatatcgcacggatgacagcccagcactcaaggagaagcgggtaggaggtgtgcaatctttggggggaacaggtgcacttcgaattggagctgatttcttagcgcgttggtacaatggaacaaacaacaagaacacacctgtctatgtgtcctcaccaacctgggagaatcacaatgctgtgttttccgctgctggttttaaagacattcggtcctatcgctactgggatgcagagaagagaggattggacctccagggcttcctgaatgatctggagaatgctcctgagttctccattgttgtcctccacgcctgtgcacacaacccaactgggattgacccaactccggagcagtggaagcagattgcttctgtcatgaagcaccggtttctgttccccttctttgactcagcctatcagggcttcgcatctggaaacctggagagagatgcctgggccattcgctattttgtgtctgaaggcttcgagttcttctgtgcccagtccttctccaagaacttcgggctctacaatgagagagtcgggaatctgactgtggttggaaaagaacctgagagcatcctgcaagtcctttcccagatggagaagatcgtgcggattacttggtccaatccccccgcccagggagcacgaattgtggccagcaccctctctaaccctgagctctttgaggaatggacaggtaatgtgaagacaatggctgaccggattctgaccatgagatctgaactcagggcacgactagaagccctcaaaacccctgggacctggaaccacatcactgatcaaattggcatgttcagcttcactgggttgaaccccaagcaggttgagtatctggtcaatgaaaagcacatctacctgctgccaagtggtcgaatcaacgtgagtggcttaaccaccaaaaatctagattacgtggccacctccatccatgaagcagtcaccaaaatccagtgaagaaacaccacccgtccagtaccaccaaagtagttctctgtcatgtgtgttccctgcctgcacaaacctacatgtacataccatggattagagacacttgcaggactgaaaggctgctctggtgaggcagcctctgtttaaaccggccccacatgaagagaacatcccttgagacgaatttggagactgggattagagcctttggaggtcaaagcaaattaagatttttatttaagaataaaagagtactttgatcatgagacataggtatcttgtccctctcactaaaaaggagtgttgtgtgtggcggccacgtgcttctatgtggtgtttgactctgtacaaattctagtcccaaagatca

SEQ ID NO: 12383 - DNA, 1432 bp, Homo sapiens
  source 1..1432: mol_type = unassigned DNA
aaggatgtagtgctctggagtgtgagcagctcggggagtggagcggacccaacccaggtcgtggagactgtgggagaagccgaggcccagtgtggcgctgcctgaagagggcggcgccggagaggaggctggatccacgaaggcttcctaaaacctgcccattttacagatgcaggtgtggagtccctggaaaggggcgatgtgtccgaggccgcacaaaccagcatatcgcacggatgactgccatccctgggttttgccagtagtgaagaaagtggagcagaagattgctaatgacaatagcctaaatcacgagtatctgccaatcctgggcctggctgagttccggagctgtgcttctcgtcttgcccttggggatgacagcccagcactcaaggagaagcgggtaggaggtgtgcaatctttggggggaacaggtgcacttcgaattggagctgatttcttagcgcgttggtacaatggaacaaacaacaagaacacacctgtctatgtgtcctcaccaacctgggagaatcacaatgctgtgttttccgctgctggttttaaagacattcggtcctatcgctactgggatgcagagaagagaggattggacctccagggcttcctgaatgatctggagaatgctcctgagttctccattgttgtcctccacgcctgtgcacacaacccaactgggattgacccaactccggagcagtggaagcagattgcttctgtcatgaagcaccggtttctgttccccttctttgactcagcctatcagggcttcgcatctggaaacctggagagagatgcctgggccattcgctattttgtgtctgaaggcttcgagttcttctgtgcccagtccttctccaagaacttcgggctctacaatgagagagtcgggaatctgactgtggttggaaaagaacctgagagcatcctgcaagtcctttcccagatggagaagatcgtgcggattacttggtccaatccccccgcccagggagcacgaattgtggccagcaccctctctaaccctgagctctttgaggaatggacaggtaatgtgaagacaatggctgaccggattctgaccatgagatctgaactcagggcacgactagaagccctcaaaacccctgggacctggaaccacatcactgatcaaattggcatgttcagcttcactgggttgaaccccaagcaggttgagtatctggtcaatgaaaagcacatctacctgctgccaagtggtcgaatcaacgtgagtggcttaaccaccaaaaatctagattacgtggccacctccatccatgaagcagtcaccaaaatccagtgaagaaacaccacccgtccagtaccaccaaagtagttctctgtcatgtgtgttccctgcctgcacaaacctacatgtacataccat

SEQ ID NO: 12384 - DNA, 2385 bp, Homo sapiens
  source 1..2385: mol_type = unassigned DNA
gctcgccctctgctccgtcctgcggctgcccactgccctcctacggtccaccatggccctgctgcactccggccgcgtcctccccgggatcgccgccgccttccacccgggcctcgccgccgcggcctctgccagagccagctcctggtggacccatgtggaaatgggacctccagatcccattctgggagtcactgaagcctttaagagggacaccaatagcaaaaagatgaatctgggagttggtgcctaccgggatgataatggaaagccttacgttctgcctagcgtccgcaaggcagaggcccagattgccgcaaaaaatttggacaaggaatacctgcccattgggggactggctgaattttgcaaggcatctgcagaactagccctgggtgagaacagcgaagtcttgaagagtggccggtttgtcactgtgcagaccatttctggaactggagccttaaggatcggagccagttttctgcaaagattttttaagttcagccgagatgtctttctgcccaaaccaacctggggaaaccacacacccatcttcagggatgctggcatgcagctacaaggttatcggtattatgaccccaagacttgcggttttgacttcacaggcgctgtggaggatatttcaaaaataccagagcagagtgttcttcttctgcatgcctgcgcccacaatcccacgggagtggacccgcgtccggaacagtggaaggaaatagcaacagtggtgaagaaaaggaatctctttgcgttctttgacatggcctaccaaggctttgccagtggtgatggtgataaggatgcctgggctgtgcgccacttcatcgaacagggcattaatgtttgcctctgccaatcatatgccaagaacatgggcttatatggtgagcgtgtaggagccttcactatggtctgcaaagatgcggatgaagccaaaagggtagagtcacagttgaagatcttgatccgtcccatgtattccaaccctcccctcaatggggcccggattgctgctgccattctgaacaccccagatttgcgaaaacaatggctgcaagaagtgaaagtcatggctgaccgcatcattggcatgcggactcaactggtctccaacctcaagaaggagggttccacccacaattggcaacacatcaccgaccaaattggcatgttctgtttcacagggctaaagcctgaacaggtggagcggctgatcaaggagttctccatctacatgacaaaagatggccgcatctctgtggcaggggtcacctccagcaacgtgggctaccttgcccatgccattcaccaggtcaccaagtaatgtccctggtgcgaggaaacagagacaacctttctgtcttcagcctctgctattgagagcttcacacagacaatgagagagggtggatggtggtgagtggatcatttctttcagccacagtgtgtaacactcagcatttgaatgtttctcagaaaagaacatgtagtgacacagggcagaggcatccatggctggcgtctggaatattaaaccaaactctccccggtccttttttctccaacttttctcaaagagtttacatgtgcaagaaagtcatcgcaccaaaaaacctgtcaattatgccattgcaatatttcagaagctttaactgaagtgtcaggttcctcgtgagaaacagcacacgttagaggctttgagagaaggcctagttctgtcatgagtagtcggcctcgtgtctgtcctcccatcttggaacaaccttatcaacaggccgcactgcagaaatgatgttttatgaaaaccaatgaggctgctgccactccagcaagggaaataatgcagtttcctgtcttatttaagaaaaagagaaggctctcttttctcccttgtcattgccgttcttttccttacacgcaaagattttttaactattgcagattttcatcccattctactgcttgattgaccatcaactccatcctatcgagatttatttaagaatgaagaacataattttctgctgatgctgtaccctcacccttttcagcaaagaatagtggagagtaggaaactgtactttatctcggcatcctcttgaatgatagtgcaagtttctccagttgggatgttgtctctgcccggttggacctcctccctttgttgaatgtggtgtgcagcctctcatctcacactgtgagtccagcggcgcagggtggtaccaggaaagaggatattctaggctttgcgtgctgctagctgggttcaggcttcacccactggaaagaaccaccatctgctctaaccatgtagacttattgcggcctggtttctctgttacaataaaattactgtagacccaa

SEQ ID NO: 12385 - DNA, 1342 bp, Homo sapiens
  source 1..1342: mol_type = unassigned DNA
accttcagcaggagccggttccctgtgtgtgtgtccgctcgccctctgctccgtcctgcggctgcccactgccctcctacggtccaccatggccctgctgcactccggccgcgtcctccccgggatcgccgccgccttccacccgggcctcgccgccgcggcctctgccagagccagctcctggtggacccatgtggaaatgggacctccagatcccattctgggagtcactgaagcctttaagagggacaccaatagcaaaaagatgaatctgggagttggtgcctaccgggatgataatggaaagccttacgttctgcctagcgtccgcaaggcagaggcccagattgccgcaaaaaatttggacaaggaatacctgcccattgggggactggctgaattttgcaaagattttttaagttcagccgagatgtctttctgcccaaaccaacctggggaaaccacacacccatcttcagggatgctggcatgcagctacaaggttatcggtattatgaccccaagacttgcggttttgacttcacaggcgctgtggaggatatttcaaaaataccagagcagagtgttcttcttctgcatgcctgcgcccacaatcccacgggagtggacccgcgtccggaacagtggaaggaaatagcaacagtggtgaagaaaaggaatctctttgcgttctttgacatggcctaccaaggctttgccagtggtgatggtgataaggatgcctgggctgtgcgccacttcatcgaacagggcattaatgtttgcctctgccaatcatatgccaagaacatgggcttatatggtgagcgtgtaggagccttcactatggtctgcaaagatgcggatgaagccaaaagggtagagtcacagttgaagatcttgatccgtcccatgtattccaaccctcccctcaatggggcccggattgctgctgccattctgaacaccccagatttgcgaaaacaatggctgcaagaagtgaaagtcatggctgaccgcatcattggcatgcggactcaactggtctccaacctcaagaaggagggttccacccacaattggcaacacatcaccgaccaaattggcatgttctgtttcacagggctaaagcctgaacaggtggagcggctgatcaaggagttctccatctacatgacaaaagatggccgcatctctgtggcaggggtcacctccagcaacgtgggctaccttgcccatgccattcaccaggtcaccaagtaatgtccctggtgcgaggaaacagagacaacctttctgtcttcagcctctgctattgagagcttcacacagacaatgagag

SEQ ID NO: 12386 - DNA, 1615 bp, Homo sapiens
  source 1..1615: mol_type = unassigned DNA
ccctgtccttaccttcagcaggagccggttccctgtgtgtgtgtccgctcgccctctgctccgtcctgcggctgcccactgccctcctacggtccaccatggccctgctgcactccggccgcgtcctccccgggatcgccgccgccttccacccgggcctcgccgccgcggcctctgccagagccagctcctggtggacccatgtggaaatgggacctccagatcccattctgggagtcactgaagcctttaagagggacaccaatagcaaaaagatgaatctgggagttggtgcctaccgggatgataatggaaagccttacgttctgcctagcgtccgcaagtttgtcactgtgcagaccatttctggaactggagccttaaggatcggagccagttttctgcaaagattttttaagttcagccgagatgtctttctgcccaaaccaacctggggaaaccacacacccatcttcagggatgctggcatgcagctacaaggttatcggtattatgaccccaagacttgcggttttgacttcacaggcgctgtggaggatatttcaaaaataccagagcagagtgttcttcttctgcatgcctgcgcccacaatcccacgggagtggacccgcgtccggaacagtggaaggaaatagcaacagtggtgaagaaaaggaatctctttgcgttctttgacatggcctaccaaggctttgccagtggtgatggtgataaggatgcctgggctgtgcgccacttcatcgaacagggcattaatgtttgcctctgccaatcatatgccaagaacatgggcttatatggtgagcgtgtaggagccttcactatggtctgcaaagatgcggatgaagccaaaagggtagagtcacagttgaagatcttgatccgtcccatgtattccaaccctcccctcaatggggcccggattgctgctgccattctgaacaccccagatttgcgaaaacaatggctgcaagaagtgaaagtcatggctgaccgcatcattggcatgcggactcaactggtctccaacctcaagaaggagggttccacccacaattggcaacacatcaccgaccaaattggcatgttctgtttcacagggctaaagcctgaacaggtggagcggctgatcaaggagttctccatctacatgacaaaagatggccgcatctctgtggcaggggtcacctccagcaacgtgggctaccttgcccatgccattcaccaggtcaccaagtaatgtccctggtgcgaggaaacagagacaacctttctgtcttcagcctctgctattgagagcttcacacagacaatgagagagggtggatggtggtgagtggatcatttctttcagccacagtgtgtaacactcagcatttgaatgtttctcagaaaagaacatgtagtgacacagggcagaggcatccatggctggcgtctggaatattaaaccaaactctccccggtccttttttctccaacttttctcaaagagtttacatgtgcaagaaagtcatcgcaccaaaaaacctgtcaattatgccattgcaatatttcagaagctttaactgaagtgtcaggttcctcgtgaga

SEQ ID NO: 12387 - DNA, 1885 bp, Homo sapiens
  source 1..1885: mol_type = unassigned DNA
agacgggtggggcggggcccaactgtccccagctccttcagccctttctgtccctcccagtgaggccagctgcggtgaagagggtgctctcttgcctggagttccctctgctacggctgccccctcccagccctggcccactaagccagacccagctgtcgccattcccacttctggtcctgccacctcctgagctgccttcccgcctggtctgggtagagtcatggcctcgagcacaggtgaccggagccaggcggtgaggcatggactgagggcgaaggtgctgacgctggacggcatgaacccgcgtgtgcggagagtggagtacgcagtgcgtggccccatagtgcagcgagccttggagctggagcaggagctgcgccagggtgtgaagaagcctttcaccgaggtcatccgtgccaacatcggggacgcacaggctatggggcagaggcccatcaccttcctgcgccaggtcttggccctctgtgttaaccctgatcttctgagcagccccaacttccctgacgatgccaagaaaagggcggagcgcatcttgcaggcgtgtgggggccacagtctgggggcctacagcgtcagctccggcatccagctgatccgggaggacgtggcgcggtacattgagaggcgtgacggaggcatccctgcggaccccaacaacgtcttcctgtccacaggggccagcgatgccatcgtgacggtgctgaagctgctggtggccggcgagggccacacacgcacgggtgtgctcatccccatcccccagtacccactctactcggccacgctggcagagctgggcgcagtgcaggtggattactacctggacgaggagcgtgcctgggcgctggacgtggccgagcttcaccgtgcactgggccaggcgcgtgaccactgccgccctcgtgcgctctgtgtcatcaaccctggcaaccccaccgggcaggtgcagacccgcgagtgcatcgaggccgtgatccgcttcgccttcgaagagcggctctttctgctggcggacgaggtgtaccaggacaacgtgtacgccgcgggttcgcagttccactcattcaagaaggtgctcatggagatggggccgccctacgccgggcagcaggagcttgcctccttccactccacctccaagggctacatgggcgagtgcgggttccgcggcggctatgtggaggtggtgaacatggacgctgcagtgcagcagcagatgctgaagctgatgagtgtgcggctgtgcccgccggtgccaggacaggccctgctggacctggtggtcagcccgcccgcgcccaccgacccctcctttgcgcagttccaggctgagaagcaggcagtgctggcagagctggcggccaaggccaagctcaccgagcaggtcttcaatgaggctcctggcatcagctgcaacccagtgcagggcgccatgtactccttcccgcgcgtgcagctgcccccgcgggcggtggagcgcgctcaggagctgggcctggcccccgatatgttcttctgcctgcgcctcctggaggagaccggcatctgcgtggtgccagggagcggctttgggcagcgggaaggcacctaccacttccggatgaccattctgccccccttggagaaactgcggctgctgctggagaagctgagcaggttccatgccaagttcaccctcgagtactcctgagcaccccagctggggccaggctgggtcgccctggactgtgtgctcaggagccctgggaggctctggagcccactgtacttgctcttgatgcctggcggggtggggtggggggggtgctgggcccctgcctctctgcaggtccctaataaagctgtgtggcagtctgactcc

SEQ ID NO: 12388 - DNA, 1822 bp, Homo sapiens
  source 1..1822: mol_type = unassigned DNA
agggctgccacttggactcccttgccagggggcgggcaggggctggctctgcctggggccaggcccatgttaacctgtgccccggcctgggggccagaggggcaggcctgcgcacggggaggctgttgtggcagcggaacagagacgtgcacgagtcatggcctcgagcacaggtgaccggagccaggcggtgaggcatggactgagggcgaaggtgctgacgctggacggcatgaacccgcgtgtgcggagagtggagtacgcagtgcgtggccccatagtgcagcgagccttggagctggagcaggagctgcgccagggtgtgaagaagcctttcaccgaggtcatccgtgccaacatcggggacgcacaggctatggggcagaggcccatcaccttcctgcgccaggtcttggccctctgtgttaaccctgatcttctgagcagccccaacttccctgacgatgccaagaaaagggcggagcgcatcttgcaggcgtgtgggggccacagtctgggggcctacagcgtcagctccggcatccagctgatccgggaggacgtggcgcggtacattgagaggcgtgacggaggcatccctgcggaccccaacaacgtcttcctgtccacaggggccagcgatgccatcgtgacggtgctgaagctgctggtggccggcgagggccacacacgcacgggtgtgctcatccccatcccccagtacccactctactcggccacgctggcagagctgggcgcagtgcaggtggattactacctggacgaggagcgtgcctgggcgctggacgtggccgagcttcaccgtgcactgggccaggcgcgtgaccactgccgccctcgtgcgctctgtgtcatcaaccctggcaaccccaccgggcaggtgcagacccgcgagtgcatcgaggccgtgatccgcttcgccttcgaagagcggctctttctgctggcggacgaggtgtaccaggacaacgtgtacgccgcgggttcgcagttccactcattcaagaaggtgctcatggagatggggccgccctacgccgggcagcaggagcttgcctccttccactccacctccaagggctacatgggcgagtgcgggttccgcggcggctatgtggaggtggtgaacatggacgctgcagtgcagcagcagatgctgaagctgatgagtgtgcggctgtgcccgccggtgccaggacaggccctgctggacctggtggtcagcccgcccgcgcccaccgacccctcctttgcgcagttccaggctgagaagcaggcagtgctggcagagctggcggccaaggccaagctcaccgagcaggtcttcaatgaggctcctggcatcagctgcaacccagtgcagggcgccatgtactccttcccgcgcgtgcagctgcccccgcgggcggtggagcgcgctcaggagctgggcctggcccccgatatgttcttctgcctgcgcctcctggaggagaccggcatctgcgtggtgccagggagcggctttgggcagcgggaaggcacctaccacttccggatgaccattctgccccccttggagaaactgcggctgctgctggagaagctgagcaggttccatgccaagttcaccctcgagtactcctgagcaccccagctggggccaggctgggtcgccctggactgtgtgctcaggagccctgggaggctctggagcccactgtacttgctcttgatgcctggcggggtggggtggggggggtgctgggcccctgcctctctgcaggtccctaataaagctgtgtggcagtctgactccagg

SEQ ID NO: 12389 - DNA, 4834 bp, Homo sapiens
  source 1..4834: mol_type = unassigned DNA
gagccttaggcggagcgaagagaaccggtcgcggcaatcctagcgcgcagcagcagcagcagcagcagcagcagcagcagcagcagcagcagcacccgcatccgctgcgggagtccgagccggaaccacacccaagtagctgccctttcctcttctgtcatctcaccgccccaccacagaccgcgttccccgaggaaaccggccgcccacgcccggagcatcctcccctgttgagcgggcgctgacggacccggcggcatgatgcggctgcgaggctcggggatgctgcgggacctgctcctgcggtcgcccgccggcgtgagcgcgactctgcggcgggcacagcccttggtcaccctgtgccggcgtccccgaggcgggggacggccggccgcgggcccggctgccgccgcgcgactccacccgtggtggggcgggggcggctggccggcggagcccctcgcgcggggcctgtccagctctccttcggagatcttgcaggagctgggcaaggggagcacgcatccgcagcccggggtgtcgccacccgctgccccggcggcgcccggccccaaggacggccccggggagacggacgcgtttggcaacagcgagggcaaagagctggtggcctcaggtgaaaataaaataaaacagggtctgttacctagcttggaagatttgctgttctatacaattgctgaaggacaagagaaaatacctgttcataaatttattacagcactcaaatctacaggattgcgaacgtctgatcccaggttgaaagagtgtatggatatgttaagattaactcttcaaacaacatcagatggtgtcatgctagacaaagatctttttaaaaaatgtgttcagagcaacattgttttgttgacacaagcatttagaagaaagtttgtgattcctgactttatgtcttttacctcacacattgatgagttatatgaaagtgctaaaaagcagtctggaggaaaggttgcagattatattcctcaactggccaaattcagtcccgatttgtggggtgtgtctgtttgtacagtagatggacagaggcattctactggagataccaaagttcccttctgtcttcagtcctgtgtaaaacctttgaaatatgccattgctgttaatgatcttggaactgaatatgtgcatcgatatgttggaaaagagccgagtggactaagattcaacaaactatttttgaatgaagatgataaaccacataatcctatggtaaatgctggagcaattgttgtgacttcactaataaagcaaggagtaaataatgctgaaaaatttgactatgtcatgcagtttttgaataagatggctggtaatgaatatgttggattcagtaatgcaacgtttcagtctgaaagagaaagtggagatcgaaattttgcaataggatattacttaaaagaaaagaagtgttttccagaaggcacagacatggttggtatattagacttctacttccagctgtgctccattgaagtgacttgtgaatcagccagtgtgatggctgcgacactggctaatggtggtttctgcccaattactggtgaaagagtactgagccctgaagcagttcgaaatacattgagtttgatgcattcctgtggcatgtatgacttctcagggcagtttgctttccatgttggtcttcctgcaaaatctggagttgctgggggcattcttttagttgtccccaatgttatgggtatgatgtgctggtctcctcctctggataagatgggcaacagtgttaagggaattcacttttgtcacgatcttgtttctctgtgtaatttccataactatgataatttgagacactttgcaaaaaaacttgatcctcgaagagaaggtggtgatcaaagggtaaagtcagtgataaatcttttgtttgctgcatatactggagatgtgtctgcacttcgaagatttgctttgtcagctatggacatggaacagcgggactatgattctagaacagcactccatgtagctgctgcagagggtcatgttgaagttgttaaatttttgctggaagcctgcaaagtaaaccctttccccaaggacaggtggaataacactcccatggatgaagcactgcactttggacaccatgatgtatttaaaattctccaagaataccaagtccagtacacacctcaaggagattctgacaacgggaaggaaaatcaaaccgtccataagaatcttgatggattgttgtaatggtctcaaatcccaagatttaaatcacttacctatttaattgtggaaaatgattatgaagaacatgtgtatttctatctggtagtgatgtatattttacatttgtcatttcagtgttactggagttttcttcattgtgcacacaggacaaatctgatctctttgggaaaaaatagaaataaaacaatctccctccataatgtgagcaatattacctcgtgcattgtataatttgatgtaaaagaaatagttaccaatgctagcttgtgtggtcttccatgatttatttgtgttttgtgaattttcaatttatggtgatgatctgctgatatgcatttataaagtaagctctgttgtacagtctgtccaaatgggtcaaggttgcctttagaagcaaatagtgtgattttcaagacttcaaatacaaatttagtttaagtgtttgaacaactatatgcacttacggttgtgtgtttaaaatgtctctctcaccccctagcttcatgatgtgactcttaaaaaactataatagttaacaactgttagtaagatagaccaattctgattagactttatcagggaatctgtttaagatatgtttggtgaccaaaacgtatgtgtgaatgtagttataatgcttttgaaaaattttcctttttctatatccccttagtccagcctctcttctcagacatttagctatctgcctctttcctttagctgggaaagtgagagctggcatactatgcagtttttatgttttccatagtaagtcagaaaatgcctcctatttctggcatcagaactttgccatttgtctacagaagacgaaccagagacaaaattactaagtataaattagtcaagtttatcagtctaaaaaacgaagggatgtgcaactgcagctctttaagaagttttttttttttagcttctagggtaaagataaattcagaaatgctctaagctaccaaagttattctgaaagtatgggaactgctacaactaacaaacatttgtttccaagcctgtcattaagagtctgcatcaagagatttgtcctccttgggggaccactggatcattccagatttcttgtgatttttctattgtgtaattcttggtgggctctgtagtttaataataagaaaaaggccatttcattttaaattgtgacctataattctttgtcttgggttggtaattcaggattcatttggaaagtgggtaaaaggggcttcaaaaaacggatagaacaggattttctaggagttacacatacattttatcctgtcatacctcgagataaagtggcatgttagtgaggagttctgatattaagcacacacacacatgcacacaaatggacttctctgaagctgtgtttagtgaaatgagctcaagtacatgaatgttagttgttatcacatacagcaaattcctttttttttctttttctatgagcacactctgctgcttctaaactttacatgcctgatggcaccttactccagcagcctccaggtgctttcattttcacttccagtctaagccagtggctcctgccactgccctcccattacctagatggcacctcctttggtgaaaccacggccaatgttccttagctgcaccaggcccgaagctgttcccatgcttgagcttccatggggaggatgctgagtgagcagtttcctaccccgtggatctagcaagccatggagacaggtagcatttgtaagatgctgcacaggagcagcattatccccaaagatattacagggtagacacgttttaactgaaatcaatcaagataactttattcaaagagcagcccgctttgtgtgactaaaatgaaacaagacagttgaattgtgtgacttgaagattaccaatgattttgaggcttttctataataaaaagaggttctaaccattatttgggaacaaagagagttttcatcttttttcagatcaaaaccattctgtaaaatctttgttgtttaattaaatgtgccgttatttacccctgatgttatttatgactatgtgccgattcctgctcgggctgtttgctgttggctggtaataatatatttgatttaaatgctgttgactgtgctattaactgctgccgtcagtaaactccaaagatctttttgttttggctttagtatcatatgtgctttttctgtatcctgagcgctctatatgatcatgttaatttaaagctttatacacattgttgtttttgctggtctcatctttggtaatatgctataccccactgctgcccgacactgccctttagctgcagagctggattagctgttgaccatttgatgctgttgtctgtctggcagggactgaatgacctgatgtcagatttagattcttcctggggattacacagctatgaatgtatttgcttctaaaacctcccaaagtgaatctaatcttaaaactacaagttgtaagtattctgaaattgggaaacatttattttaaatgcaatcaggtagtgttgctttttacagcataataaatatatgtatcaaaaaaaaaa

SEQ ID NO: 12390 - DNA, 4475 bp, Homo sapiens
  source 1..4475: mol_type = unassigned DNA
aggcggagcgaagagaaccggtcgcggcaatcctagcgcgcagcagcagcagcagcagcagcagcagcagcagcagcagcagcagcacccgcatccgctgcgggagtccgagccggaaccacacccaagtagctgccctttcctcttctgtcatctcaccgccccaccacagaccgcgttccccgaggaaaccggccgcccacgcccggagcatcctcccctgttgagcgggcgctgacggacccggcggcatgatgcggctgcgaggctcggggatgctgcgggacctgctcctgcggtcgcccgccggcgtgagcgcgactctgcggcgggcacagcccttggtcaccctgtgccggcgtccccgaggcgggggacggccggccgcgggcccggctgccgccgcgcgactccacccgtggtggggcgggggcggctggccggcggagcccctcgcgcggggcctgtccagctctccttcggagatcttgcaggagctgggcaaggggagcacgcatccgcagcccggggtgtcgccacccgctgccccggcggcgcccggccccaaggacggccccggggagacggacgcgtttggcaacagcgagggcaaagagctggtggcctcaggtgaaaataaaataaaacagggtctgttacctagcttggaagatttgctgttctatacaattgctgaaggacaagagaaaatacctgttcataaatttattacagcactcaaatctacaggattgcgaacgtctgatcccaggttgaaagagtgtatggatatgttaagattaactcttcaaacaacatcagatggtgtcatgctagacaaagatctttttaaaaaatgtgttcagagcaacattgttttgttgacacaagcatttagaagaaagtttgtgattcctgactttatgtcttttacctcacacattgatgagttatatgaaagtgctaaaaagcagtctggaggaaaggttgcagattatattcctcaactggccaaattcagtcccgatttgtggggtgtgtctgtttgtacagtagatggacagaggcattctactggagataccaaagttcccttctgtcttcagtcctgtgtaaaacctttgaaatatgccattgctgttaatgatcttggaactgaatatgtgcatcgatatgttggaaaagagccgagtggactaagattcaacaaactatttttgaatgaagatgataaaccacataatcctatggtaaatgctggagcaattgttgtgacttcactaataaagcaaggagtaaataatgctgaaaaatttgactatgtcatgcagtttttgaataagatggctggtaatgaatatgttggattcagtaatgcaacgtttcagtctgaaagagaaagtggagatcgaaattttgcaataggatattacttaaaagaaaagaagtgttttccagaaggcacagacatggttggtatattagacttctacttccagctgtgctccattgaagtgacttgtgaatcagccagtgtgatggctgcgacactggctaatggtggtttctgcccaattactggtgaaagagtactgagccctgaagcagttcgaaatacattgagtttgatgcattcctgtggcatgtatgacttctcagggcagtttgctttccatgttggtcttcctgcaaaatctggagttgctgggggcattcttttagttgtccccaatgttatgggtatgatgtgctggtctcctcctctggataagatgggcaacagtgttaagggaattcacttttgtcacgatcttgtttctctgtgtaatttccataactatgataatttgagacactttgcaaaaaaacttgatcctcgaagagaaggtggtgatcaaaggcattcctttggaccattggactatgaaagtctccaacaagaacttgctttaaaagagacagtatggaaaaaagtgtcacctgagtcaaatgaggacatctctacaactgtagtatatagaatggaaagtctgggagagaaaagctaaagaaatgggttctagtttcagaatgtttcttcatttaatctttcaaacatctttagcttttttttgcaagttataaatatttatttgaggtattttttgttctcaatcttgggtgctggagccataaagcttttttttccttttaatctttgtataaaggcagtagattaagaagtgcatttgttggtctttaaaaagtatttacaagtacataaatttgctttatttttaaaaatacaaaaaggaaaaatttaaattttttttgatgtaattaaaatgttaactatgtggtcagataatcccattttacaatagtaacagaaaattgtaattcttagttctaaaattcacaaattaaactcataagttttgttgcattttgttttttcttttccatttttaaaactaatgtgatgtctttagtggcaatagaaggtacttctatgctaaatacaaaactaaaaaggcaaaataatgaaccccaaattattttatttaaaatagcagtggattataaaattagcttgtgtttacatttatgccatttttggtgatagattggctttacattttaaaaaatttatttaaaaatttatcaaatgctttaaaatatgactcctactttttttattttgcaactcctctgttctgtcagagttgttatatacaggagtgtcttatgttactaaaacattccagccaaagaatttcagatgtgagataatgatgtttcatcaataaaaagctataatggttagttactcagaaggagaaacagtgagtgtcttcaagtgaattgttcacctaaacaattttattttcatattatccacataactttttctatgttatatttaaatatgaatggcaaattttggtttttagcttttacattttattatcttaattttataaatgctaatatttcttttgtgataagttatagcatctcataaagtttgttctatttgaagttttttagagtacttgagaaatgaatttagtctgcaggtagtaagtatgctactaaaatacgttagatctaaatccttttatttggtataaaaatgcaatattgagaatcaaaacttgtttttaagagaactatagattctacacaacctgatttcaagtaattattcatagtatttatagttgtcttggcaaagtgattgtaaaattctgtaggacctattcacacttcttccttcttccatatacttctctggttttccccatagttcccctataatttcaagtttgttgaaacctgttaattttagtgggggattagaagaaaaacttggtggtttcttagcatgatggtgtatgtatgtggtaatggaaagtctgtaaaagtaaatatagtgtagcaaaaaagatttcactgagtattttagatactagtgcaaataaagatagaaaatcttgatcataatgtcttaagtttgggaactgtgatattaagaaaagaaattcccttctagaggtgctggccaaaaagccttttgggctaacttaagtattaaatttatatatttaaataattatattttaagttgtagaggattttcccaaggattttatgcttacttgaatgttctttgaatgttcagatgcatatcctaactggatgcttctcaaggccttactgcatatttgtgttgcatatttatgttagttgcaccagggccatttgtagtttgggcaaccgaatgccttaattggaaaaaaggcattgtggtttcccctatgatctaaattgttacattttaccatttcattccgaagttggttttactttattaaatgaagatttagttttcatatcgtatacatagctgtatagatttcaaaattaggttgttaatttgtgtcacttactatttttgtgttggtaatgctttaaatgcatacttaaaaatgaagtactgttatctaagctactgtgtttagaaaatgttaagaatgagcagaaatttttatagaaaagtataaacggaagaagagataagatactgcgaataggccctcaaacttaaaaaagaaaaaactttgccagttttaaggacatattttgattctttcagtattcttaacacctttttaaacaaagttcttgatagtacccactattattgggtttgttttatgccattattgattcttgatattcaagcatttacaatgtagcatatttgattttcttttttctttctttttttggcatcattaacatttcatttgaaatgcatattgttcttgaagtactttgtttttagcataaatgttgtgcattttatcttagtgtttggatgaaaacatttgtgttgtttagctttcatttgctttgtatatttaataatgtacctttattttccagtatgcctacattttgtattgcacaataaatttattttaagctga

SEQ ID NO: 12391 - DNA, 816 bp, Homo sapiens
  source 1..816: mol_type = unassigned DNA
tggaagtttgatttatagaacctcatcccttctgcttttaaggcaatccagtgtacaaggttggtcttcctgcaaaatctggagttgctgggggcattcttttagttgtccccaatgttatgggtatgatgtgctggtctcctcctctggataagatgggcaacagtgttaagggaattcacttttgtcacgatcttgtttctctgtgtaatttccataactatgataatttgagacactttgcaaaaaaacttgatcctcgaagagaaggtggtgatcaaagggtaaagtcagtgataaatcttttgtttgctgcatatactggagatgtgtctgcacttcgaagatttgctttgtcagctatggacatggaacagcgggactatgattctagaacagcactccatgtagctgctgcagagggtcatgttgaagttgttaaatttttgctggaagcctgcaaagtaaaccctttccccaaggacaggtggaataacactcccatggatgaagcactgcactttggacaccatgatgtatttaaaattctccaagaataccaagtccagtacacacctcaaggagattctgacaacgggaaggaaaatcaaaccgtccataagaatcttgatggattgttgtaatggtctcaaatcccaagatttaaatcacttacctatttaattgtggaaaatgattatgaagaacatgtgtatttctatctggtagtgatgtatattttacatttgtcatttcagtgttactggagttttcttcattgtgcacacaggacaaatctgatctctttgggaaaaa

SEQ ID NO: 12392 - DNA, 2623 bp, Homo sapiens
  source 1..2623: mol_type = unassigned DNA
cacccactagaaagccacccgggttctccttcatccccaacgctcctcacctagcccctgtcctgagggtgcccctaaccctggagccagctttaaaggggcaggccccttctcctgccccagccccagccccacccaccgggcccacattctccgtcttccaggtccagcgctccctcacagaactcccccgcaccttgtctcgctcgctccgcccctccttcccagccacagctagaggtcccgggcgcacctgcagagccggaggcttgctggggcatgcgctccatgaaggctctgcagaaggccctgagccgggctggcagtcactgcgggcgaggaggctggggtcacccgagccggagccccctccttggcgggggcgtccggcaccacctcagtgaggccgcggcgcagggcagagagacgccacacagccaccagccgcagcaccaggatcatgattcatcagaaagtggcatgctgtcccgcctgggtgatttgctcttttacactattgctgaaggacaggaacgaatccctatccacaagttcaccactgcactaaaggccactggactgcagacatcagatcctcggctccgagactgcatgagcgagatgcaccgcgtggtccaagagtccagtagtggtggcctcttggaccgagatctcttccgaaagtgtgtgagcagcaacattgtgctcctgacccaggcattccgaaagaagtttgtcattcctgattttgaggagttcacgggccatgtggatcgcatctttgaggatgtcaaagagctcactggaggcaaagtggcagcctacatccctcagctggccaagtcaaacccagacctgtggggtgtctccctgtgcactgtggatggtcaacggcactctgtgggccacacaaagatccccttctgcctgcagtcctgtgtgaagcccctcacctatgccatctccataagcaccctaggcactgactacgtgcacaagtttgtgggcaaagagccaagtggcctgcgctacaacaagctctccctcaatgaggaaggaatcccccataaccccatggtcaatgctggtgccattgttgtcagctccctgatcaagatggactgtaacaaagcagagaagtttgattttgtgttgcagtatctcaacaaaatggctgggaatgaatacatgggtttcagcaatgccacattccagtcagagaaggaaacaggggatcggaattatgccatcggctattatctcaaggaaaagaagtgctttcctaagggggtggacatgatggctgcccttgatctctacttccagctgtgttctgtggaggtcacttgtgaatcaggcagtgtcatggcagccaccctcgccaacggtgggatctgccccatcacaggcgagagtgtgctgagtgctgaagcagtgcgcaacaccctcagcctcatgcattcctgcggcatgtatgacttctctggccagtttgccttccacgtgggcctgccagccaagtcagctgtatcaggagccatcctcctggtggtacccaatgtcatgggaatgatgtgcctgtcacccccattggacaagctggggaacagccatagggggaccagcttctgccagaagttggtgtctctcttcaatttccacaactatgacaacctgaggcactgtgctcggaagttagacccacggcgtgaaggggcagaaattcggaacaagactgtggtcaacctgttatttgctgcctatagtggcgatgtctcagctcttcgaaggtttgccttgtcagccatggatatggaacagaaagactatgactcgcgcacagctctgcatgttgctgcagctgaaggacacatcgaagttgttaaattcctgatcgaggcttgcaaagtgaatccttttgccaaggacaggtggggcaacattcccctggatgatgctgtgcagttcaaccatctggaggtggtcaaactgcttcaagattaccaggactcctacacactctctgaaactcaggctgaggcagcagctgaggccctgtccaaagagaacttagaaagcatggtatgagcacaggtcatggacagcccctgctcaagaaaaagcatgagctggccacacatgtaatccataaccaccaaaaatactatggagagctacactgcttcagtggggaccaagcagtcatttggtgacttaggctagtgctttctatgggagtcaaaataccccattccctcagcagacagagtacagagaagggcctcagaggacacctgcagtacagctatccagagagactgggcttcaaggtacagcctaatggcttgccccactcaaaaccatcccagctcttcacccaggtctcctcttcctctccctgaagaaaccatcatgagagagatactctggtggagggactctagctaccatgcacatgtacatatccacagaatatgggaagtgggaatggctatatacatggctttagtagtctggagaaatctactccccttggccaggacatgctgctgctactgctaacagccaattttatagacagagaaagtattttgtgttcaaataaactttaattaccaaatca

SEQ ID NO: 12393 - DNA, 623 bp, Homo sapiens
  source 1..623: mol_type = unassigned DNA
atgcgctccatgaaggctctgcagaaggccctgagccgggctggcagtcactgcgggcgaggaggctggggtcacccgagccggagccccctccttggcgggggcgtccggcaccacctcagtgaggccgcggcgcagggcagagagacgccacacagccaccagccgcagcaccaggatcatgattcatcagaaagtggcatgctgtcccgcctgggtgatttgctcttttacactattgctgaaggacaggaacgaatccctatccacaagttcaccactgcactaaaggccactggactgcagacatcagatcctcggctccgagactgcatgagcgagatgcaccgcgtggtccaagagtccagtagtggtggcctcttggaccgagatctcttccgaaagtggcagcctacatccctcagctggccaagtcaaacccagacctgtggggtgtctccctgtgcactgtggatggtcaacggcactctgtgggccacacaaagatccccttctgcctgcagtcctgtgtgaagcccctcacctatgccatctccataagcaccctaggcactgactacgtgcacaagtttgtgggcaaagagccaagtggcctgcgctac

SEQ ID NO: 12394 - DNA, 3093 bp, Homo sapiens
  source 1..3093: mol_type = unassigned DNA
cgccctctcggagggctccgggttataagggctggaggccgagcggacgggagctggagcccgcggagcccacggagcccacggagcccacggaggagcccacggaggagccccagcgtccgaacgggcagaccccctcgagccgcgaaggagcccgagaagcagccacgatgtgcggaatctttgcctacatgaactacagagtcccccggacgaggaaggagatcttcgaaaccctcatcaagggcctgcagcggctggagtacagaggctacgactcggcaggtgtggcgatcgatgggaataatcacgaagtcaaagaaagacacattcagctggtcaagaaaagggggaaagtcaaggctctcgatgaagaactttacaaacaagacagcatggacttaaaagtggagtttgagacacacttcggcattgcccacacgcgctgggccacccacggggtccccagtgctgtcaacagccaccctcagcgctcagacaaaggcaacgaatttgttgtcatccacaatgggatcatcacaaattacaaagatctgaggaaatttctggaaagcaaaggctacgagtttgagtcagaaacagatacagagaccatcgccaagctgattaaatatgtgttcgacaacagagaaactgaggacattacgttttcaacgttggtcgagagagtcattcagcagttggaaggtgcattcgcgctggttttcaagagtgtccactacccaggagaagccgttgccacacggagaggcagccccctgctcatcggagtccggagcaaatacaagctctccacagaacagatccctatcttatacaggacgtgcactctggagaatgtgaagaatatctgtaagacacggatgaagaggctggacagctccgcctgcctgcatgctgtgggcgacaaggccgtggaattcttctttgcttctgatgcaagcgctatcatagagcacaccaaccgggtcatcttcctggaggacgatgacatcgccgcagtggctgatgggaaactctccattcaccgggtcaagcgctcggccagtgatgacccatctcgagccatccagaccttgcagatggaactgcagcaaatcatgaaaggtaacttcagtgcgtttatgcagaaggagatcttcgaacagccagaatcagttttcaatactatgagaggtcgggtgaattttgaaaccaacacagtgctcctgggtggcttgaaggaccacttgaaggagattcgacgatgccgacggctcatcgtgattggctgtggaaccagctaccacgctgccgtggctacgcggcaagttttggaggaactgactgagcttcctgtgatggttgaacttgctagtgattttctggacaggaacacacctgtgttcagggatgacgtttgctttttcatcagccagtcaggcgagaccgcggacaccctcctggcgctgcgctactgtaaggaccgcggcgctctcaccgtgggcgtcaccaacaccgtgggcagctccatctctcgcgagaccgactgcggcgtccacatcaacgcagggccggagatcggcgtggccagcaccaaggcttataccagtcagttcatctctctggtgatgtttggtttgatgatgtctgaagaccgaatttcactacaaaacaggaggcaagagatcatccgtggcttgagatctttacctgagctgatcaaggaagtgctgtctctggaggagaagatccacgacttggccctggagctctacacgcagagatcgctgctggtgatggggcggggctacaactatgccacctgcctggaaggagccctgaaaattaaagagataacctacatgcactcagaaggcatcctggctggggagctgaagcacgggcccctggcactgattgacaagcagatgcccgtcatcatggtcattatgaaggatccttgcttcgccaaatgccagaacgccctgcagcaagtcacggcccgccagggtcgccccattatactgtgctccaaggacgatactgaaagttccaagtttgcgtataagacaattgagctgccccacactgtggactgcctccagggcatcctgagcgtgattccgctgcagctgctgtccttccacctggctgttctccgaggatatgacgttgacttccccagaaatctggccaagtctgtaactgtggaatgaggctgagaccgtgacaagaccatcaccacctttcatctgattccagacctgtcccaacagcagggatgctacatgggaagagaagtggacatcccacatgttctgcgtgctcctgtagagcttgacagcttccacgtgccttctacccaagtgcttttgcttacagcagatactgtttctctgtgtcctgaagtcgccagaggagaagggaatcattgtttacacatggggatcagagcagacttctccactactgtgcaatagagatacagctctcttcagagtaactgtgaaccttttataaccaacactagagttagttttaaaagacaagatatttataatgacgactgtatagcttttaagttatttttctagtatgtggctttctgtagccgtggtaacggccaaactgttcatcctagctacccatgctctgtgtccaggcttgctcctggcaggtggcattcatctcagatgtgagcacaaggcattggccctctggactcctttctccttttctttcctctctaggctgctcctgaatcctgttctctgacatccgtggagcccctcctgcatccacctatgcctcctataagtccagttgaaatctcagcctccttcaacattttcttctcgtgtgtggcccacatccctccacttctccaacttctgtttaatctgatcacggctctttttaagccctggcagcattttggtccctgctccttgcccatagtaaaacagcttgaaatatcccatgcaagagagtagtttcaagtgggcaactctgctctctatttaaaagcgtgcacaatcaaaagtactatgcaattttaggacaataaagaacatacagtttttttgtgtg

SEQ ID NO: 12395 - DNA, 1739 bp, Homo sapiens
  source 1..1739: mol_type = unassigned DNA
ctgcagcctgcgcgacgcggcgggaggctacccgggggcgatgggaaggcgggcgcagtcgacccaagggtggagaagagggaaggcgaaggacgcgcgttcccgggctcgtgaccgccagcggcccggggaacccgctcccagacagactcggagagatggcaggcggaagacaccggcgcgtcgtgggcaccctccacctgctgctgctggtggccgccctgccctgggcatccaggggggtcagtccgagtgcctcagcctggccagaggagaagaattaccaccagccagccattttgaattcatcggctcttcggcaaattgcagaaggcaccagtatctctgaaatgtggcaaaatgacttacagccattgctgatagagcgatacccgggatcccctggaagctatgctgctcgtcagcacatcatgcagcgaattcagaggcttcaggctgactgggtcttggaaatagacaccttcttgagtcagacaccctatgggtaccggtctttctcaaatatcatcagcaccctcaatcccactgctaaacgacatttggtcctcgcctgccactatgactccaagtatttttcccactggaacaacagagtgtttgtaggagccactgattcagccgtgccatgtgcaatgatgttggaacttgctcgtgccttagacaagaaactcctttccttaaagactgtttcagactccaagccagatttgtcactccagctgatcttctttgatggtgaagaggcttttcttcactggtctcctcaagattctctctatgggtctcgacacttagctgcaaagatggcatcgaccccgcacccacctggagcgagaggcaccagccaactgcatggcatggatttattggtcttattggatttgattggagctccaaacccaacgtttcccaatttttttccaaactcagccaggtggttcgaaagacttcaagcaattgaacatgaacttcatgaattgggtttgctcaaggatcactctttggaggggcggtatttccagaattacagttatggaggtgtgattcaggatgaccatattccatttttaagaagaggtgttccagttctgcatctgataccgtctcctttccctgaagtctggcacaccatggatgacaatgaagaaaatttggatgaatcaaccattgacaatctaaacaaaatcctacaagtctttgtgttggaatatcttcatttgtaatactctgatttagtttaggataattggttctagaattgaattcaaaagtcaaggcatcatttaaaataatctgatttcagacaaatgctgtgtggaaacatctatcctatagatcatcctattcttatgtgtctttggttatcagatcaattacagaataattgtgttgtgatattgtgtcctaaattgctcattaatttttatttacagattgaaaaagagggaccgtgtaaagaaaatggaaaataaatatctttcaaagactcttttagataaacacgatgaggcaaaatcaggttcattcattcaacgatagtttctcaacagtacttaaatagcggttggaaaacgtagccttcattttatgattttttcatatgtggaaatctattacatgtaatacaaaacaaacatgtagtttgaaggcggtcagatttctttgagaaatctttgtagagttaattttatggaaattaaaatcagaattaaatgcta

SEQ ID NO: 12396 - DNA, 1456 bp, Homo sapiens
  source 1..1456: mol_type = unassigned DNA
cgctcccagacagactcggagagatggcaggcggaagacaccggcgcgtcgtgggcaccctccacctgctgctgctggtggccgccctgccctgggcatccaggggggtcagtccgagtgcctcagcctggccagaggagaagcacatcatgcagcgaattcagaggcttcaggctgactgggtcttggaaatagacaccttcttgagtcagacaccctatgggtaccggtctttctcaaatatcatcagcaccctcaatcccactgctaaacgacatttggtcctcgcctgccactatgactccaagtatttttcccactggaacaacagagtgtttgtaggagccactgattcagccgtgccatgtgcaatgatgttggaacttgctcgtgccttagacaagaaactcctttccttaaagactgtttcagactccaagccagatttgtcactccagctgatcttctttgatggtgaagaggcttttcttcactggtctcctcaagattctctctatgggtctcgacacttagctgcaaagatggcatcgaccccgcacccacctggagcgagaggcaccagccaactgcatggcatggatttattggtcttattggatttgattggagctccaaacccaacgtttcccaatttttttccaaactcagccaggtggttcgaaagacttcaagcaattgaacatgaacttcatgaattgggtttgctcaaggatcactctttggaggggcggtatttccagaattacagttatggaggtgtgattcaggatgaccatattccatttttaagaagaggtgttccagttctgcatctgataccgtctcctttccctgaagtctggcacaccatggatgacaatgaagaaaatttggatgaatcaaccattgacaatctaaacaaaatcctacaagtctttgtgttggaatatcttcatttgtaatactctgatttagtttaggataattggttctagaattgaattcaaaagtcaaggcatcatttaaaataatctgatttcagacaaatgctgtgtggaaacatctatcctatagatcatcctattcttatgtgtctttggttatcagatcaattacagaataattgtgttgtgatattgtgtcctaaattgctcattaatttttatttacagattgaaaaagagggaccgtgtaaagaaaatggaaaataaatatctttcaaagactcttttagataaacacgatgaggcaaaatcaggttcattcattcaacgatagtttctcaacagtacttaaatagcggttggaaaacgtagccttcattttatgattttttcatatgtggaaatctattacatgtaatacaaaacaaacatgtagtttgaaggcggtcagatttctttgagaaatctttgtagagttaattttatggaaattaaaatcagaattaaatgct

SEQ ID NO: 12397 - DNA, 2763 bp, Homo sapiens
  source 1..2763: mol_type = unassigned DNA
agaaaagtcagagcaaaaccacgcctgtgtcttcctcctgcctcagggacgaacaccttccttccaggtccgtggcaaatatctccaaaagccctgccgcctgccaacaccccttcaagttcccagttccacggaggcggaagcaaagcccccggaaaggccggtttgtccgccctgtgttgtttaaaggggatagacgaccttggagcgccccgccccctcccgccaaggaaggaccccattggctctccccggaggcttcactctcattggtcagcgagtgaatgccgacctgcagactggggcctaagtttcttttagtttccggtgtctctgcaatggcggctctagactccctgtcgctcttcactagcctcggcctgagcgagcagaaggcccgcgagacgctcaagaactcggctctgagcgcgcagctgcgcgaggccgctactcaggctcagcagaccctgggttccaccattgacaaagctaccgggatcctgttatatggcttggcctcccgactcagggatacccggcgtctctccttccttgtaagctacatagccagtaagaagatccacactgagccccagctaagcgctgcccttgagtatgtgcggagtcaccccttggaccccatcgacactgtggacttcgagcgggaatgtggcgtgggtgtcattgtgaccccagagcagattgaggaggctgtggaggctgctattaacaggcaccggccccagctcctggtggaacgttaccatttcaacatggggctgctgatgggagaggctcgggctgtgctgaagtgggcagatggcaaaatgatcaagaatgaagtggacatgcaggtcctccaccttctgggccccaagttggaggctgatctggagaagaagttcaaggtggcaaaagctcggctagaagaaacagaccggaggacggcaaaggatgtggtggagaatggcgagactgctgaccagaccctgtctctgatggagcagctccggggggaggcccttaagttccacaagcctggtgagaactacaagaccccaggctatgtggtcactccacacaccatgaatctactaaagcagcacctggagattactggtgggcaggtacgtacccggttcccgccagaacccaatggaatcctgcatattggacatgccaaagccatcaatttcaactttggctatgccaaggccaacaatggcatctgttttctgcgttttgatgacaccaaccctgagaaggaggaagcaaagttcttcacggccatctgtgacatggtagcctggctaggctacacaccttacaaagtcacatatgcgtctgactattttgaccagctatatgcgtgggctgtggagctcatccgcaggggtctggcttatgtgtgccaccagcgaggagaggagctcaaaggccataatactctgccttcaccctggagagaccgtcccatggaggagtcactgctgctctttgaggcaatgcgcaagggcaagttttcagagggcgaggccacactacggatgaagctggtgatggaggatggcaagatggaccctgtagcctatcgagtcaagtatacaccacaccaccgcacaggggacaaatggtgcatctatcccacctacgactacacacactgcctctgtgactccatcgagcacatcactcactcactctgcaccaaggaattccaggcccgacgctcttcctacttctggctttgcaatgcactggacgtctattgccctgtgcagtgggagtatggccgcctcaacctgcactatgctgttgtctctaagaggaagatcctccagcttgtagcaactggtgctgtgcgggactgggatgacccacggctctttacactcacggccctgcgacggcggggcttcccacctgaggccatcaacaacttctgtgcccgggtgggagtgactgtggcacaaaccacaatggagccacatcttctagaagcctgtgtgcgtgatgtgctgaatgacacagccccacgagccatggctgtgctggagtcactacgggtcatcatcaccaactttcctgctgccaagtccttggacatccaggtgcccaacttcccagctgatgagaccaaaggcttccatcaggttccctttgcacccattgtcttcattgagaggactgacttcaaggaggagccagagccaggatttaagcgcctggcttggggccagcctgtgggcctgaggcatacaggctacgtcattgagctgcagcatgttgtcaagggccccagtggttgtgtagagagtctggaggtgacctgcagacgggcagatgctggagagaagccaaaggcctttattcactgggtgtcacagcctttgatgtgtgaggttcgcctctatgagcgactattccagcacaagaaccctgaagatcctactgaggtgcctggtggatttttaagtgacctgaacctggcatcactacacgtggtggatgcagcattagtggactgctctgtggccctggcaaaacccttcgacaagttccagtttgagcgtcttggatatttctccgtggatccagacagccatcagggaaagcttgtctttaaccgaactgtcacactgaaggaagacccaggaaaggtgtgagctggaagcactgaacctacctcatcctcctggagggtgtggctaccctcgccaccccaaattccatgtcaataaagaacagctaaattctcctaga

SEQ ID NO: 12398 - DNA, 2412 bp, Homo sapiens
  source 1..2412: mol_type = unassigned DNA
tcttttagtttccggtgtctctgcaatggcggctctagactccctgtcgctcttcactagcctcggcctgagcgagcagaaggcccgcgagacgctcaagaactcggctctgagcgcgcagctgcgcgaggccgctactcaggctcagcagaccctgggttccaccattgacaaagctaccgggatcctgttatatggcttggcctcccgactcagggatacccggcgtctctccttccttgtaagctacatagccactgcccttgagtatgtgcggagtcaccccttggaccccatcgacactgtggacttcgagcgggaatgtggcgtgggtgtcattgtgaccccagagcagattgaggaggctgtggaggctgctattaacaggcaccggccccagctcctggtggaacgttaccatttcaacatggggctgctgatgggagaggctcgggctgtgctgaagtgggcagatggcaaaatgatcaagaatgaagtggacatgcaggtcctccaccttctgggccccaagttggaggctgatctggagaagaagttcaaggtggcaaaagctcggctagaagaaacagaccggaggacggcaaaggatgtggtggagaatggcgagactgctgaccagaccctgtctctgatggagcagctccggggggaggcccttaagttccacaagcctggtgagaactacaagaccccaggctatgtggtcactccacacaccatgaatctactaaagcagcacctggagattactggtgggcaggtacgtacccggttcccgccagaacccaatggaatcctgcatattggacatgccaaagccatcaatttcaactttggctatgccaaggccaacaatggcatctgttttctgcgttttgatgacaccaaccctgagaaggaggaagcaaagttcttcacggccatctgtgacatggtagcctggctaggctacacaccttacaaagtcacatatgcgtctgactattttgaccagctatatgcgtgggctgtggagctcatccgcaggggtctggcttatgtgtgccaccagcgaggagaggagctcaaaggccataatactctgccttcaccctggagagaccgtcccatggaggagtcactgctgctctttgaggcaatgcgcaagggcaagttttcagagggcgaggccacactacggatgaagctggtgatggaggatggcaagatggaccctgtagcctatcgagtcaagtatacaccacaccaccgcacaggggacaaatggtgcatctatcccacctacgactacacacactgcctctgtgactccatcgagcacatcactcactcactctgcaccaaggaattccaggcccgacgctcttcctacttctggctttgcaatgcactggacgtctattgccctgtgcagtgggagtatggccgcctcaacctgcactatgctgttgtctctaagaggaagatcctccagcttgtagcaactggtgctgtgcgggactgggatgacccacggctctttacactcacggccctgcgacggcggggcttcccacctgaggccatcaacaacttctgtgcccgggtgggagtgactgtggcacaaaccacaatggagccacatcttctagaagcctgtgtgcgtgatgtgctgaatgacacagccccacgagccatggctgtgctggagtcactacgggtcatcatcaccaactttcctgctgccaagtccttggacatccaggtgcccaacttcccagctgatgagaccaaaggcttccatcaggttccctttgcacccattgtcttcattgagaggactgacttcaaggaggagccagagccaggatttaagcgcctggcttggggccagcctgtgggcctgaggcatacaggctacgtcattgagctgcagcatgttgtcaagggccccagtggttgtgtagagagtctggaggtgacctgcagacgggcagatgctggagagaagccaaaggcctttattcactgggtgtcacagcctttgatgtgtgaggttcgcctctatgagcgactattccagcacaagaaccctgaagatcctactgaggtgcctggtggatttttaagtgacctgaacctggcatcactacacgtggtggatgcagcattagtggactgctctgtggccctggcaaaacccttcgacaagttccagtttgagcgtcttggatatttctccgtggatccagacagccatcagggaaagcttgtctttaaccgaactgtcacactgaaggaagacccaggaaaggtgtgagctggaagcactgaacctacctcatcctcctggagggtgtggctaccctcgccaccccaaattccatgtcaataaagaacagctaaattctc

SEQ ID NO: 12399 - DNA, 1287 bp, Homo sapiens
  source 1..1287: mol_type = unassigned DNA
gcccccgaggacaattactatattgagatggagttaccagggctgaagtagaaaagtcagagcaaaaccacgcctgtgtcttcctcctgcctcagggacgaacaccttccttccaggtccgtggcaaatatctccaaaagccctgccgcctgccaacaccccttcaagttcccagttccacggaggcggaagcaaagcccccggaaaggccggtttgtccgccctgtgttgtttaaaggggatagacgaccttggagcgccccgccccctcccgccaaggaaggaccccattggctctccccggaggcttcactctcattggtcagcgagtgaatgccgacctgcagactggggcctaagtttcttttagtttccggtgtctctgcaatggcggctctagactccctgtcgctcttcactagcctcggcctgagcgagcagaaggcccgcgagacgctcaagaactcggctctgagcgcgcagctgcgcgaggccgctactcaggctcagcagaccctgggttccaccattgacaaagctaccgggatcctgttatatggcttggcctcccgactcagggatacccggcgtctctccttccttgtaagctacatagccagtaagaagatccacactgagccccagctaagcgctgcccttgagtatgtgcggagtcaccccttggaccccatcgacactgtggacttcgagcgggaatgtggcgtgggtgtcattgtgaccccagagcagattgaggaggctgtggaggctgctattaacaggcaccggccccagctcctggtggaacgttaccatttcaacatggggctgctgatgggagaggctcgggctgtgctgaagtgggcagatggcaaaatgatcaagaatgaagtggacatgcaggtcctccaccttctgggccccaagttggaggctgatctggagaagaagttcaaggtggcaaaagctcggctagaagaaacagaccggaggacggcaaaggatgtggtggagaatggcgagactgctgaccagaccctgtctctgatggagcagctccggggggaggcccttaagttccacaagcctggtacgtacccggttcccgccagaacccaatggaatcctgcatattggacatgccaaagccatcaatttcaactttggctatgccaagtttgataaacaggattgtggggctgatggatgatgtgggagttcacagatggtgcaactttcctaggccaacaatggcatctgttttctgcgttttgatgacaccaaccc

SEQ ID NO: 12400 - DNA, 6943 bp, Homo sapiens
  source 1..6943: mol_type = unassigned DNA
gttttatatttaactcgctgcagtgcaggaggggtaggggtggagatgcgtcgtttataaggggagctgtgacaatcttcttgccagccctcttcctcccactcggctcctcttacggagtcctcattccaccccccttgtttccgcattcatcctgagtggctggtgggaacgtgaaaagggagaggaaaaggcgcaagaagccagagagaggggtgtgggaaaagcgaaaacaggctgccaaatcaggggattccttccaatttaaaaaggaagtctgctgacgttagttagttaaatttaacatctttttatgtgtaacacttgactttggaagcaaaaatgaactttgcggagagagagggctctaagagatactgcattcaaacgaaacatgtggccattctctgtgcggtggtggtgggtgtaggattaatagtgggacttgccgtgggcttgaccagatcgtgtgactccagcggggacggcgggccgggcactgcgccagctccttcccacctgccttcttccacggccagcccctcaggtcctcctgcccaggaccaggacatctgcccggccagtgaggatgagagcggacagtggaaaaactttcgactgccggacttcgtcaacccagtccactacgacctgcacgtgaagcccctgttggaggaggacacctacacgggcaccgtgagcatctccatcaacctgagcgctcccacccggtacctgtggctgcacctccgggagaccaggatcacccggctcccggagctgaagaggccctctggggaccaggtgcaagtccggaggtgtttcgagtacaaaaagcaggagtacgtggtggtcgaggcggaggaagagcttacccccagcagtggagatggcctgtatctcctgaccatggagttcgccggctggctgaacggctccctcgtgggattttatagaaccacctacacggagaacggacaagtcaagagcatagtggccaccgatcatgaaccaacagatgccaggaaatcttttccttgttttgatgagcccaacaaaaaggcaacttatacaatatctatcacccatcccaaagaatacggagcactttcaaatatgccagtggcgaaagaagagtcagtggatgataaatggactcgaacaacttttgagaagtctgtccccatgagcacgtacctggtgtgctttgctgtacatcaatttgactctgtaaagagaatatcaaatagtggaaaacctcttacaatttatgtccagccagagcaaaagcacacagccgaatatgctgcaaacataactaaaagtgtgtttgattattttgaagaatactttgctatgaattattctcttcctaaattagataaaatcgctattccagattttggcactggtgccatggagaactggggactcatcacgtacagagaaacgaacctgctttatgaccctaaggaatcagcctcatcaaaccaacagagggtggccactgtggttgcccatgaacttgtgcatcagtggtttggaaatattgtgaccatggactggtgggaagacttgtggctaaatgaaggatttgcttctttctttgagtttctgggagtaaaccatgcagaaacagactggcaaatgcgtgaccaaatgttacttgaagatgtattacctgttcaagaggatgattctttgatgtcttcgcatccaattattgtgactgtgacaacccctgatgaaataacatctgtttttgatggaatatcctatagcaagggatcttctattttgagaatgcttgaagactggataaaaccagagaattttcaaaaaggatgtcagatgtacttggaaaaataccaattcaagaatgcaaaaacttctgatttttgggcagcactggaagaggcaagtaggctaccagtgaaagaagtaatggacacctggaccagacagatgggttatcctgtgcttaacgtgaacggtgtcaagaacatcacacagaaacgctttttgttggacccaagagctaacccttctcagcccccttcagatcttggttatacatggaatatcccagttaaatggactgaagataatataacaagcagtgtgttatttaataggtcagaaaaagaaggaatcactttgaactcctctaatcctagtggaaatgcttttctcaaaataaacccagatcatattgggttttatcgtgtaaattatgaagtagcaacttgggactcgatagctacagcgctctccttgaaccacaagacattttcttcagcagatcgtgcaagtcttattgatgatgcttttgccttggcaagagctcaacttctagattataaggtggctttgaacttgaccaagtatctcaaaagggaagagaattttttaccatggcagagagtaatttcagctgtaacctacatcattagcatgtttgaagatgataaagagctatatcctatgattgaggaatacttccaaggtcaagtgaagcctattgcagattctctgggatggaatgatgctggagaccatgtcacaaagttactccgttcctccgtgttagggtttgcgtgcaagatgggagacagagaagccttgaacaatgcttcctcgttatttgagcagtggctaaatgggactgtaagccttcccgtaaatctcaggcttctggtgtatcggtatgggatgcagaactctggcaatgagatttcatggaactacactcttgagcaataccagaaaacttcattagctcaagaaaaagaaaaactgctgtatggattagcatcagtgaagaacgttactcttttgtcaaggtatttggatttgctcaaggacacgaaccttattaaaactcaggatgtgtttacagtcattcgatatatctcatataacagctatgggaagaacatggcctggaattggatacaactcaactgggactatctagtcaacagatatacactcaataacagaaaccttggccgaattgtcacaatagcagagccattcaacactgaactgcaactgtggcagatggagagcttttttgcaaaatatccacaagctggagcaggagaaaaacctagggaacaagtgctggaaacagtgaaaaacaatatagagtggctaaaacaacatagaaacaccatcagagaatggttttttaatttacttgagagtggttaatgtattcaaatgttagagtttaattttgtgaatctattgtttctcctctgaagcatttggtggcctaatttacaagcacgatggagagagccttataaacagataatgcttttactaagcactgtgtttatatgtcttgcaaagcctttaaattgttcctctttgtttatgaagaaagatactaatagagtacttaatatactcagggattccttctaagtgtacttcataagatattctttacaaactgaagataatgaaatagttattttaatacctttaaatatcattctttgtatcttaaatctgtgaagtagaacaatttggtcttagctttacattttcagtaccaaagaaacaccacttaatcttctctcttgattgatttttaaagtttaaataccagtacttgagggaccaatattaccatcttaatctttattttattattcagaattatacagacctaatatcattttattcacatatgtcttactactttaaatcctaccaaagtaacctgggcttaagttttacttgaggatcatatgaattagccaaaagaatggctgactgttgcctttgctcttataaaatcaataagagaactctcctctttttttaaaaataaatctaaatgattatcttgaaaaagtattgttttccagtgtcacttgactcttgaataaaaataactgcagtgttccccaaataatttaacacattgcaaatatgattcaagaatctggcctttttcatgcttggtactctcttctcttgctccattccttacaaagctccttcaaatatgctatgaaattagagggaacatagtgcttaactctgctccatggattttagaggaaaaaagctaaataattggaaactgttcaggaaagagagaaggcagattatttcttaaaactaaatggaattagaatttagctttgacctcacctagcaatctaagtgtgaaaatggggagacctgtgggcatccccagcatgactctgcatatctgagcatatatctccttatagatcaattttatgtataaacccttagatcctaatccatacagaatagcactgatcaaatttaaatgcatgacttgattaaagacatcaatttcatagaagctggtggcaagaatatgtttaatatggcacttgatacctcctagatccataatgtaagtccaataggcagaaaagatggtaagttactatgtttcaatctgctatatctagaaaatctaaatttatttggaactttcaaaaatgtaaggtaatttagaatcggcttgatgagaattgaagcatatggaaacaaaaccttagctttaactttatttatacaataatgtgccctaatcatgtactctgaaactttataaactttcctgttgctgtttcttaattatcacttctcaatccgtacagccaaactagtaaattcaaatgtagactgggttgtgggtggcagatatagaagaagaaatttccagaccaaaaaatattaaatattattttaaattatttcagaagcaaaaacatattaacatcataacttaccagaaaaaccccactatcctcataagattaacttaaaattctgaccacaatcagaaccagcacttgaagtctatgtattgtttcaagtaggacatattatgaggtgagatggtttatccttctgttttatgaaattaatacattttaaaagaaaaatgttagtttaagggggtggtaaataaaacagatttcaacttgcctacaagacattctatttcatgccttttccttttgttgttctatttcattctattttaagcattaaaactgagaacaaattgtttacttcttttcactccacacgcgaaagagttgtatgtactttgtcagaataagtcttctagaccatcaggtccttctcaaacaacacctgttttttaaaaggctgatgcctaatagatagatctatgccaagcacagtttattactttgcttgcttggttttgcacagtattcacaggggacaaaaaatttaatatgatgtttccaaaattaagccacagtaaatttaaataattaattttaattgaaaaaaagtaaccatttaatttcaagaattaactggaaaatatgggaagcaaggtcatgtagcaaaaagcaaggccagtattactgcctcccctctaggcagcccactcctgtattccagatcattgctatgtacccacataattataaattaggagtttaaataataaaacatagacgtaaaactgacaggcaagggaggtttgggaaacaggggtgagatgtatacctgggttgaaggtaatgatactcctacagcttaccctccaagttggtgaagtgttagtccaaaagtagaaacaacagagtaggggcaaaaatctagaacaataattctcaaagggaattgggggatgagaaggaagtagaaaagaggggattcaaattaccagtggtgctttctaaaacacggttaggtaatcatcatcatcagactttcctttttttttcaagcatttttataaacactagcactccacataacattaatttttacaaaacccccttaaagtagatactgttattgttcttattttagagtggataaattgagatggagaagttatagaacttgcacaaggctacaaaagttgtatttggcaccagccagtatttgaacccaggcagtttatcactctaatctacattttaatctgtattagagtaaaaatatgcttttgaaatcagagtgacctgggttggaatatcaactacttggtagttgagtgcttttaacctctccattgttgtttcatctataaagtaaggatcaaaatagtagctacctcaatggtagttgtgaggattaaatacaaaaatgcatgtaaaggacatacgtataggaaataacaatcactcaataagtgttagctcttattattgttactattatatctccccatccctacttaagacactagtttgaagaataaaataaactttggttcaggaataaccaaacctaagcaactgaaggcactaagggtaggctatgtgttagcctgtgttattgttcataaatagtaattgccctggtctggaagaggattctatatcctaccccattgtagtctagcatggtatgtgacttgctttggccagtgaaacagagtgaaaatgatgtatgtcaattttaggcagaaacgtccagagccagcacttggtttgccatgttctccgtgtttcttctgctcctagatgcagcagtattccagatagaggccgcactatgagcctgaattccaggataaaaacaacatggaatagaacttagccagcacagagtacacatgtgctgtaaatgagaaatacccctttgttattgtaaatcactgagattttgaggttgtctgttactgcagcataatctagcctaatataaacaccaaactaatatactcctctaccatagtaatttatttcttgttctttctcctcctccttcctctacttcagggtttagcgaccttttgcctgcctgtttttgtaaggcctgaaagctaaacatagttttacatttttagatggttgaaaaaatcaaaaggagaataatagttcatgatgtaaaaattatataaaatttaaataaatgtcggcatccttaaataaagttttattggaacaca

SEQ ID NO: 12401 - DNA, 5014 bp, Homo sapiens
  source 1..5014: mol_type = unassigned DNA
agcacgaaaggccacgcaggccgttctaaccctggcggccaagaggaggggtagcaggctctggaacctgcgggcggggacgaagacggcgcgcgacgatgtcgcaccgcggcgtgcgcggtgtcggcagtagctgcggcgcaggggcggagcgaaggctgcggcggcgtcgggtacgcgcacacgttgcatcttcttcctttcgcggggtcctccgtagttctggcacgagccaggcgtactgacaggtggaccagcggactggtggagatggcgacgctctctctgaccgtgaattcaggagaccctccgctaggagctttgctggcagtagaacacgtgaaagacgatgtcagcatttccgttgaagaagggaaagagaatattcttcatgtttctgaaaatgtgatattcacagatgtgaattctatacttcgctacttggctagagttgcaactacagctgggttatatggctctaatctgatggaacatactgagattgatcactggttggagttcagtgctacaaaattatcttcatgtgattcctttacttctacaattaatgaactcaatcattgcctgtctctgagaacatacttagttggaaactccttgagtttagcagatttatgtgtttgggccaccctaaaaggaaatgctgcctggcaagaacagttgaaacagaagaaagctccagttcatgtaaaacgttggtttggctttcttgaagcccagcaggccttccagtcagtaggtaccaagtgggatgtttcaacaaccaaagctcgagtggcacctgagaaaaagcaagatgttgggaaatttgttgagcttccaggtgcggagatgggaaaggttaccgtcagatttcctccagaggccagtggttacttacacattgggcatgcaaaagctgctcttctgaaccagcactaccaggttaactttaaagggaaactgatcatgagatttgatgacacaaatcctgaaaaagaaaaggaagattttgagaaggttatcttggaagatgttgcaatgttgcatatcaaaccagatcaatttacttatacttcggatcattttgaaactataatgaagtatgcagagaagctaattcaagaagggaaggcttatgtggatgatactcctgctgaacagatgaaagcagaacgtgagcagaggatagactctaaacatagaaaaaaccctattgagaagaatctacaaatgtgggaagaaatgaaaaaagggagccagtttggtcagtcctgttgtttgcgagcaaaaattgacatgagtagtaacaatggatgcatgagagatccaaccctttatcgctgcaaaattcaaccacatccaagaactggaaataaatacaatgtttatccaacatatgattttgcctgccccatagttgacagcatcgaaggtgttacacatgccctgagaacaacagaataccatgacagagatgagcagttttactggattattgaagctttaggcataagaaaaccatatatttgggaatatagtcggctaaatctcaacaacacagtgctatccaaaagaaaactcacatggtttgtcaatgaaggactagtagatggatgggatgacccaagatttcctacggttcgtggtgtactgagaagagggatgacagttgaaggactgaaacagtttattgctgctcagggctcctcacgttcagtcgtgaacatggagtgggacaaaatctgggcgtttaacaaaaaggttattgacccagtggctccacgatatgttgcattactgaagaaagaagtgatcccagtgaatgtacctgaagctcaggaggagatgaaagaagtagccaaacacccaaagaatcctgaggttggcttgaagcctgtgtggtatagtcccaaagttttcattgaaggtgctgatgcagagactttttcggagggtgagatggttacatttataaattggggcaacctcaacattacaaaaatacacaaaaatgcagatggaaaaatcatatctcttgatgcaaagttgaatttggaaaacaaagactacaagaaaaccactaaggtcacttggcttgcagagactacacatgctcttcctattccagtaatctgtgtcacttatgagcacttgatcacaaagccagtgctaggaaaagacgaggactttaagcagtatgtcaacaagaacagtaagcatgaagagctaatgctaggggatccctgccttaaggatttgaaaaaaggagatattatacaactccagagaagaggattcttcatatgtgatcaaccttatgaacctgttagcccatatagttgcaaggaagccccgtgtgttttgatatacattcctgatgggcacacaaaggaaatgccaacatcagggtcaaaggaaaagaccaaagtagaagccacaaaaaatgagacctctgctccttttaaggaaagaccaacaccttctctgaataataattgtactacatctgaggattccttggtcctttacaatagagtggctgttcaaggagatgtggttcgtgaattaaaagccaagaaagcaccaaaggaagatgtagatgcagctgtaaaacagcttttgtctttgaaagctgaatataaggagaaaactggccaggaatataaacctggaaaccctcctgctgaaataggacagaatatttcttctaattcctcagcaagtattctggaaagtaaatctctgtatgatgaagttgctgcacaaggggaggtggttcgtaagctaaaagctgaaaaatcccctaaggctaaaataaatgaagctgtagaatgcttactgtccctgaaggctcagtataaagaaaaaactgggaaggagtacatacctggtcagcccccattatctcaaagttcggattcaagcccaaccagaaattctgaacctgctggtttagaaacaccagaagcgaaagtactttttgacaaagtagcttctcaaggggaagtagttcggaaacttaaaactgaaaaagcccctaaggatcaagtagatatagctgttcaagaactccttcagctaaaggcacagtacaagtctttgataggagtagagtataagcctgtgtcggccactggagctgaggacaaagataagaagaagaaagaaaaagaaaataaatctgaaaagcagaataagcctcagaaacaaaatgatggccaaaggaaagacccttctaaaaaccaaggaggtgggctctcatcaagtggagcaggagaagggcaggggcctaagaaacagaccaggttgggtcttgaggcaaaaaaagaagaaaatcttgctgattggtattctcaggtcatcacaaagtcagaaatgattgaataccatgacataagtggctgttatattcttcgtccctgggcctatgccatttgggaagccatcaaggacttttttgatgctgagatcaagaaacttggtgttgaaaactgctacttccccatgtttgtgtctcaaagtgcattagagaaagagaagactcatgttgctgactttgccccagaggttgcttgggttacaagatctggcaaaaccgagctggcagaaccaattgccattcgtcctactagtgaaacagtaatgtatcctgcatatgcaaaatgggtacagtcacacagagacctgcccatcaagctcaatcagtggtgcaatgtggtgcgttgggaattcaagcatcctcagcctttcctacgtactcgtgaatttctttggcaggaagggcacagtgcttttgctaccatggaagaggcagcggaagaggtcttgcagatacttgacttatatgctcaggtatatgaagaactcctggcaattcctgttgttaaaggaagaaagacggaaaaggaaaaatttgcaggaggagactatacaactacaatagaagcatttatatctgctagtggaagagctatccagggaggaacatcacatcatttagggcagaatttttccaaaatgtttgaaatcgtttttgaagatccaaagataccaggagagaagcaatttgcctatcaaaactcctggggcctgacaactcgaactattggtgttatgaccatggttcatggggacaacatgggtttagtattaccaccccgtgtagcatgtgttcaggtggtgattattccttgtggcattaccaatgcactttctgaagaagacaaagaagcgctgattgcaaaatgcaatgattatcgaaggcgattactcagtgttaacatccgcgttagagctgatttacgagataattattctccaggttggaaattcaatcactgggagctcaagggagttcccattagacttgaagttgggccacgtgatatgaagagctgtcagtttgtagccgtcagacgagatactggagaaaagctgacagttgctgaaaatgaggcagagactaaacttcaagctattttggaagacatccaggtcacccttttcacaagggcttctgaagaccttaagactcatatggttgtggctaatacaatggaagactttcagaagatactagattctggaaagattgttcagattccattctgtggggaaattgactgtgaggactggatcaaaaagaccactgccagggatcaagatcttgaacctggtgctccatccatgggagctaaaagcctttgcatccccttcaaaccactctgtgaactgcagcctggagccaaatgtgtctgtggcaagaaccctgccaagtactacaccttatttggtcgcagctactgagggatgaacgaaagccccctcttcaactcctctcactttttaaagcattgatattagtatcttctcagatacagaccgttttatgattttttaaaaagtaaaagttctaaaatgaagtcacacaggacaattattcttatgcctaagttaacagtggataaaagacttttctgtaaacaactccagtaataaatatcatgaacta

SEQ ID NO: 12402 - DNA, 5085 bp, Homo sapiens
  source 1..5085: mol_type = unassigned DNA
agcacgaaaggccacgcaggccgttctaaccctggcggccaagaggaggggtagcaggctctggaacctgcgggcggggacgaagacggcgcgcgacgatgtcgcaccgcggcgtgcgcggtgtcggcagtagctgcggcgcaggggcggagcgaaggctgcggcggcgtcgggtacgcgcacacgttgcatcttcttcctttcgcggggtcctccgtagttctggcacgagccaggcgtactgacaggtggaccagcggactggtggagatggcgacgctctctctgaccgtgaattcaggagaccctccgctaggagctttgctggcagtagaacacgtgaaagacgatgtcagcatttccgttgaagaagggaaagagaatattcttcatgtttctgaaaatgtgatattcacagatgtgaattctatacttcgctacttggctagagttgcaactacagctgggttatatggctctaatctgatggaacatactgagattgatcactggttggagttcagtgctacaaaattatcttcatgtgattcctttacttctacaattaatgaactcaatcattgcctgtctctgagaacatacttagttggaaactccttgagtttagcagatttatgtgtttgggccaccctaaaaggaaatgctgcctggcaagaacagttgaaacagaagaaagctccagttcatgtaaaacgttggtttggctttcttgaagcccagcaggccttccagtcagtaggtaccaagtgggatgtttcaacaaccaaagctcgagtggcacctgagaaaaagcaagatgttgggaaatttgttgagcttccaggtgcggagatgggaaaggttaccgtcagatttcctccagaggccagtggttacttacacattgggcatgcaaaagctgctcttctgaaccagcactaccaggttaactttaaagggaaactgatcatgagatttgatgacacaaatcctgaaaaagaaaaggaagattttgagaaggtaattaaaagtgtagtgatgaccctttgccagaaaagtattaaagttacaggattacctaataccttcatggttatcttggaagatgttgcaatgttgcatatcaaaccagatcaatttacttatacttcggatcattttgaaactataatgaagtatgcagagaagctaattcaagaagggaaggcttatgtggatgatactcctgctgaacagatgaaagcagaacgtgagcagaggatagactctaaacatagaaaaaaccctattgagaagaatctacaaatgtgggaagaaatgaaaaaagggagccagtttggtcagtcctgttgtttgcgagcaaaaattgacatgagtagtaacaatggatgcatgagagatccaaccctttatcgctgcaaaattcaaccacatccaagaactggaaataaatacaatgtttatccaacatatgattttgcctgccccatagttgacagcatcgaaggtgttacacatgccctgagaacaacagaataccatgacagagatgagcagttttactggattattgaagctttaggcataagaaaaccatatatttgggaatatagtcggctaaatctcaacaacacagtgctatccaaaagaaaactcacatggtttgtcaatgaaggactagtagatggatgggatgacccaagatttcctacggttcgtggtgtactgagaagagggatgacagttgaaggactgaaacagtttattgctgctcagggctcctcacgttcagtcgtgaacatggagtgggacaaaatctgggcgtttaacaaaaaggttattgacccagtggctccacgatatgttgcattactgaagaaagaagtgatcccagtgaatgtacctgaagctcaggaggagatgaaagaagtagccaaacacccaaagaatcctgaggttggcttgaagcctgtgtggtatagtcccaaagttttcattgaaggtgctgatgcagagactttttcggagggtgagatggttacatttataaattggggcaacctcaacattacaaaaatacacaaaaatgcagatggaaaaatcatatctcttgatgcaaagttgaatttggaaaacaaagactacaagaaaaccactaaggtcacttggcttgcagagactacacatgctcttcctattccagtaatctgtgtcacttatgagcacttgatcacaaagccagtgctaggaaaagacgaggactttaagcagtatgtcaacaagaacagtaagcatgaagagctaatgctaggggatccctgccttaaggatttgaaaaaaggagatattatacaactccagagaagaggattcttcatatgtgatcaaccttatgaacctgttagcccatatagttgcaaggaagccccgtgtgttttgatatacattcctgatgggcacacaaaggaaatgccaacatcagggtcaaaggaaaagaccaaagtagaagccacaaaaaatgagacctctgctccttttaaggaaagaccaacaccttctctgaataataattgtactacatctgaggattccttggtcctttacaatagagtggctgttcaaggagatgtggttcgtgaattaaaagccaagaaagcaccaaaggaagatgtagatgcagctgtaaaacagcttttgtctttgaaagctgaatataaggagaaaactggccaggaatataaacctggaaaccctcctgctgaaataggacagaatatttcttctaattcctcagcaagtattctggaaagtaaatctctgtatgatgaagttgctgcacaaggggaggtggttcgtaagctaaaagctgaaaaatcccctaaggctaaaataaatgaagctgtagaatgcttactgtccctgaaggctcagtataaagaaaaaactgggaaggagtacatacctggtcagcccccattatctcaaagttcggattcaagcccaaccagaaattctgaacctgctggtttagaaacaccagaagcgaaagtactttttgacaaagtagcttctcaaggggaagtagttcggaaacttaaaactgaaaaagcccctaaggatcaagtagatatagctgttcaagaactccttcagctaaaggcacagtacaagtctttgataggagtagagtataagcctgtgtcggccactggagctgaggacaaagataagaagaagaaagaaaaagaaaataaatctgaaaagcagaataagcctcagaaacaaaatgatggccaaaggaaagacccttctaaaaaccaaggaggtgggctctcatcaagtggagcaggagaagggcaggggcctaagaaacagaccaggttgggtcttgaggcaaaaaaagaagaaaatcttgctgattggtattctcaggtcatcacaaagtcagaaatgattgaataccatgacataagtggctgttatattcttcgtccctgggcctatgccatttgggaagccatcaaggacttttttgatgctgagatcaagaaacttggtgttgaaaactgctacttccccatgtttgtgtctcaaagtgcattagagaaagagaagactcatgttgctgactttgccccagaggttgcttgggttacaagatctggcaaaaccgagctggcagaaccaattgccattcgtcctactagtgaaacagtaatgtatcctgcatatgcaaaatgggtacagtcacacagagacctgcccatcaagctcaatcagtggtgcaatgtggtgcgttgggaattcaagcatcctcagcctttcctacgtactcgtgaatttctttggcaggaagggcacagtgcttttgctaccatggaagaggcagcggaagaggtcttgcagatacttgacttatatgctcaggtatatgaagaactcctggcaattcctgttgttaaaggaagaaagacggaaaaggaaaaatttgcaggaggagactatacaactacaatagaagcatttatatctgctagtggaagagctatccagggaggaacatcacatcatttagggcagaatttttccaaaatgtttgaaatcgtttttgaagatccaaagataccaggagagaagcaatttgcctatcaaaactcctggggcctgacaactcgaactattggtgttatgaccatggttcatggggacaacatgggtttagtattaccaccccgtgtagcatgtgttcaggtggtgattattccttgtggcattaccaatgcactttctgaagaagacaaagaagcgctgattgcaaaatgcaatgattatcgaaggcgattactcagtgttaacatccgcgttagagctgatttacgagataattattctccaggttggaaattcaatcactgggagctcaagggagttcccattagacttgaagttgggccacgtgatatgaagagctgtcagtttgtagccgtcagacgagatactggagaaaagctgacagttgctgaaaatgaggcagagactaaacttcaagctattttggaagacatccaggtcacccttttcacaagggcttctgaagaccttaagactcatatggttgtggctaatacaatggaagactttcagaagatactagattctggaaagattgttcagattccattctgtggggaaattgactgtgaggactggatcaaaaagaccactgccagggatcaagatcttgaacctggtgctccatccatgggagctaaaagcctttgcatccccttcaaaccactctgtgaactgcagcctggagccaaatgtgtctgtggcaagaaccctgccaagtactacaccttatttggtcgcagctactgagggatgaacgaaagccccctcttcaactcctctcactttttaaagcattgatattagtatcttctcagatacagaccgttttatgattttttaaaaagtaaaagttctaaaatgaagtcacacaggacaattattcttatgcctaagttaacagtggataaaagacttttctgtaaacaactccagtaataaatatcatgaact

SEQ ID NO: 12403 - DNA, 5034 bp, Homo sapiens
  source 1..5034: mol_type = unassigned DNA
agcacgaaaggccacgcaggccgttctaaccctggcggccaagaggaggggtagcaggctctggaacctgcgggcggggacgaagacggcgcgcgacgatgtcgcaccgcggcgtgcgcggtgtcggcagtagctgcggcgcaggggcggagcgaaggctgcggcggcgtcgggtacgcgcacacgttgcatcttcttcctttcgcggggtcctccgtagttctggcacgagccaggcgtactgacaggtggaccagcggactggtggagatggcgacgctctctctgaccgtgaattcaggagaccctccgctaggagctttgctggcagtagaacacgtgaaagacgatgtcagcatttccgttgaagaagggaaagagaatattcttcatgtttctgaaaatgtgatattcacagatgtgaattctatacttcgctacttggctagagttgcaactacagctgggttatatggctctaatctgatggaacatactgagattgatcactggttggagttcagtgctacaaaattatcttcatgtgattcctttacttctacaattaatgaactcaatcattgcctgtctctgagaacatacttagttggaaactccttgagtttagcagatttatgtgtttgggccaccctaaaaggaaatgctgcctggcaagaacagttgaaacagaagaaagctccagttcatgtaaaacgttggtttggctttcttgaagcccagcaggccttccagtcagtaggtaccaagtgggatgtttcaacaaccaaagctcgagtggcacctgagaaaaagcaagatgttgggaaatttgttgagcttccaggtgcggagatgggaaaggttaccgtcagatttcctccagaggccagtggttacttacacattgggcatgcaaaagctgctcttctgaaccagcactaccaggttaactttaaagggaaactgatcatgagatttgatgacacaaatcctgaaaaagaaaaggaagattttgagaaggttatcttggaagatgttgcaatgttgcatatcaaaccagatcaatttacttatacttcggatcattttgaaactataatgaagtatgcagagaagctaattcaagaagggaaggcttatgtggatgatactcctgctgaacagatgaaagcagaacgtgagcagaggatagactctaaacatagaaaaaaccctattgagaagaatctacaaatgtgggaagaaatgaaaaaagggagccagtttggtcagtcctgttgtttgcgagcaaaaattgacatgagtagtaacaatggatgcatgagagatccaaccctttatcgctgcaaaattcaaccacatccaagaactggaaataaatacaatgtttatccaacatatgattttgcctgccccatagttgacagcatcgaaggtgttacacatgccctgagaacaacagaataccatgacagagatgagcagttttactggattattgaagctttaggcataagaaaaccatatatttgggaatatagtcggctaaatctcaacaacacagtgctatccaaaagaaaactcacatggtttgtcaatgaaggactagtagatggatgggatgacccaagatttcctacggttcgtggtgtactgagaagagggatgacagttgaaggactgaaacagtttattgctgctcagggctcctcacgttcagtcgtgaacatggagtgggacaaaatctgggcgtttaacaaaaagctgcgagctctctgtaagaaggttattgacccagtggctccacgatatgttgcattactgaagaaagaagtgatcccagtgaatgtacctgaagctcaggaggagatgaaagaagtagccaaacacccaaagaatcctgaggttggcttgaagcctgtgtggtatagtcccaaagttttcattgaaggtgctgatgcagagactttttcggagggtgagatggttacatttataaattggggcaacctcaacattacaaaaatacacaaaaatgcagatggaaaaatcatatctcttgatgcaaagttgaatttggaaaacaaagactacaagaaaaccactaaggtcacttggcttgcagagactacacatgctcttcctattccagtaatctgtgtcacttatgagcacttgatcacaaagccagtgctaggaaaagacgaggactttaagcagtatgtcaacaagaacagtaagcatgaagagctaatgctaggggatccctgccttaaggatttgaaaaaaggagatattatacaactccagagaagaggattcttcatatgtgatcaaccttatgaacctgttagcccatatagttgcaaggaagccccgtgtgttttgatatacattcctgatgggcacacaaaggaaatgccaacatcagggtcaaaggaaaagaccaaagtagaagccacaaaaaatgagacctctgctccttttaaggaaagaccaacaccttctctgaataataattgtactacatctgaggattccttggtcctttacaatagagtggctgttcaaggagatgtggttcgtgaattaaaagccaagaaagcaccaaaggaagatgtagatgcagctgtaaaacagcttttgtctttgaaagctgaatataaggagaaaactggccaggaatataaacctggaaaccctcctgctgaaataggacagaatatttcttctaattcctcagcaagtattctggaaagtaaatctctgtatgatgaagttgctgcacaaggggaggtggttcgtaagctaaaagctgaaaaatcccctaaggctaaaataaatgaagctgtagaatgcttactgtccctgaaggctcagtataaagaaaaaactgggaaggagtacatacctggtcagcccccattatctcaaagttcggattcaagcccaaccagaaattctgaacctgctggtttagaaacaccagaagcgaaagtactttttgacaaagtagcttctcaaggggaagtagttcggaaacttaaaactgaaaaagcccctaaggatcaagtagatatagctgttcaagaactccttcagctaaaggcacagtacaagtctttgataggagtagagtataagcctgtgtcggccactggagctgaggacaaagataagaagaagaaagaaaaagaaaataaatctgaaaagcagaataagcctcagaaacaaaatgatggccaaaggaaagacccttctaaaaaccaaggaggtgggctctcatcaagtggagcaggagaagggcaggggcctaagaaacagaccaggttgggtcttgaggcaaaaaaagaagaaaatcttgctgattggtattctcaggtcatcacaaagtcagaaatgattgaataccatgacataagtggctgttatattcttcgtccctgggcctatgccatttgggaagccatcaaggacttttttgatgctgagatcaagaaacttggtgttgaaaactgctacttccccatgtttgtgtctcaaagtgcattagagaaagagaagactcatgttgctgactttgccccagaggttgcttgggttacaagatctggcaaaaccgagctggcagaaccaattgccattcgtcctactagtgaaacagtaatgtatcctgcatatgcaaaatgggtacagtcacacagagacctgcccatcaagctcaatcagtggtgcaatgtggtgcgttgggaattcaagcatcctcagcctttcctacgtactcgtgaatttctttggcaggaagggcacagtgcttttgctaccatggaagaggcagcggaagaggtcttgcagatacttgacttatatgctcaggtatatgaagaactcctggcaattcctgttgttaaaggaagaaagacggaaaaggaaaaatttgcaggaggagactatacaactacaatagaagcatttatatctgctagtggaagagctatccagggaggaacatcacatcatttagggcagaatttttccaaaatgtttgaaatcgtttttgaagatccaaagataccaggagagaagcaatttgcctatcaaaactcctggggcctgacaactcgaactattggtgttatgaccatggttcatggggacaacatgggtttagtattaccaccccgtgtagcatgtgttcaggtggtgattattccttgtggcattaccaatgcactttctgaagaagacaaagaagcgctgattgcaaaatgcaatgattatcgaaggcgattactcagtgttaacatccgcgttagagctgatttacgagataattattctccaggttggaaattcaatcactgggagctcaagggagttcccattagacttgaagttgggccacgtgatatgaagagctgtcagtttgtagccgtcagacgagatactggagaaaagctgacagttgctgaaaatgaggcagagactaaacttcaagctattttggaagacatccaggtcacccttttcacaagggcttctgaagaccttaagactcatatggttgtggctaatacaatggaagactttcagaagatactagattctggaaagattgttcagattccattctgtggggaaattgactgtgaggactggatcaaaaagaccactgccagggatcaagatcttgaacctggtgctccatccatgggagctaaaagcctttgcatccccttcaaaccactctgtgaactgcagcctggagccaaatgtgtctgtggcaagaaccctgccaagtactacaccttatttggtcgcagctactgagggatgaacgaaagccccctcttcaactcctctcactttttaaagcattgatattagtatcttctcagatacagaccgttttatgattttttaaaaagtaaaagttctaaaatgaagtcacacaggacaattattcttatgcctaagttaacagtggataaaagacttttctgtaaacaactccagtaataaatatcatgaact

SEQ ID NO: 12404 - DNA, 2769 bp, Homo sapiens
  source 1..2769: mol_type = unassigned DNA
acgtgtgctattccatcccacatggcggcgctcctgaggagactgctgcagcgcgagaggccttcggcggcctctggccgccccgtaggacggcgcgaggccaacctgggcactgatgccggggttgcggtgcgagtgcggttcgctcccagccccacaggcttcttgcacctgggtggcctccgcactgccttgtacaactacatctttgctaagaagtaccaggggagcttcatcctgaggctagaggacacagatcagactcgcgttgtgcctggggcagcggagaatattgaggacatgctggagtgggcaggcatcccgcctgatgagagcccccgccggggcggtcctgctgggccctaccagcaatctcagcggttggagctgtatgcccaggccacagaagcgctgctgaagaccggagctgcttacccctgtttctgctcaccccagcggctggagctcctgaagaaggaggccttgcggaaccaccagacgccccggtatgacaatcggtgcaggaacatgagccaggagcaggtggcccagaagctggccaaggaccccaagcctgcgatccgcttccgcctggagcaggtggtgccagccttccaggacctggtctatggctggaataggcatgaagtggccagcgtggagggagacccagtcatcatgaagagcgacggcttccccacataccacctggcctgcgtggtggacgaccaccacatgggcatcagccacgtgctgcgaggctctgagtggctcgtctccactgccaagcacctgctcctctaccaggccctgggctggcagccaccccacttcgcccacctgcccctgctcctcaacagggatggcagcaagctctccaagaggcaaggggacgttttcctggagcactttgctgctgatggcttcctgcccgattccttgttggacatcatcaccaactgtggctcaggttttgcagagaaccaaatgggcaggaccctgccggagctgatcacacagttcaacctgacacaggtcacctgtcactcagccctgctggacctggagaagctcccagaattcaacagactgcacctccagcggctggtgagcaatgagagccagaggcgccagctggtggggaagctgcaggtccttgtggaggaggcctttggttgccagctgcaaaacagggatgtcctcaacccagtctacgtggagaggatcctcctgctgagacagggtcacatttgccgcctgcaggacttggtgtccccagtatactcttacctgtggactcgccctgcagtaggtcgagcacagctggacgccatctcggagaaggtggatgtgattgccaagcgtgtgctggggcttctagaaagatctagtatgagcttaactcaggatatgctgaatggagaactgaagaagctatcagaaggtctggaaggcaccaagtacagtaatgtgatgaaactccttcggatggccctcagtggacagcagcaaggacctcctgtagctgagatgatgttggccttgggaccaaaggaagtacgggaacggatccagaaggtggtttccagctagggagaggatgtttcgggcagtggagatcgccctaagaacctgtgagcttagaaacagctttcagagaccagaaggaggcctggggcccgtcgggaagtttgctgaaggaactaagagtggaaacaatctctgactgcacacaagtgcatttgtgatccaccacaggcacgtttttgtcaattggctggggaagcccaacccatctaacctcctggactctggaaaggcattctccgggtctggtttctcacacattacacagcagaggtttggagttagttcacagaaaagttaacatcccggaacagtgcagaaggcttgggtttcagtttgctagggcccccataacaaaatgccacagaaccaggtggtttaaacaacagagatttattttctcacatttggaggctagaagttcaagatcaaggtgtcagcaggcctggtttttcctagaggcctcttttgttggcttgcagacagctgtcttctcactgtgtccttgtgcggtcttccctccatgcacacacatctctaagtttcattatgtgcccaacgttcctcttctaagaacaccagttggactggattttaactttaaccagcctcatttaagttaatcacctctttaaatgctcaatctccaagtgaaaggaggatggtggcagggtacatgaacccctaccaggcttctaggcttcccctgcatggcagccagcctctaagttggcccccaaccatccctgccttcttctattcacacccttgtgtggttccttcccacattgaataggcctgacttgtgtaaccactacactattgaagaaatgagagtttgacttctgagggtaagtcataaaatacatcgtggcttctgtcttgttttctttgatcgcttactttgggggaagccagcttccaggtcatgaaaatactcaagcagccttatggagtgctccacatgacaagggatcgaggcctcccaccaatagccatgggagtgtgcaatcttgaaagctggtccttcaattccagccaagcattcacatgaccgcaatcctagctgatctcgcttgtgacctctatgggagaccctaagccagaaccactcagagaagctgctccggaacgtcagacacacatgaactgtgagatagtaaacgtttattgtttaaagct

SEQ ID NO: 12405 - DNA, 3961 bp, Homo sapiens
  source 1..3961: mol_type = unassigned DNA
gggagaagcccacgtgtgctattccatcccacatggcggcgctcctgaggagactgctgcagcgcgagaggccttcggcggcctctggccgccccgtaggacggcgcgaggccaacctgggcactgatgccggggttgcggtgcgagtgcggttcgctcccagccccacaggcttcttgcacctgggtggcctccgcactgccttgtacaactacatctttgctaagaagtaccaggggagcttcatcctgaggctagaggacacagatcagactcgcgttgtgcctggggcagcggagaatattgaggacatgctggagtgggcaggcatcccgcctgatgagagcccccgccggggcggtcctgctgggccctaccagcaatctcagcggttggagctgtatgcccaggccacagaagcgctgctgaagaccggagctgcttacccctgtttctgctcaccccagcggctggagctcctgaagaaggaggccttgcggaaccaccagacgccccggtatgacaatcggtgcaggaacatgagccaggagcaggtggcccagaagctggccaaggaccccaagcctgcgatccgcttccgcctggagcaggtggtgccagccttccaggacctggtctatggctggaataggcatgaagtggccagcgtggagggagacccagtcatcatgaagagcgacggcttccccacataccacctggcctgcgtggtggacgaccaccacatgggcatcagccacgtgctgcgaggctctgagtggctcgtctccactgccaagcacctgctcctctaccaggccctgggctggcagccaccccacttcgcccacctgcccctgctcctcaacagggatggcagcaagctctccaagaggcaaggggacgttttcctggagcactttgctgctgatggcttcctgcccgattccttgttggacatcatcaccaactgtggctcaggttttgcagagaaccaaatgggcaggaccctgccggagctgatcacacagttcaacctgacacaggtcacctgtcactcagccctgctggacctggagaagctcccagaattcaacagactgcacctccagcggctggtgagcaatgagagccagaggcgccagctggtggggaagctgcaggtccttgtggaggaggcctttggttgccagctgcaaaacagggatgtcctcaacccagtctacgtggagaggatcctcctgctgagacagggtcacatttgccgcctgcaggacttggtgtccccagtatactcttacctgtggactcgccctgcagtaggtcgagcacagctggacgccatctcggagaaggtggatgtgattgccaagcgtgtgctggggcttctagaaagatctagtatgagcttaactcaggatatgctgaatggagaactgaagaagctatcagaaggtctggaaggcaccaagtacagtaatgtgatgaaactccttcggatggccctcagtggacagcagcaaggacctcctgtagctgagatgatgttggccttgggaccaaaggaagtacgggaacggatccagaaggtggtttccagctagggagaggatgtttcgggcagtggagatcgccctaagaacctgtgagcttagaaacagctttcagagaccagaaggaggcctggggcccgtcgggaagtttgctgaaggaactaagagtggaaacaatctctgactgcacacaagtgcatttgtgatccaccacaggcacgtttttgtcaattggctggggaagcccaacccatctaacctcctggactctggaaaggcattctccgggtctggtttctcacacattacacagcagaggtttggagttagttcacagaaaagttaacatcccggaacagtgcagaaggcttgggtttcagtttgctagggcccccataacaaaatgccacagaaccaggtggtttaaacaacagagatttattttctcacatttggaggctagaagttcaagatcaaggtgtcagcaggcctggtttttcctagaggcctcttttgttggcttgcagacagctgtcttctcactgtgtccttgtgcggtcttccctccatgcacacacatctctaagtttcattatgtgcccaacgttcctcttctaagaacaccagttggactggattttaactttaaccagcctcatttaagttaatcacctctttaaatgctcaatctccaagtacagtctcattctgaggttccaggggtttctcaacgtaagaatttagggggacagaattcagcccgtagcagctgggcagcaggactcatgggtcccagttctcaggccccaaggactcagagcagcaaaggatacgtgacacaagcagggctgaactggacaccagactttctttggggttgtaaaaggagaagtgtgactccactgccaagggtaagcactcttgtcttatgctaccctttattcttgaaccttggggcagcctgtgtctcccttccctaaacgtcatctgttccgtttttccagtcttccagacctggtccttggactggagaccttcacccttcctattttgtggctttctcttcaaatccacctcgtccttcctccatgacttataagtcatcatctctgctggtttctgaaatgagatatgcttcttggggtcttcagtgaagaggaatagcaagtgaaaggaggatggtggcagggtacatgaacccctaccaggcttctaggcttcccctgcatggcagccagcctctaagttggcccccaaccatccctgccttcttctattcacacccttgtgtggttccttcccacattgaataggcctgacttgtgtaaccactacactattgaagaaatgagagtttgacttctgagggtaagtcataaaatacatcgtggcttctgtcttgttttctttgatcgcttactttgggggaagccagcttccaggtcatgaaaatactcaagcagccttatggagtgctccacatgacaagggatcgaggcctcccaccaatagccatgggagtgtgcaatcttgaaagctggtccttcaattccagccaagcattcacatgaccgcaatcctagctgatctcgcttgtgacctctatgggagaccctaagccagaaccactcagagaagctgctccggaacgtcagacacacatgaactgtgagatagtaaacgtttattgtttaaagctacttggtttggggataatttgcgtttcagcagtagacaatatatttattttgtccaggggagtggaaaggcgattacagagtttgttgagccccatagagtcctagtctttgcttaaagaaatataccagttctttctaatacagaatccattaagttcgttggttgcaaacaatagaaaccaactctgcctcacttatgtttattggaggccataagagagccacagcatctaccaaaaagccaaaaaaaaaacaggttttggaaaagacaggaactagctacaggagctaatggccaatcttgtctgagttctttgatggcgacacatgaactacagccgttttgttgttgttaatttctccgtgttttcccctcagttttggatgactctgctcaaggttcagattctgaggagcaagtatctgttgggctatctgaggtcctgctaccattccttggccagtaataggtagtttcacagggattatatgcaatggaggaaaagttgttctcaaggaaaactagggagctttctccagaagatgatgtaatggcagaaacaacaggtggttgaccacagaaggggacaataataatacttgtaatttattgtgcgcttatatgagcctcaccctctcccaggtgtcagataatgctcgtaaatgccttagtccatcatctcagtaaattttttttataacactatg

SEQ ID NO: 12406 - DNA, 1211 bp, Homo sapiens
  source 1..1211: mol_type = unassigned DNA
gtaagcactttatgcttccccagaggtgactaaactctgatcattgccaatgggcaggcactccccaaatgtccaaggacaacaaagatacccagagtgtctttcatagctaccaatgattaaatagcaagtattgcattcctgggcattgctaactagtgaagtataccagatggaaatgtcttcgaagctgtccctttaaaactcgagcaagctaccaggcaaactccgcctccagggaggttccttattaaataggagccaactggctgggtcggggctcaataccccaagcaatacctgcaactgaggattcttcccggggagaccgcagcccatcggcatggctcaagagtttgtgaactgcaaaatccagcctgggaaggtggttgtgttcatcaagcccacctgcccgtactgcaggagggcccaagagatcctcagtcaattgcccatcaaacaagggcttctggaatttgtcgatatcacagccaccaaccacactaacgagattcaagattatttgcaacagctcacgggagcaagaacggtgcctcgagtctttattggtaaagattgtataggcggatgcagtgatctagtctctttgcaacagagtggggaactgctgacgcggctaaagcagattggagctctgcagtaaccacagatctcataggaaatgttcaacaattctgtgaaaggtcacaggacccaattggagaaatcatatgaaaagcatagttggtcttggtgtcatatggatcagaggcacaagtgcagaggctgtggtcatgcggaacactctgttatttaagatggctatccagataatcctgaacactgtgtatttattttatttagactaccagcaaagattaaagcatgaaatgtaaaacatctgataaaacttacagccccctacaccaagagtgtatctgtgaaagagctcctacactttgaaaacttaagaatcccttatcatgaagtttgcctgttctagaattgtaagattgttaatttccttcaatctctagtgacaacacttaatttcttttctaataaaaaaaacctatagatgattcagtgatttttgtccaattcatttgcatgttctcaagacattaaggaatgttatgcgaaatacactaacttaaaactgtgtttatatttggccctgccattataaataaagacacgtgctgctgtca

SEQ ID NO: 12407 - DNA, 1366 bp, Homo sapiens
  source 1..1366: mol_type = unassigned DNA
aagcaatacctgcaactgaggattcttcccggggagaccgcagcccatcggcatggctcaagagtttgtgaactgcaaaatccagcctgggaaggtggttgtgttcatcaagcccacctgcccgtactgcaggagggcccaagagatcctcagtcaattgcccatcaaacaagggcttctggaatttgtcgatatcacagccaccaaccacactaacgagattcaagattatttgcaacagctcacgggagcaagaacggtgcctcgagtctttattggtaaagattgtataggcggatgcagtgatctagtctctttgcaacagagtggggaactgctgacgcggctaaagcagattggagctctgcagtaaccacagaacaggccccatgctgacgtccctcctcaagagctggatggcattgcaaatgatgacagcacttctggtggatgaatttgggggcacaaacagcttttttcctcttttggctcagtatttaaaagtggaccaacttgctcttaatcacagggccaagaaggttgacgggccatcttggttttcttctggatgtgctctttggttttcagaagactgtgacaagttctggcccaggattcgctcactgaccctcaattgtcctctttggcatgcgtttcttactgttctccatgtgtcggcatgtctctacctctaagccagtgtttttcaactatgtttatccagactccttctccacaatgatgaatccacagttggttatctgctactgcccattagctaaaatcattttgctgcttgactttatggagtttgtattatgaaatcagtgggtattttgaatgtgttctttctaactacatgcatctctccactcaactccaccccatcccatcccaccttgaaaatcactgctctgaaccagtgttctccaccttgtcctccacagatctcataggaaatgttcaacaattctgtgaaaggtcacaggacccaattggagaaatcatatgaaaagcatagttggtcttggtgtcatatggatcagaggcacaagtgcagaggctgtggtcatgcggaacactctgttatttaagatggctatccagataatcctgaacactgtgtatttattttatttagactaccagcaaagattaaagcatgaaatgtaaaacatctgataaaacttacagccccctacaccaagagtgtatctgtgaaagagctcctacactttgaaaacttaagaatcccttatcatgaagtttgcctgttctagaattgtaagattgttaatttccttcaatctctagtgacaacacttaatttcttttctaataaaaaaaacctatagatgattcagtg

SEQ ID NO: 12408 - DNA, 632 bp, Homo sapiens
  source 1..632: mol_type = unassigned DNA
aataccccaagcaatacctgcaactgaggattcttcccggggagaccgcagcccatcggcatggctcaagagtttgtgaactgcaaaatccagcctgggaaggtggttgtgttcatcaagcccacctgcccgtactgcaggagggcccaagagatcctcagtcaattgcccatcaaacaagggcttctggaatttgtcgatatcacagccaccaaccacactaacgagattcaagattatttgcaacagctcacgggagcaagaacggtgcctcgagtctttattggtaaagattgtataggcggatgcagtgatctagtctctttgcaacagagtggggaactgctgacgcggctaaagcagattggagctctgcagtaaccacagggccaagaaggttgacgggccatcttggttttcttctggatgtgctctttggttttcagaagactgtgacaagttctggcccaggattcgctcactgaccctcaattgtcctctttggcatgcgtttcttactgttctccatgtgtcggcatgtctctacctctaagccagtgtttttcaactatgtttatccagactccttctccacaatgatgaatccacagttggttatctgctactgccca

SEQ ID NO: 12409 - DNA, 533 bp, Homo sapiens
  source 1..533: mol_type = unassigned DNA
gctcaataccccaagcaatacctgcaactgaggattcttcccggggagaccgcagcccatcggcatggctcaagagtttgtgaactgcaaaatccagcctgggaaggtggttgtgttcatcaagcccacctgcccgtactgcaggagggcccaagagatcctcagtcaattgcccatcaaacaagggcttctggaatttgtcgatatcacagccaccaaccacactaacgagattcaagattatttgcaacagctcacgggagcaagaacggtgcctcgagtctttattggtaaagattgtataggcggatgcagtgatctagtctctttgcaacagagtggggaactgctgacgcggctaaagcagattggagctctgcagtaaccacagaaatggagtatcactatgttgctcaagctagactcaaactcctggactcaagggatcctcccgcctcagccttccaagtcactgggattataagtgcatgccatcccacgcagctactctcttgaatactcgagaaagccaa

SEQ ID NO: 12410 - DNA, 473 bp, Homo sapiens
  source 1..473: mol_type = unassigned DNA
caatacctgcaactgaggattcttcccggggagaccgcagcccatcggcatggctcaagagtttgtgaactgcaaaatccagcctgggaaggtggttgtgttcatcaagcccacctgcccgtactgcaggagggcccaagagatcctcagtcaattgcccatcaaacaagggcttctggaatttgtcgatatcacagccaccaaccacactaacgagattcaagattatttgcaacagctcacgggagcaagaacggtgcctcgagtctttattggtaaagattgtataggcggatgcagtgatctagtctctttgcaacagagtggggaactgctgacgcggctaaagcagattggagctctgcagtaaccacaggtgagtggcaggtgaggtgctgggccaggaacatgggagaccgtggaattcttctgtcgtggtttgttatactgtatgacagcattctggttggggg

SEQ ID NO: 12411 - DNA, 701 bp, Homo sapiens
  source 1..701: mol_type = unassigned DNA
gatccgcggtgtccggcagtagagctcgctgcagatccgggctctgaccatgatttggcgccgcgcggcgctggcggggacgcggctggtttggagcaggagcggctcggcaggctggcttgacagggcggcgggagctgcgggagctgcggcagctgcggcctctgggatggagagcaatacatcatcatctttggagaatttagcgacggcgcctgtgaaccagatccaagaaacaatttctgataattgtgtggtgattttctcaaaaacatcctgttcttactgtacaatggcaaaaaagcttttccatgacatgaatgttaactataaagtggtggaactggacctgcttgaatatggaaaccagttccaagatgctctttacaaaatgactggtgaaagaactgttccaagaatatttgtcaatggtacttttattggaggtgcaactgacactcataggcttcacaaagaaggaaaattgctcccactagttcatcagtgttatttaaaaaaaagtaagaggaaagaatttcagtgatgtttatactaataagtttgctagtacagtgtcagttatttaaagtggtaatgcccgataatgtcttttaaatgtttgaggatgttttaaatacatgcattgtcttcacgaagaagatgtaaaaataatgaacaataaattgcggtggaaacctctt

SEQ ID NO: 12412 - DNA, 1131 bp, Homo sapiens
  source 1..1131: mol_type = unassigned DNA
aaggctattattaccaccactgagtggcttaaataatcctgtcaacagcaatcgcccatttccaaagccatggtgaaacatctctgtgctaatttcttttgttttgtttcctaattttttttttttggcaggtggtgggaaataatctttgtcttctttggagtaaaccttcaacaccggattttttcttttaattatggatgtaaaccccaatatccccataatttacattgggtctcgaccaattgcctaattataagaggatatatttaggctcttatttcatccacacaaaaacttgtgtaacaggtagttggaaacatctgaggcaccactttgattctgttttggatggtcatgttttttctcctccgtttccccagcatgtctgccaccatcctcatgcactgcttccaagtgcctgggagcctttatgagcgtccctaaacctaaaagaatccagaggcggggctcggatgaaccctcgagataagcaagtgagccgcttctcccctctaaaggatgtttacacgtgggtggcactcgctggaatccagcgctcgggcagccctgggaggacgcgctcagctgcgaggaggatggagagcaatacatcatcatctttggagaatttagcgacggcgcctgtgaaccagatccaagaaacaatttctgataattgtgtggtgattttctcaaaaacatcctgttcttactgtacaatggcaaaaaagcttttccatgacatgaatgttaactataaagtggtggaactggacctgcttgaatatggaaaccagttccaagatgctctttacaaaatgactggtgaaagaactgttccaagaatatttgtcaatggtacttttattggaggtgcaactgacactcataggcttcacaaagaaggaaaattgctcccactagttcatcagtgttatttaaaaaaaagtaagaggaaagaatttcagtgatgtttatactaataagtttgctagtacagtgtcagttatttaaagtggtaatgcccgataatgtcttttaaatgtttgaggatgttttaaatacatgcattgtcttcacgaagaagatgtaaaaataatgaacaataaattgcggtggaaacctctt

SEQ ID NO: 12413 - DNA, 1262 bp, Homo sapiens
  source 1..1262: mol_type = unassigned DNA
gcttctgtctggcggcggcagcatggcggcgggggcggctgaggcagctgtagcggccgtggaggaggtcggctcagccgggcagtttgaggagctgctgcgcctcaaagccaagtccctccttgtggtccatttctgggcaccatgggctccacagtgtgcacagatgaacgaagttatggcagagttagctaaagaactccctcaagtttcatttgtgaagttggaagctgaaggtgttcctgaagtatctgaaaaatatgaaattagctctgttcccacttttctgtttttcaagaattctcagaaaatcgaccgattagatggtgcacatgccccagagttgaccaaaaaagttcagcgacatgcatctagtggctccttcctacccagcgctaatgaacatcttaaagaagatctcaaccttcgcttgaagaaattgactcatgctgccccctgcatgctgtttatgaaaggaactcctcaagaaccacgctgtggtttcagcaagcagatggtggaaattcttcacaaacataatattcagtttagcagttttgatatcttctcagatgaagaggttcgacagggactcaaagcctattccagttggcctacctatcctcagctctatgtttctggagagctcataggaggacttgatataattaaggagctagaagcatctgaagaactagatacaatttgtcccaaagctcccaaattagaggaaaggctcaaagtgctgacaaataaagcttctgtgatgctctttatgaaaggaaacaaacaggaagcaaaatgtggattcagcaaacaaattctggaaatactaaatagtactggtgttgaatatgaaacattcgatatattggaggatgaagaagttcggcaaggattaaaagcttactcaaattggccaacataccctcagctgtatgtgaaaggggagctggtgggaggattggatattgtgaaggaactgaaagaaaatggtgaattgctgcctatactgagaggagaaaattaataaatcttaaacttggtgcccaactattgtaagaaatatttaattacattgggagcagttcatgatttagtcctcagaaatggactaggaatagaaaattcctgctttctcagttacatgttttgtgtatttcacaatgtcgtgctaaataaatgtatgttacatttttttcccaccaaaaatagaatgcaataaacatcttcaaattattaacaataattgtatgaaaaaa

SEQ ID NO: 12414 - DNA, 1322 bp, Homo sapiens
  source 1..1322: mol_type = unassigned DNA
gcttctgtctggcggcggcagcatggcggcgggggcggctgaggcagctgtagcggccgtggaggaggtcggctcagccgggcagtttgaggagctgctgcgcctcaaagccaagtccctccttgtggtccatttctgggcaccatgggctccacagtgtgcacagatgaacgaagttatggcagagttagctaaagaactccctcaagtttcatttgtgaagttggaagctgaaggtgttcctgaagtatctgaaaaatatgaaattagctctgttcccacttttctgtttttcaagaattctcagaaaatcgaccgattagatggtgcacatgccccagagttgaccaaaaaagttcagcgacatgcatctagtggctccttcctacccagcgctaatgaacatcttaaagaagatctcaaccttcgcttgaagaaattgactcatgctgccccctgcatgctgtttatgaaaggaactcctcaagaaccacgctgtggtttcagcaagcagatggtggaaattcttcacaaacataatattcagtttagcagttttgatatcttctcagatgaagaggttcgacagggactcaaagcctattccagttggcctacctatcctcagctctatgtttctggagagctcataggaggacttgatataattaaggagctagaagcatctgaagaactagatacaatttgtcccaaagctcccaaattagaggaaaggctcaaagtgctgacaaataaagcttctgtgatgctctttatgaaaggaaacaaacaggaagcaaaatgtggattcagcaaacaaattctggaaatactaaatagtactggtgttgaatatgaaacattcgatatattggaggatgaagaagttcggcaaggattaaaagcttactcaaattggccaacataccctcagctgtatgtgaaaggggagctggtgggaggattggatattgtgaaggaactgaaagaaaatggtgaattgctgcctatactgagaggagaaaattaataaatcttaaacttggtgcccaactattacggggtctggctctgtcacccaggctggagtgcagtggcacgattatggctcattgcagcctcgacttctcggggccaagcgatcctcctgcctcagccttctgagtagctgggaccacaggcgtgcaccaccatgcccacctaattttttatttcttgtagagatgaggtctcctgcctcagcctcccaaagtgctggaatttacaggtaggaccaccacacttggtccacttacttataataaacattgatttggtcgttc

SEQ ID NO: 12415 - DNA, 1921 bp, Homo sapiens
  source 1..1921: mol_type = unassigned DNA
gcttctgtctggcggcggcagcatggcggcgggggcggctgaggcagctgtagcggccgtggaggaggtcggctcagccgggcagtttgaggagctgctgcgcctcaaagccaagtccctccttgtggtccatttctgggcaccatgggctccacagtgtgcacagatgaacgaagttatggcagagttagctaaagaactccctcaagtttcatttgtgaagttggaagctgaaggtgttcctgaagtatctgaaaaatatgaaattagctctgttcccacttttctgtttttcaagaattctcagaaaatcgaccgattagatggtgcacatgccccagagttgaccaaaaaagttcagcgacatgcatctagtggctccttcctacccagcgctaatgaacatcttaaagaagatctcaaccttcgcttgaagaaattgactcatgctgccccctgcatgctgtttatgaaaggaactcctcaagaaccacgctgtggtttcagcaagcagatggtggaaattcttcacaaacataatattcagtttagcagttttgatatcttctcagatgaagaggttcgacagggactcaaagcctattccagttggcctacctatcctcagctctatgtttctggagagctcataggaggacttgatataattaaggagctagaagcatctgaagaactagatacaatttgtcccaaagctcccaaattagaggaaaggctcaaagtgctgacaaataaagcttctgtgatgctctttatgaaaggaaacaaacaggaagcaaaatgtggattcagcaaacaaattctggaaatactaaatagtactggtgttgaatatgaaacattcgatatattggaggatgaagaagttcggcaaggattaaaagcttactcaaattggccaacataccctcagctgtatgtgaaaggggagctggtgggaggattggatattgtgaaggaactgaaagaaaatggtgaattgctgcctatactgagaggagaaaattaataaatcttaaacttggtgcccaactattacggggtctggctctgtcacccaggctggagtgcagtggcacgattatggctcattgcagcctcgacttctcggggccaagcgatcctcctgcctcagccttctgagtagctgggaccacaggcgtgcaccaccatgcccacctaattttttatttcttgtagagatgaggtctcctgcctcagcctcccaaagtgctggaatttacaggagtgtcggctgtgccccttgtgatgggtgaggaaaggtatccacctttctgaatcagacacaagctgcagtagcttcctgatgcctcattcaccaggatgggtaactttaaagacaagttttataactggcatcccatctggtttcagagtcttgggggcttttttcatacagctttgtctgatatttagagacattcagattcagaagccatgagttcagttagctcatgggccgggcacgtgcactgactcactggctgcagcagaacacgttgagggagtcttggtgcacttaggtcactgtaaggttctagggctgggagctgggatttgaaccaggatctgtcagcgcagccccagtgctgtgcttgaagcctcgtgccacactggctttgaggtagcacgctgcaagttagtgagtggagttgcccaagtctggggcttctgaaatgacctggtatttttatgttcctgttagaaatggtgtggctttcacaaattaagtgccaggctgggcacaatggctcgtgcttgtaatcccagcactttgggaggcggaggcaggcgggttgcttgagctccggagcttgagaccagcctgagcaacatggcgaaacctcatatctacaaaaaataaaaaattaactggtca

SEQ ID NO: 12416 - DNA, 1564 bp, Homo sapiens
  source 1..1564: mol_type = unassigned DNA
cgcattgccatggcaattcaaccgccgctgacaccggaaccggaaacttcatcaggaggtgaccccttcccggcgttccgcggaacgggcgagtcccgcgcctctcccagttgtctcggcgtagtccagctggcctcattggctcacaggaggaaagtcgtcttccctcttgttttgcctctcgttgccctgcaagcgtgaccctgatggacatccagtctctccaattaactaacaaagcggttgccgacgaccaatagtaaggcagtaggatgaggctccggcataaggcccacctcctacctgccgggcgggacgagcaacatgattggtggaatcgagtaattactgatcagtattgtccaatcacggagggcagtttagagccggcccaatgagggcctccagggggcgggtcggactgccgcgggccggggagcgctctgggtggccagctgtgggcccgggccgtcgtgggctccggcttgcgtgcggagatgagcgggtccctcggccgagctgcggcggctctgctccgctgggggcgcggcgcgggcggcggtggcctttggggtccgggcgtgcgggcggcgggctcgggcgcgggcggcggcggctcggcggagcagttggacgcgctggtgaagaaggacaaggtggtggtcttcctcaaggggacgccggagcagccccagtgcggcttcagcaacgccgtggtgcagatcctgcggctgcacggcgtccgcgattacgcggcctacaacgtgctggacgacccggagctccgacaaggcattaaagactattccaactggcccaccatcccgcaagtgtacctcaatggcgagtttgtagggggctgtgacattcttctgcagatgcaccagaatggggacttggtggaagaactgaaaaagctggggatccactccgcccttttagatgaaaagaaagaccaagactccaagtgagggcggccaagtcctcgctgagcagagagggagccgttcatgtcagagactcactgccagaaaagccttacccattttggttttcactattgagaccgcaactgcttgcactgatcattttggttcgtgagcagttggtgattttagttggtctggtgttcgggctaagaatattttattgtggacttaattacaaccactgcactgtaatgattcaatgctgtattatgatattgctgtaaacaaaattcattcttatattgtcacttattctttgcctgattcagaagttaaataggagctttggaatcattattcatgacccctctgcaaatgtgtcagtctccaaagagagtatctccccccaaattttgtgtagcttcttttgttatggaaaatggtgaacaaaaaaagaaactgtgataactggggcgttgttttttaaaataaactccagcacagggatgctgtgcatgcctgagttgattccgaagtgcatatgtctgtaaggatttggagtgcctgcagtgttttatgtgtgggaagtaagggtgagtctcatattcttctattaaatttgccacaagaattgc

SEQ ID NO: 12417 - DNA, 991 bp, Homo sapiens
  source 1..991: mol_type = unassigned DNA
atgcttaaaagggagatgaagccagaaagtgacaggccacggaaagtccggtttcggatcgcgtcctctcacagtgggcgagttctgaaggaagtgtatgaagatgggcaaccgtcaggctctctggattctgaatgtgccagtatctgtgggatagatggactaggtgattccgatggacagcagaatggccacatagagtcagaaggtgatgagaatgagaatgaccaggatagcttgctggtgttagcaagggctgccagtgagaagggttttggtacaagaagagtcaacattttaagcaaaaatggcacagtcagaggcgtcaaatacaaagtgagtgctggccaggctctatttaacaatttgaccaaagtattacagcaaccatcaactgatctagaatttgaccgtgtagtgatttataccacctgccttcgtgtggtccggacaacctttgaaagatgtgaactggttagaaagattttccaaaaccatcgcgtaaaatttgaagagaaaaacatagccctgaatggtgaatatggaaaagagttagacgaacgatgccgacgagtttctgaagctccttccctccctgttgtgttcattgatggccattaccttgggggtgctgagaaaattttgtcaatgaatgaatcaggagaactgcaagacatcctaaccaaaattgagagagtacagcatccacatgagtgtccctcttgtggaggctttggctttcttccatgctccgtgtgccatgggagcaagatgtccatgtttcgaaactgcttcacagactctttcaaagccctgaagtgtacggcttgcaatgaaaatggtcttcagcgttgtaagaactgtgctggttaattggagcttctacccaggaaaaacctcattttattaatcaaaggcaatactttggtttatatatatatttttaaatggttatgtttatggattaatcaataaactttgtttattataa

SEQ ID NO: 12418 - DNA, 1821 bp, Homo sapiens
  source 1..1821: mol_type = unassigned DNA
agttgcactgtagcctcggcagtgaaccgggaggtactaccaggtcgccgtcgttgctccgctcgctctgagagagcatggccctgagaggcgtctccgtgcggctgctgagccgcggacccggcctgcacgtccttcgcacgtgggtctcgtcggcggcgcagaccgagaaaggcgggagaacacagagccaactggctaagtcctcgcgtcccgagtttgactggcaggacccgctggtgctggaggagcagctgaccacagatgagatcctcatcagggacaccttccgcacctactgccaggagagactcatgcctcgcatcctgttggccaatcgcaacgaagtttttcatcgggagatcatttcggagatgggggagttgggtgtgctgggccccaccatcaaaggatatggctgtgctggggtttcgtctgtggcctatgggctcctggcccgagagctggagcgggtggacagtggctacaggtcggcgatgagtgtccagtcctccctcgtcatgcaccctatctatgcctatggcagcgaggaacagcggcagaagtacctgccccagctggccaagggggagctcctgggctgcttcgggctcacagagcccaacagcggaagtgaccccagcagcatggagaccagagcccactacaactcatccaacaagagctacaccctcaatgggaccaagacctggatcacgaactcgcctatggccgatctgtttgtagtgtgggctcggtgtgaagatggctgcattcggggcttcctgctggagaaggggatgcggggtctctcggcccccaggatccagggcaagttctcgctgcgggcctcagccacaggcatgatcatcatggacggtgtggaggtgccagaggagaatgtgctccctggtgcatccagcctggggggtcccttcggctgcctgaacaacgcccggtacggcatcgcgtggggcgtgcttggagcttcggagttctgcttgcacacagcccggcagtacgccctcgacaggatgcagtttggtgtcccactggccaggaaccagctgattcagaagaagctggcagacatgctcactgagattaccctgggccttcacgcctgcctgcagctcggccgcttgaaggaccaggacaaggctgcccccgagatggtttctctgctgaagaggaataactgtgggaaagccctggacatcgcccgccaggcccgagacatgctgggggggaatgggatttctgacgagtatcacgtgatccggcacgccatgaacctggaggccgtgaacacctacgaaggtacacatgacattcacgccctgatccttgggagagctatcacgggaatccaggcgttcacggccagcaagtgagccgctccatcaggggcccgaaactctcaagcccctttctggagagatgcctggctggaccgtaggagcgctgtgctctgagcttagaaagggaggtggcggatggagtgggaagtgagagacactgatttttaaatatcaaaatttcccttctgaagtcgttcagatgtgttccttaaaaagaagatggaattctctgtagagcgtctcaatccacttttaaccatggatgagagcagactccatttaccctgaaatagcagcttctcttgagaggagagtgacatggaagcaactccgtctgctgcagctgaccccctcacactgagttcacagtgcgccctccctccctcccatctgggggtagtgccttatgctgggtgttggagcagagtgagggagaggaaaataaagacctgcacatctg

SEQ ID NO: 12419 - DNA, 1109 bp, Homo sapiens
  source 1..1109: mol_type = unassigned DNA
agttgcactgtagcctcggcagtgaaccgggaggtactaccaggtcgccgtcgttgctccgctcgctctgagagagcatggccctgagaggcgtctccgtgcggctgctgagccgcggacccggcctgcacgtccttcgcacgtgggtctcgtcggcggcgcagaccgcctcgcgtcccgagtttgactggcaggacccgctggtgctggaggagcagctgaccacagatgagatcctcatcagggacaccttccgcacctactgccaggagagactcatgcctcgcatcctgttggccaatcgcaacgaaggatatggctgtgctggggtttcgtctgtggcctatgggctcctggcccgagagctggagcgggtggacagtggctacaggtcggcgatgagtgtccagtcctccctcgtcatgcaccctatctatgcctatggcagcgaggaacagcggcagaagtacctgccccagctggccaagggggagctcctgggctgcttcgggctcacagagcccaacagcggaagtgaccccagcagcatggagaccagagcccactacaactcatccaacaagagctacaccctcaatgggaccaagacctggatcacgaactcgcctatggccgatctgtttgtagtgtgggctcggtgtgaagatggctgcattcggggcttcctgctggagaaggggatgcggggtctctcggcccccaggatccagggcaagttctcgctgcgggcctcagccacaggcatgatcatcatggacggtgtggaggtgccagaggagaatgtgctccctggtgcatccagcctggggggtcccttcggctgcctgaacaacgcccggtacggcatcgcgtggggcgtgcttggagcttcggagttctgcttgcacacagcccggcagtacgccctcgacaggatgcagtttggtgtcccactggccaggaaccagctgattcagaagaagctggcagacatgctcactgagattaccctgggccttcacgcctgcctgcagctcggccgcttgaaggaccaggacaagtaggggctgtgtggtgggggcggggggatggcagcggtggctggagga

SEQ ID NO: 12420 - DNA, 1871 bp, Homo sapiens
  source 1..1871: mol_type = unassigned DNA
actgtagcctcggcagtgaaccgggaggtactaccaggtcgccgtcgttgctccgctcgctctgagagagcatggccctgagaggcgtctccgtgcggctgctgagccgcggacccggcctgcacgtccttcgcacgtgggtctcgtcggcggcgcagaccgagaaaggcgggagaacacagagccaactggctaagtcctcgcgtcccgagtttgactggcaggacccgctggtgctggaggagcagctgaccacagatgagatcctcatcagggacaccttccgcacctactgccaggagagactcatgcctcgcatcctgttggccaatcgcaacgaagagtctggctctgttgcccaggctggagtgcagtggcacgatcttggctcactgcaaattctgcctcccaggctcaagcgattctcctgcctccacccctctagtagctgggattacaggatatggctgtgctggggtttcgtctgtggcctatgggctcctggcccgagagctggagcgggtggacagtggctacaggtcggcgatgagtgtccagtcctccctcgtcatgcaccctatctatgcctatggcagcgaggaacagcggcagaagtacctgccccagctggccaagggggagctcctgggctgcttcgggctcacagagcccaacagcggaagtgaccccagcagcatggagaccagagcccactacaactcatccaacaagagctacaccctcaatgggaccaagacctggatcacgaactcgcctatggccgatctgtttgtagtgtgggctcggtgtgaagatggctgcattcggggcttcctgctggagaaggggatgcggggtctctcggcccccaggatccagggcaagttctcgctgcgggcctcagccacaggcatgatcatcatggacggtgtggaggtgccagaggagaatgtgctccctggtgcatccagcctggggggtcccttcggctgcctgaacaacgcccggtacggcatcgcgtggggcgtgcttggagcttcggagttctgcttgcacacagcccggcagtacgccctcgacaggatgcagtttggtgtcccactggccaggaaccagctgattcagaagaagctggcagacatgctcactgagattaccctgggccttcacgcctgcctgcagctcggccgcttgaaggaccaggacaaggctgcccccgagatggtttctctgctgaagaggaataactgtgggaaagccctggacatcgcccgccaggcccgagacatgctgggggggaatgggatttctgacgagtatcacgtgatccggcacgccatgaacctggaggccgtgaacacctacgaaggtacacatgacattcacgccctgatccttgggagagctatcacgggaatccaggcgttcacggccagcaagtgagccgctccatcaggggcccgaaactctcaagcccctttctggagagatgcctggctggaccgtaggagcgctgtgctctgagcttagaaagggaggtggcggatggagtgggaagtgagagacactgatttttaaatatcaaaatttcccttctgaagtcgttcagatgtgttccttaaaaagaagatggaattctctgtagagcgtctcaatccacttttaaccatggatgagagcagactccatttaccctgaaatagcagcttctcttgagaggagagtgacatggaagcaactccgtctgctgcagctgaccccctcacactgagttcacagtgcgccctccctccctcccatctgggggtagtgccttatgctgggtgttggagcagagtgagggagaggaaaataaagacctgcacatctga

SEQ ID NO: 12421 - DNA, 1589 bp, Homo sapiens
  source 1..1589: mol_type = unassigned DNA
agttgcactgtagcctcggcagtgaaccgggaggtactaccaggtcgccgtcgttgctccgctcgctctgagagagcatggccctgagaggcgtctccgtgcggctgctgagccgcggacccggcctgcacgtccttcgcacgtgggtctcgtcggcggcgcagaccgagaaaggcgggagaacacagagccaactggctaagtcctcgcgtcccgagtttgactggcaggacccgctggtgctggaggagcagctgaccacagatgagatcctcatcagggacaccttccgcacctactgccaggagagactcatgcctcgcatcctgttggccaatcgcaacgaagtttttcatcgggagatcatttcggagatgggggagttgggtgtgctgggccccaccatcaaaggatatggctgtgctggggtttcgtctgtggcctatgggctcctggcccgagagctggagcgggtggacagtggctacaggtcggcgatgagtgtccagtcctccctcgtcatgcaccctatctatgcctatggcagcgaggaacagcggcagaagtacctgccccagctggccaagggggagctcctgggctgcttcgggctcacagagcccaacagcggaagtgaccccagcagcatggagaccagagcccactacaactcatccaacaagagctacaccctcaatgggaccaagacctggatcacgaactcgcctatggccgatctgtttgtagtgtgggctcggtgtgaagatggctgcattcggggcttcctgctggagaaggggatgcggggtctctcggcccccaggatccagggcaagttctcgctgcgggcctcagccacaggcatgatcatcatggacggtgtggaggtgccagaggagaatgtgctccctggtgcatccagcctggggggtcccttcggctgcctgaacaacgcccggtacggcatcgcgtggggcgtgcttggagcttcggagttctgcttgcacacagcccggcagtacgccctcgacaggatgcagtttggtgtcccactggccaggaaccagctgattcagaagaagctggcagacatgctcactgagattaccctgggccttcacgcctgcctgcagctcggccgcttgaaggaccaggacaaggctgcccccgagatggtttctctgctgaagaggaataactgtgggaaagccctggacatcgcccgccaggcccgagacatgctgggggggaatgggatttctgacgagtatcacgtgatccggcacgccatgaacctggaggccgtgaacacctacgaagtcgttcagatgtgttccttaaaaagaagatggaattctctgtagagcgtctcaatccacttttaaccatggatgagagcagactccatttaccctgaaatagcagcttctcttgagaggagagtgacatggaagcaactccgtctgctgcagctgaccccctcacactgagttcacagtgcgccctccctccctcccatctgggggtagtgccttatgctgggtgttggagcagagtgagggagaggaaaataaagacctgcacatctg

SEQ ID NO: 12422 - DNA, 1106 bp, Homo sapiens
  source 1..1106: mol_type = unassigned DNA
gcgccatgtgtgctgctcggctagcggcggcggcggcggcggcccagtcggtgtatgccttctcggcgcgcccgctggccggcggggagcctgtgagcctgggctccctgcggggcaaggtactacttatcgagaatgtggcgtccctctgaggcaccacggtccgggactacacccagatgaacgagctgcagcggcgcctcggaccccggggcctggtggtgctcggcttcccgtgcaaccagtttgggcatcaggtgcgccgggcggagcggggcggggcgggggcggacgtgcagtagtggctgggggcgccggcggtgtgctggtgggtgccgtcggctccatgcgcggagagtctggctactctctcgtttcctttctgttgctcgtagctgctgaaattcctctccgcccttgggattgcgcatggagggcaaaatcccggtgactcatagaaaatctcccttgtttgtggttagaacgtttctctcctcctcttgaccccgggttctagctgcccttctctcctgtaggagaacgccaagaacgaagagattctgaattccctcaagtacgtccggcctggtggtgggttcgagcccaacttcatgctcttcgagaagtgcgaggtgaacggtgcgggggcgcaccctctcttcgccttcctgcgggaggccctgccagctcccagcgacgacgccaccgcgcttatgaccgaccccaagctcatcacctggtctccggtgtgtcgcaacgatgttgcctggaactttgagaagttcctggtgggccctgacggtgtgcccctacgcaggtacagccgccgcttccagaccattgacatcgagcctgacatcgaagccctgctgtctcaagggcccagctgtgcctagggcgcccctcctaccccggctgcttggcagttgcagtgctgctgtctcgggggggttttcatctatgagggtgtttcctctaaacctacgagggaggaacacctgatcttacagaaaataccacctcgagatgggtgctggtcctgttgatcccagtctctgccagaccaaggcgagtttccccactaataaagtgccgggtgtcagcag

SEQ ID NO: 12423 - DNA, 1146 bp, Homo sapiens
  source 1..1146: mol_type = unassigned DNA
gagccctcgagggccccagcccttggaagggtaacctggaccgctgccgcctggttgcctgggccagaccagacatgcctgctgctccttccggcttaggaggagcacgcgtcccgctcgggcgcactctccagccttttcctggctgaggaggggccgagccctccgggtagggcgggggccggatgaggcgggaccctcaggcccggaaaactgcctgtgccacgtgacccgccgccggccagttaaaaggaggcgcctgctggcctccccttacagtgcttgttcggggcgctccgctggcttcttggacaattgcgccatgtgtgctgctcggctagcggcggcggcggcggcggcccagtcggtgtatgccttctcggcgcgcccgctggccggcggggagcctgtgagcctgggctccctgcggggcaaggtactacttatcgagaatgtggcgtccctctgaggcaccacggtccgggactacacccagatgaacgagctgcagcggcgcctcggaccccggggcctggtggtgctcggcttcccgtgcaaccagtttgggcatcaggagaacgccaagaacgaagagattctgaattccctcaagtacgtccggcctggtggtgggttcgagcccaacttcatgctcttcgagaagtgcgaggtgaacggtgcgggggcgcaccctctcttcgccttcctgcgggaggccctgccagctcccagcgacgacgccaccgcgcttatgaccgaccccaagctcatcacctggtctccggtgtgtcgcaacgatgttgcctggaactttgagaagttcctggtgggccctgacggtgtgcccctacgcaggtacagccgccgcttccagaccattgacatcgagcctgacatcgaagccctgctgtctcaagggcccagctgtgcctagggcgcccctcctaccccggctgcttggcagttgcagtgctgctgtctcgggggggttttcatctatgagggtgtttcctctaaacctacgagggaggaacacctgatcttacagaaaataccacctcgagatgggtgctggtcctgttgatcccagtctctgccagaccaaggcgagtttccccactaataaagtgccgggtgtcagcagaa

SEQ ID NO: 12424 - DNA, 990 bp, Homo sapiens
  source 1..990: mol_type = unassigned DNA
cttcctggctcctccttcctccccacccctctaataggctcataagtgggctcaggcctctctgcggggctcactctgcgcttcaccatggctttcattgccaagtccttctatgacctcagtgccatcagcctggatggggagaaggtagatttcaatacgttccggggcagggccgtgctgattgagaatgtggcttcgctctgaggcacaaccacccgggacttcacccagctcaacgagctgcaatgccgctttcccaggcgcctggtggtccttggcttcccttgcaaccaatttggacatcaggagaactgtcagaatgaggagatcctgaacagtctcaagtatgtccgtcctgggggtggataccagcccaccttcacccttgtccaaaaatgtgaggtgaatgggcagaacgagcatcctgtcttcgcctacctgaaggacaagctcccctacccttatgatgacccattttccctcatgaccgatcccaagctcatcatttggagccctgtgcgccgctcagatgtggcctggaactttgagaagttcctcatagggccggagggagagcccttccgacgctacagccgcaccttcccaaccatcaacattgagcctgacatcaagcgcctccttaaagttgccatatagatgtgaactgctcaacacacagatctcctactccatccagtcctgaggagccttaggatgcagcatgccttcaggagacactgctggacctcagcattcccttgatatcagtccccttcactgcagagccttgcctttcccctctgcctgtttccttttcctctcccaaccctctggttggtgattcaacttgggctccaagacttgggtaagctctgggccttcacagaatgatggcaccttcctaaaccctcatgggtggtgtctgagaggcgtgaagggcctggagccactctgctagaagagaccaataaagggcaggtgtggaaa

SEQ ID NO: 12425 - DNA, 916 bp, Homo sapiens
  source 1..916: mol_type = unassigned DNA
gagcgctctggagggcgtggccgtgggaaaggaggcgcggaaagccgacgcgcgtccattggtcggctggacgaggggaggagccgctggctcccagccccgccgcgatgagcctcggccgcctttgccgcctactgaagccggcgctgctctgtggggctctggccgcgcctggcctggccgggaccatgtgcgcgtcccgggacgactggcgctgtgcgcgctccatgcacgagttttccgccaaggacatcgacgggcacatggttaacctggacaagtaccggggcttcgtgtgcatcgtcaccaacgtggcctcccagtgaggcaagaccgaagtaaactacactcagctcgtcgacctgcacgcccgatacgctgagtgtggtttgcggatcctggccttcccgtgtaaccagttcgggaagcaggagccagggagtaacgaagagatcaaagagttcgccgcgggctacaacgtcaaattcgatatgttcagcaagatctgcgtgaacggggacgacgcccacccgctgtggaagtggatgaagatccaacccaagggcaagggcatcctgggaaatgccatcaagtggaacttcaccaagttcctcatcgacaagaacggctgcgtggtgaagcgctacggacccatggaggagcccctggtgatagagaaggacctgccccactatttctagctccacaagtgtgtggccccgcccgagcccctgcccacgcccttggagccttccaccggcactcatgacggcctgcctgcaaacctgctggtggggcagacccgaaaatccagcgtgcaccccgccggaggaaggtcccatggcctgctgggcttggctcggcgcccccacccctggctaccttgtgggaataaacagacaaattagcctgctgg

SEQ ID NO: 12426 - DNA, 1540 bp, Homo sapiens
  source 1..1540: mol_type = unassigned DNA
ttgggctaagtccctgccaagataccaaaagactgcagaggtgggcaaagacctcaggcccccagactagcaatctacaaacactagtcatgactacacagttaagggtcgtccatctgcttccccttctcctagcctgctttgtgcaaacaagtcccaagcaggagaagatgaagatggattgccacaaagacgagaaaggcaccatctatgactatgaggccatcgcacttaataagaatgaatatgtttccttcaagcagtatgtgggcaagcacatcctcttcgtcaacgtggccacctactgtggtctgacagcgcaatatcctgaactaaatgcactccaggaggagctgaagccctatggtctagttgtgttgggctttccctgcaaccaatttggaaagcaagaaccaggagataacaaagagattcttcctgggctcaagtatgtccgtccagggggaggatttgtacctagtttccagctttttgagaaaggggatgtgaatggtgaaaaagaacagaaagtcttcagtttcttgaagcactcctgtcctcatccctctgagattttgggcacattcaaatctatatcctgggaccctgtaaaggtccatgacatccgttggaactttgaaaagttcctggtggggcctgatggaatccctgtcatgcgctggtcccaccgggctacggtcagctcagtcaagacagacatcctggcgtacttgaagcaattcaaaaccaaataggaaggtggagttaagggcaggagcaaccctacttctcacctaatgacttgctctccccacccctccaaaaaaaaggaatacccatcttctcaccacactctcttcctgcatgggctccacctgagtaaatcaccgccacatactgccagaattcccactctccacaaactagatttatatttggaaggctactgctcttttgcctctcaagagtatgtgggtgaagactgaaacaaatggaaacctaaaatccccagacctctgttacaggttgaatcattcatatccaccagagggaaatcatccttccacgacaatggttcagtcggccatcacatcctgaagaacattcctagacattctgactcttccatctctctctaccctggaggtgtagaaatagcaatggggtcacagtcacacaatttaggttccacttcataacattttttgtctcctaggacaaacgtgtatcatcagtttccaactgttttggctcagttttcatccatgacacctccccctaccagccattctcctgtgggagcaagaacattgcttcaaaagaagagagggcatctccatgcttgtgggacccaaaacctatctctggccctacaaaagttttcctaattgtctgatctttagtgcattcaggttatggcacctggagaggaatgccctttatcttttgaaggatgggatttcccatctcaaccctggattcctcaccttcagaacgagccctgccactgtctccaataaaatgttttctgcagcatcga

SEQ ID NO: 12427 - DNA, 428 bp, Homo sapiens
  source 1..428: mol_type = unassigned DNA
tcatgactacacagttaagggtcgtccatctgcttccccttctcctagcctgctttgtgcaaacaagtcccaagcaggagaagatgaagatggattgccacaaagacgagaaaggcaccatctatgactatgaggccatcgcacttaataagaatgaatatgtttccttcaagcagtatgtgggcaagcacatcctcttcgtcaacgtggccacctactgtggtctgacagcgcaatatcctggtatgtccgtccagggggaggatttgtacctagtttccagctttttgagaaaggggatgtgaatggtgaaaaagaacagaaagtcttcagtttcttgaagcactcctgtcctcatccctctgagattttgggcacattcaaatctatatcctgggaccctgtaaaggtccatgacatccgttgga

SEQ ID NO: 12428 - DNA, 3114 bp, Homo sapiens
  source 1..3114: mol_type = unassigned DNA
gtgaggctgcgcttgcccggggcccgcgcccccctaccccggggaccgcccccgggccgcccgccccacttggcgcgccacttccgcgtgcatggccctgctgccccgagccctgagcgccggcgcgggaccgagctggcggcgggcggcgcgcgccttccgaggcttcctgctgcttctgcccgagcccgcggccctcacgcgcgccctctcccgtgccatggcctgcaggcaggagccgcagccgcagggcccgccgcccgctgctggcgccgtggcctcctatgactacctggtgatcgggggcggctcgggcgggctggccagcgcgcgcagggcggccgagctgggtgccagggccgccgtggtggagagccacaagctgggtggcacttgcgtgaatgttggatgtgtacccaaaaaggtaatgtggaacacagctgtccactctgaattcatgcatgatcatgctgattatggctttccaagttgtgagggtaaattcaattggcgtgttattaaggaaaagcgggatgcctatgtgagccgcctgaatgccatctatcaaaacaatctcaccaagtcccatatagaaatcatccgtggccatgcagccttcacgagtgatcccaagcccacaatagaggtcagtgggaaaaagtacaccgccccacacatcctgatcgccacaggtggtatgccctccacccctcatgagagccagatccccggtgccagcttaggaataaccagcgatggattttttcagctggaagaattgcccggccgcagcgtcattgttggtgcaggttacattgctgtggagatggcagggatcctgtcagccctgggttctaagacatcactgatgatacggcatgataaggtacttagaagttttgattcaatgatcagcaccaactgcacggaggagctggagaacgctggcgtggaggtgctgaagttctcccaggtcaaggaggttaaaaagactttgtcgggcttggaagtcagcatggttactgcagttcccggtaggctaccagtcatgaccatgattccagatgttgactgcctgctctgggccattgggcgggtcccgaataccaaggacctgagtttaaacaaactggggattcaaaccgatgacaagggtcatatcatcgtagacgaattccagaataccaacgtcaaaggcatctatgcagttggggatgtatgtggaaaagctcttcttactccagttgcaatagctgctggccgaaaacttgcccatcgactttttgaatataaggaagattccaaattagattataacaacatcccaactgtggtcttcagccacccccctattgggacagtgggactcacggaagatgaagccattcataaatatggaatagaaaatgtgaagacctattcaacgagctttaccccgatgtatcacgcagttaccaaaaggaaaacaaaatgtgtgatgaaaatggtctgtgctaacaaggaagaaaaggtggttgggatccatatgcagggacttgggtgtgatgaaatgctgcagggttttgctgttgcagtgaagatgggagcaacgaaggcagactttgacaacacagtcgccattcaccctacctcttcagaagagctggtcacacttcgttgagaaccaggagacacgtgtggcgggcagtgggacccatagatcttctgaaatgaaacaaataatcacattgacttactgtttgagttttatgtatttctttattttaatcaggatcttctgatagtggaaatttttagtacataatagaacttatttatggagttagaaatttgtagtgttatccaggattgattttcatttgatcacatctcacagtaattaatattttcaagttttttttttattaacagctctgtgctagttttttttttctgttttagcctcatcccaaatataaagctttgtgaagtacaattaacttaatgtacttgaatgaatagaacttgctactttttttttttttttttttgagacagagttttgctctcattgcccaggctggagtgcggtggtgctatttcagctcaccacaacctctgcctcctgggttcaagtgattctcctgccttagcctcccgaatagctggaattacaggcacgcaccaccatgcctgactaattttgtatttttagtagacatggggtttctccatgttggtcaggctggtctcaaactcccaccttcaggtgatccgcccacctcggcctcctgaggtgctgagattacaggcgtgagccactgtgccagcttgctaattttcacagaagttgatggcaattcttcacatgtaaacagtgccagtgcacagaacctttatatattttttgaagccagtactgtgctctgcatataacaaagctgcttcaaggatgagacctttttctaaaagcatgtaatgtgagaagccggcctgccttattttcttttttcttttttaatgattaaaaatagtttgtggcaaggcacggtggctcaggcctgtaattctagcactttgggaggccgaggcaggaggattacttgagcctacaagtttgaggccagcatgcacagcatagcaagactgcatctctacagagagtaaaaaaaattacccgagtgtggtgatgtgcatctgtaatctcagctacttgggaggctgaggtgagaggatcacttgagcttgggtgaggtgaggctgcagtgagtcctgatcatgctgctgcactcaatcttggacaacagagcaagaccctgtctcaaaaaaaaaaaaaaaaaatatatatatatatatatattatttttatgaggtgaagtgcatcaaacttgggaaagatttgaggaggctgggaacctcctggaaaaccactccttgaagaaagatatgagagacatttagaagtgattcctgctttcagaaggaggtggattcaaatacatcaaaagtcccttcctctgctaagtgtttatagttcaatgaataatttcaatatttgtatgtgttcttgtcattttatttttttctgaaaaacttccaaaaatttgaaaataaaattacagccttttcttctta

SEQ ID NO: 12429 - DNA, 2893 bp, Homo sapiens
  source 1..2893: mol_type = unassigned DNA
atggcctgcaggcaggagccgcagccgcagggcccgccgcccgctgctggcgccgtggcctcctatgactacctggtgatcgggggcggctcgggcgggctggccagcgcgcgcagggcggccgagctgggtgccagggccgccgtggtggagagccacaagctgggtggcacttgcgtgaatgttggatgtgtacccaaaaaggtaatgtggaacacagctgtccactctgaattcatgcatgatcatgctgattatggctttccaagttgtgagggtaaattcaattggcgtgttattaaggaaaagcgggatgcctatgtgagccgcctgaatgccatctatcaaaacaatctcaccaagtcccatatagaaatcatccgtggccatgcagccttcacgagtgatcccaagcccacaatagaggtcagtgggaaaaagtacaccgccccacacatcctgatcgccacaggtggtatgccctccacccctcatgagagccagatccccggtgccagcttaggaataaccagcgatggattttttcagctggaagaattgcccggccgcagcgtcattgttggtgcaggttacattgctgtggagatggcagggatcctgtcagccctgggttctaagacatcactgatgatacggcatgataaggtacttagaagttttgattcaatgatcagcaccaactgcacggaggagctggagaacgctggcgtggaggtgctgaagttctcccaggtcaaggaggttaaaaagactttgtcgggcttggaagtcagcatggttactgcagttcccggtaggctaccagtcatgaccatgattccagatgttgactgcctgctctgggccattgggcgggtcccgaataccaaggacctgagtttaaacaaactggggattcaaaccgatgacaagggtcatatcatcgtagacgaattccagaataccaacgtcaaaggcatctatgcagttggggatgtatgtggaaaagctcttcttactccagttgcaatagctgctggccgaaaacttgcccatcgactttttgaatataaggaagattccaaattagattataacaacatcccaactgtggtcttcagccacccccctattgggacagtgggactcacggaagatgaagccattcataaatatggaatagaaaatgtgaagacctattcaacgagctttaccccgatgtatcacgcagttaccaaaaggaaaacaaaatgtgtgatgaaaatggtctgtgctaacaaggaagaaaaggtggttgggatccatatgcagggacttgggtgtgatgaaatgctgcagggttttgctgttgcagtgaagatgggagcaacgaaggcagactttgacaacacagtcgccattcaccctacctcttcagaagagctggtcacacttcgttgagaaccaggagacacgtgtggcgggcagtgggacccatagatcttctgaaatgaaacaaataatcacattgacttactgtttgagttttatgtatttctttattttaatcaggatcttctgatagtggaaatttttagtacataatagaacttatttatggagttagaaatttgtagtgttatccaggattgattttcatttgatcacatctcacagtaattaatattttcaagttttttttttattaacagctctgtgctagttttttttttctgttttagcctcatcccaaatataaagctttgtgaagtacaattaacttaatgtacttgaatgaatagaacttgctactttttttttttttttttttgagacagagttttgctctcattgcccaggctggagtgcggtggtgctatttcagctcaccacaacctctgcctcctgggttcaagtgattctcctgccttagcctcccgaatagctggaattacaggcacgcaccaccatgcctgactaattttgtatttttagtagacatggggtttctccatgttggtcaggctggtctcaaactcccaccttcaggtgatccgcccacctcggcctcctgaggtgctgagattacaggcgtgagccactgtgccagcttgctaattttcacagaagttgatggcaattcttcacatgtaaacagtgccagtgcacagaacctttatatattttttgaagccagtactgtgctctgcatataacaaagctgcttcaaggatgagacctttttctaaaagcatgtaatgtgagaagccggcctgccttattttcttttttcttttttaatgattaaaaatagtttgtggcaaggcacggtggctcaggcctgtaattctagcactttgggaggccgaggcaggaggattacttgagcctacaagtttgaggccagcatgcacagcatagcaagactgcatctctacagagagtaaaaaaaattacccgagtgtggtgatgtgcatctgtaatctcagctacttgggaggctgaggtgagaggatcacttgagcttgggtgaggtgaggctgcagtgagtcctgatcatgctgctgcactcaatcttggacaacagagcaagaccctgtctcaaaaaaaaaaaaaaaaaatatatatatatatatatattatttttatgaggtgaagtgcatcaaacttgggaaagatttgaggaggctgggaacctcctggaaaaccactccttgaagaaagatatgagagacatttagaagtgattcctgctttcagaaggaggtggattcaaatacatcaaaagtcccttcctctgctaagtgtttatagttcaatgaataatttcaatatttgtatgtgttcttgtcattttatttttttctgaaaaacttccaaaaatttgaaaataaaattacagccttttcttctt

SEQ ID NO: 12430 - DNA, 1323 bp, Homo sapiens
  source 1..1323: mol_type = unassigned DNA
atggccctgctgccccgagccctgagcgccggcgcgggaccgagctggcggcgggcggcgcgcgccttccgaggcttcctgctgcttctgcccgagcccgcggccctcacgcgcgccctctcccgtgccatggcctgcaggcaggagccgcagccgcagggcccgccgcccgctgctggcgccgtggcctcctatgactacctggtgatcgggggcggctcgggcgggctggccagcgcgcgcagggcggccgagctgggtgccagggccgccgtggtggagagccacaagctgggtggcacttgcgtgaatgttggatgtgtacccaaaaaggtaatgtggaacacagctgtccactctgaattcatgcatgatcatgctgattatggctttccaagttgtgagggtaaattcaattggcgtgttattaaggaaaagcgggatgcctatgtgagccgcctgaatgccatctatcaaaacaatctcaccaagtcccatatagaaatcatccgtggccatgcagccttcacgagtgatcccaagcccacaatagaggtcagtgggaaaaagtacaccgccccacacatcctgatcgccacaggtggtatgccctccacccctcatgagagccagatccccggtgccagcttaggaataaccagcgatggattttttcagctggaagaattgcccggccgcagcgtcattgttggtgcaggttacattgctgtggagatggcagggatcctgtcagccctgggttctaagacatcactgatgatacggcatgataaggggattcaaaccgatgacaagggtcatatcatcgtagacgaattccagaataccaacgtcaaaggcatctatgcagttggggatgtatgtggaaaagctcttcttactccagttgcaatagctgctggccgaaaacttgcccatcgactttttgaatataaggaagattccaaattagattataacaacatcccaactgtggtcttcagccacccccctattgggacagtgggactcacggaagatgaagccattcataaatatggaatagaaaatgtgaagacctattcaacgagctttaccccgatgtatcacgcagttaccaaaaggaaaacaaaatgtgtgatgaaaatggtctgtgctaacaaggaagaaaaggtggttgggatccatatgcagggacttgggtgtgatgaaatgctgcagggttttgctgttgcagtgaagatgggagcaacgaaggcagactttgacaacacagtcgccattcaccctacctcttcagaagagctggtcacacttcgttga

SEQ ID NO: 12431 - DNA, 1410 bp, Homo sapiens
  source 1..1410: mol_type = unassigned DNA
atggccctgctgccccgagccctgagcgccggcgcgggaccgagctggcggcgggcggcgcgcgccttccgaggcttcctgctgcttctgcccgagcccgcggccctcacgcgcgccctctcccgtgccatggcctgcaggcaggagccgcagccgcagggcccgccgcccgctgctggcgccgtggcctcctatgactacctggtgatcgggggcggctcgggcgggctggccagcgcgcgcagggcggccgagctgggtgccagggccgccgtggtggagagccacaagctgggtggcacttgcgtgaatgttggatgtgtacccaaaaaggtaatgtggaacacagctgtccactctgaattcatgcatgatcatgctgattatggctttccaagttgtgagggtaaattcaattggcgtgttattaaggaaaagcgggatgcctatgtgagccgcctgaatgccatctatcaaaacaatctcaccaagtcccatatagaaatcatccgtggccatgcagccttcacgagtgatcccaagcccacaatagaggtcagtgggaaaaagtacaccgccccacacatcctgatcgccacaggtggtatgccctccacccctcatgagagccagatccccggtgccagcttaggaataaccagcgatggattttttcagctggaagaattgcccggccgcagcgtcattgttggtgcaggttacattgctgtggagatggcagggatcctgtcagccctgggttctaagacatcactgatgatacggcatgataaggtacttagaagttttgattcaatgatcagcaccaactgcacggaggagctggagaacgctggcgtggaggtgctgaagttctcccaggggattcaaaccgatgacaagggtcatatcatcgtagacgaattccagaataccaacgtcaaaggcatctatgcagttggggatgtatgtggaaaagctcttcttactccagttgcaatagctgctggccgaaaacttgcccatcgactttttgaatataaggaagattccaaattagattataacaacatcccaactgtggtcttcagccacccccctattgggacagtgggactcacggaagatgaagccattcataaatatggaatagaaaatgtgaagacctattcaacgagctttaccccgatgtatcacgcagttaccaaaaggaaaacaaaatgtgtgatgaaaatggtctgtgctaacaaggaagaaaaggtggttgggatccatatgcagggacttgggtgtgatgaaatgctgcagggttttgctgttgcagtgaagatgggagcaacgaaggcagactttgacaacacagtcgccattcaccctacctcttcagaagagctggtcacacttcgttga

SEQ ID NO: 12432 - DNA, 1482 bp, Homo sapiens
  source 1..1482: mol_type = unassigned DNA
atggccctgctgccccgagccctgagcgccggcgcgggaccgagctggcggcgggcggcgcgcgccttccgaggcttcctgctgcttctgcccgagcccgcggccctcacgcgcgccctctcccgtgccatggcctgcaggcaggagccgcagccgcagggcccgccgcccgctgctggcgccgtggcctcctatgactacctggtgatcgggggcggctcgggcgggctggccagcgcgcgcagggcggccgagctgggtgccagggccgccgtggtggagagccacaagctgggtggcacttgcgtgaatgttggatgtgtacccaaaaaggtaatgtggaacacagctgtccactctgaattcatgcatgatcatgctgattatggctttccaagttgtgagggtaaattcaattggcgtgttattaaggaaaagcgggatgcctatgtgagccgcctgaatgccatctatcaaaacaatctcaccaagtcccatatagaaatcatccgtggccatgcagccttcacgagtgatcccaagcccacaatagaggtcagtgggaaaaagtacaccgccccacacatcctgatcgccacaggtggtatgccctccacccctcatgagagccagatccccggtgccagcttaggaataaccagcgatggattttttcagctggaagaattgcccggccgcagcgtcattgttggtgcaggttacattgctgtggagatggcagggatcctgtcagccctgggttctaagacatcactgatgatacggcatgataaggtcaaggaggttaaaaagactttgtcgggcttggaagtcagcatggttactgcagttcccggtaggctaccagtcatgaccatgattccagatgttgactgcctgctctgggccattgggcgggtcccgaataccaaggacctgagtttaaacaaactggggattcaaaccgatgacaagggtcatatcatcgtagacgaattccagaataccaacgtcaaaggcatctatgcagttggggatgtatgtggaaaagctcttcttactccagttgcaatagctgctggccgaaaacttgcccatcgactttttgaatataaggaagattccaaattagattataacaacatcccaactgtggtcttcagccacccccctattgggacagtgggactcacggaagatgaagccattcataaatatggaatagaaaatgtgaagacctattcaacgagctttaccccgatgtatcacgcagttaccaaaaggaaaacaaaatgtgtgatgaaaatggtctgtgctaacaaggaagaaaaggtggttgggatccatatgcagggacttgggtgtgatgaaatgctgcagggttttgctgttgcagtgaagatgggagcaacgaaggcagactttgacaacacagtcgccattcaccctacctcttcagaagagctggtcacacttcgttga

SEQ ID NO: 12433 - DNA, 1019 bp, Homo sapiens
  source 1..1019: mol_type = unassigned DNA
gtggcttttccctaacttgactcttctttcagtgggagagaactattgagaggaacaaagagcttataaatacattaggacctggaattcagttgtcgagccaggacggtgacagcgtttaacaaagcttagagaaacctccaggagactgctatcatggcagagaagcccaagctccactacttcaatgcacggggcagaatggagtccacccggtggctcctggctgcagctggagtagagtttgaagagaaatttataaaatctgcagaagatttggacaagttaagaaatgatggatatttgatgttccagcaagtgccaatggttgagattgatgggatgaagctggtgcagaccagagccattctcaactacattgccagcaaatacaacctctatgggaaagacataaaggagagagccctgattgatatgtatatagaaggtatagcagatttgggtgaaatgatcctccttctgcccgtatgtccacctgaggaaaaagatgccaagcttgccttgatcaaagagaaaataaaaaatcgctacttccctgcctttgaaaaagtcttaaagagccatggacaagactaccttgttggcaacaagctgagccgggctgacattcatctggtggaacttctctactacgtcgaggagcttgactccagtcttatctccagcttccctctgctgaaggccctgaaaaccagaatcagcaacctgcccacagtgaagaagtttctacagcctggcagcccaaggaagcctcccatggatgagaaatctttagaagaagcaaggaagattttcaggttttaataacgcagtcatggaggccaagaacttgcaataccaatgttctaaagttttgcaacaataaagtactttacctaagtgttgattgtgcctgttgtgaagctaatgaactctttcaaattatatgctaattaaataatacaactcctattcgctgacttagttaaaattgatttgttttcattaggatctgatgt

SEQ ID NO: 12434 - DNA, 1303 bp, Homo sapiens
  source 1..1303: mol_type = unassigned DNA
gtggcttttccctaacttgacccttctttcagtgggagggaactattgagaggaacaaagagcttataaatacattaggacctggaattcggttgtccagccacaaaggtgacagcatttaacaaagcttagagaaacctccaggagactgctaccatggcagagaagcccaagctccactactccaatatacggggcagaatggagtccatccggtggctcctggctgcagctggagtagagtttgaagagaaatttataaaatctgcagaagatttggacaagttaagaaatgatggatatttgatgttccagcaagtgccaatggttgagattgatgggatgaagctggtgcagaccagagccattctcaactacattgccagcaaatacaacctctatgggaaagacataaaggagaaagccctgattgatatgtatatagaaggtatagcagatttgggtgaaatgatccttcttctgccctttagtcaacctgaggaacaagatgccaagcttgccttgatccaagagaaaacaaaaaatcgctacttccctgcctttgaaaaagtcttaaagagccacggacaagactaccttgttggcaacaagctgagccgggctgacattcacctggtggaacttctctactacgtggaagagcttgactctagccttatttccagcttccctctgctgaaggccctgaaaaccagaatcagtaacctgcccacagtgaagaagtttctacagcctggcagcccaaggaagcctcccatggatgagaaatctttagaagaatcaaggaagattttcaggttttaataaaccagccatagaggtcaagaacatgcaagaccagtattctaaagttttgcaacaattaagtgctttacctaagtgttgattgtgcctgttgtgaagctaatgaactctttcaaattatatgctaattaaataatacaactcctattcacccacttagttaaaattgatttcttctcattaggatctgatgtgaattcagttttccaatctcctcctagccaacaattttcttggaattacaaattcagtaaaaatggaaactataaattatgtggtttgtttgacttttccaagaattgccctgtaacatacaatttgtcatacaatctattaaaatgccaatgtaaaaatgcacctctgacattttcaggtatgcacaggagaagagttaccatcctggataatggcataaagacattttcttcttttcctgaacagtcattttatttctgataaaagcattctttctaatgca

SEQ ID NO: 12435 - DNA, 902 bp, Homo sapiens
  source 1..902: mol_type = unassigned DNA
ggtggccttgagaagctgagcggagaccggctagactttactcaaagaaaccaagagactgttaccatggcagggaagcccaagcttcactacttcaatggacggggcagaatggagcccatccggtggctcttggctgcagctggagtggagtttgaagagaaatttataggatctgcagaagatttgggaaagttaagaaatgatgggagtttgatgttccagcaagtaccaatggttgagattgatgggatgaagttggtacagaccagagccattctcaactacattgccagcaaatacaacctctacgggaaagacataaaggagagagccctaattgatatgtatacagaaggtatggcagatttgaatgaaatgatccttcttctgcccttatgtcgacctgaggaaaaagatgccaagattgccttgatcaaagagaaaacaaaaagtcgctatttccctgccttcgaaaaagtgttacagagccatggacaagactaccttgttggcaacaagctgagccgggctgacattagcctggtggaacttctctactatgtggaagagcttgactccagccttatctccaacttccctctgctgaaggccctgaaaaccagaatcagcaacctgcccacggtgaagaagtttctacagcctggcagcccaaggaagcctcccgcagatgcaaaagctttagaagaagccagaaagattttcaggttttaataaagcagccatggaggctaagaacatgcaagaccaatattctaaagttttgcaacaatgaagtgctttacttaagtgttgattgtgcctgttgtaaagctaatgaaccctttccaattatatgctaattaaataataaaaactcctatttgctaacttagttaaaa

SEQ ID NO: 12436 - DNA, 775 bp, Homo sapiens
  source 1..775: mol_type = unassigned DNA
gcggagaccggctagactttactcaatttgaagagaaatttataggatctgcagaagatttgggaaagttaagaaatgatgggagtttgatgttccagcaagtaccaatggttgagattgatgggatgaagttggtacagaccagagccattctcaactacattgccagcaaatacaacctctacgggaaagacataaaggagagagccctaattgatatgtatacagaaggtatggcagatttgaatgaaatgatccttcttctgcccttatgtcgacctgaggaaaaagatgccaagattgccttgatcaaagagaaaacaaaaagtcgctatttccctgccttcgaaaaagtgttacagagccatggacaagactaccttgttggcaacaagctgagccgggctgacattagcctggtggaacttctctactatgtggaagagcttgactccagccttatctccaacttccctctgctgaaggccctgaaaaccagaatcagcaacctgcccacggtgaagaagtttctacagcctggcagcccaaggaagcctcccgcagatgcaaaagctttagaagaagccagaaagattttcaggttttaataaagcagccatggaggctaagaacatgcaagaccaatattctaaagttttgcaacaatgaagtgctttacttaagtgttgattgtgcctgttgtaaagctaatgaaccctttccaattatatgctaattaaataataaaaactcctatttgctaacttagttaaaa

SEQ ID NO: 12437 - DNA, 411 bp, Homo sapiens
  source 1..411: mol_type = unassigned DNA
cccaagcttcactacttcaatggacggggcagaatggagcccatccggtggctcttggctgcagctggagtggagatgggagtttgatgttccagcaagtaccaatggttgagattgatgggatgaagttggtacagaccagagccattctcaactacattgccagcaaatacaacctctacgggaaagacataaaggagagagccctaattgatatgtatacagaaggtatggcagatttgaatgaaatgatccttcttctgcccttatgtcgacctgaggaaaaagatgccaagattgccttgatcaaagagaaaacaaaaagtcgctatttccctgccttcgaggctgacattagcctggtggaacttctctactatgtggaagagcttgactccagccttatctcca

SEQ ID NO: 12438 - DNA, 793 bp, Homo sapiens
  source 1..793: mol_type = unassigned DNA
ctcactctcgcattcttccctcactcccccagttcagtccttctcttgtcttttcttcctcttgtcctttgtcctcctgctccatccagtctgggcagagaaagcctgaaaagctatcatggcagcaaggcccaagctccactatcccaacggaagaggccggatggagtccgtgagatgggttttagctgccgccggagtcgagtttgatgaagaatttctggaaacaaaagaacagttgtacaagttgcaggatggtaaccacctgctgttccaacaagtgcccatggttgaaattgacgggatgaagttggtacagacccgaagcattctccactacatagcagacaagcacaatctctttggcaagaacctcaaggagagaaccctgattgacatgtacgtggaggggacactggatctgctggaactgcttatcatgcatcctttcttaaaaccagatgatcagcaaaaggaagtggttaacatggcccagaaggctataattagatactttcctgtgtttgaaaagattttaaggggtcacggacaaagctttcttgttggtaatcagctgagccttgcagatgtgattttactccaaaccattttagctctagaagagaaaattcctaatatcctgtctgcatttcctttcctccaggaatacacagtgaaactaagtaatatccctacaattaagagattccttgaacctggcagcaagaagaagcctccccctgatgaaatttatgtgagaaccgtctacaacatctttaggccataaaacaac

SEQ ID NO: 12439 - DNA, 859 bp, Homo sapiens
  source 1..859: mol_type = unassigned DNA
agtgagggaaaatgcagcaacaaaaataaagaacagtttcccgtgccaaaatcctgaatattcatttcgcccctgagcactgggttgaagacgcgaaattgggactgttggtctgcgacgagctgctgcatttgtatttcagaaagcctgaaaagctatcatggcagcaaggcccaagctccactatcccaacggaagaggccggatggagtccgtgagatgggttttagctgccgccggagtcgaggattgacatgtacgtggaggggacactggatctgctggaactgcttatcatgcatcctttcttaaaaccagatgatcagcaaaaggaagtggttaacatggcccagaaggctataattagatactttcctgtgtttgaaaagattttaaggggtcacggacaaagctttcttgttggtaatcagctgagccttgcagatgtgattttactccaaaccattttagctctagaagagaaaattcctaatatcctgtctgcatttcctttcctccaggaatacacagtgaaactaagtaatatccctacaattaagagattccttgaacctggcagcaagaagaagcctccccctgatgaaatttatgtgagaaccgtctacaacatctttaggccataaaacaacacatccatgtgtgagtgacagtgtgttcctagagatggtattgtctacagtcatgtcttaatggatcccagctctgtcatggtgctatctatgtattaagttgggtcctaagttgggtcttttgtgtcaacgagatcatctcttctagaaatatcaaccttttttgtccagtaaataattgttaggggatctttattggaaaacttttt

SEQ ID NO: 12440 - DNA, 1334 bp, Homo sapiens
  source 1..1334: mol_type = unassigned DNA
agtctccattggtgaggtcgtcccggagcctcgcccagctcccgcgcgctagagccgcctgctggtctcacccagccgggaccgctgacctggcgctttgtgcggctccaggcctccgagtggactccagaaagcctgaaaagctatcatggcagcaaggcccaagctccactatcccaacggaagaggccggatggagtccgtgagatgggttttagctgccgccggagtcgagtttgatgaagaatttctggaaacaaaagaacagttgtacaagttgcaggatggtaaccacctgctgttccaacaagtgcccatggttgaaattgacgggatgaagttggtacagacccgaagcattctccactacatagcagacaagcacaatctctttggcaagaacctcaaggagagaaccctgattgacatgtacgtggaggggacactggatctgctggaactgcttatcatgcatcctttcttaaaaccagatgatcagcaaaaggaagtggttaacatggcccagaaggctataattagatactttcctgtgtttgaaaagattttaaggggtcacggacaaagctttcttgttggtaatcagctgagccttgcagatgtgattttactccaaaccattttagctctagaagagaaaattcctaatatcctgtctgcatttcctttcctccaggaatacacagtgaaactaagtaatatccctacaattaagagattccttgaacctggcagcaagaagaagcctccccctgatgaaatttatgtgagaaccgtctacaacatctttaggccataaaacaacacatccatgtgtgagtgacagtgtgttcctagagatggtattgtctacagtcatgtcttaatggatcccagctctgtcatggtgctatctatgtattaagttgggtcctaagttgggtcttttgtgtcaacgagatcatctcttctagaaatatcaaccttttttgtccagtaaataattgttaggggatctttattggaaaacttttttggagaggctggtatttaagttagatctgattgggctactcatgtcctgtagccagttcatcctcataataagaatgggcaggatctcttgttctctcctgagtgtctttctactctcctgagcgtctttctgctctccttatcctgttctcttatccttatcccctccagtctctgcctaatttttagtgtttaataacaaccgaatgtctagtaaatgactctcctctgagctgtaataaataaaatggtagtaatgaatgcaatcagtattagccaaaataaagaatttatgagtcatt

SEQ ID NO: 12441 - DNA, 379 bp, Homo sapiens
  source 1..379: mol_type = unassigned DNA
aaagcctgaaaagctatcatggcagcaaggcccaagctccactatcccaacggaagaggccggatggagtccgtgagatgggttttagctgccgccggagtcgaggattgacatgtacgtggaggggacactggatctgctggaactgcttatcatgcatcctttcttaaaaccagatgatcagcaaaaggaagtggttaacatggcccagaaggctataattagatactttcctgtgtttgaaaagattttaaggggtcacggacaaagctttcttgttggtaatcagctgagccttgcagatgtgattttactccaaaccattttagctctagaagagaaaattcctaatatcctgtctgcatttcctttcctccag

SEQ ID NO: 12442 - DNA, 1170 bp, Homo sapiens
  source 1..1170: mol_type = unassigned DNA
aattgggactgttggtctgcgacgagctgctgcatttgtatttcagaaagcctgaaaagctatcatggcagcaaggcccaagctccactatcccaacggaagaggccggatggagtccgtgagatgggttttagctgccgccggagtcgaggtaaccacctgctgttccaacaagtgcccatggttgaaattgacgggatgaagttggtacagacccgaagcattctccactacatagcagacaagcacaatctctttggattgacatgtacgtggaggggacactggatctgctggaactgcttatcatgcatcctttcttaaaaccagatgatcagcaaaaggaagtggttaacatggcccagaaggctataattagatactttcctgtgtttgaaaagattttaaggggtcacggacaaagctttcttgttggtaatcagctgagccttgcagatgtgattttactccaaaccattttagctctagaagagaaaattcctaatatcctgtctgcatttcctttcctccaggaatacacagtgaaactaagtaatatccctacaattaagagattccttgaacctggcagcaagaagaagcctccccctgatgaaatttatgtgagaaccgtctacaacatctttaggccataaaacaacacatccatgtgtgagtgacagtgtgttcctagagatggtattgtctacagtcatgtcttaatggatcccagctctgtcatggtgctatctatgtattaagttgggtcctaagttgggtcttttgtgtcaacgagatcatctcttctagaaatatcaaccttttttgtccagtaaataattgttaggggatctttattggaaaacttttttggagaggctggtatttaagttagatctgattgggctactcatgtcctgtagccagttcatcctcataataagaatgggcaggatctcttgttctctcctgagtgtctttctactctcctgagcgtctttctgctctccttatcctgttctcttatccttatcccctccagtctctgcctaatttttagtgtttaataacaaccgaatgtctagtaaatgactctcctctgagctgtaataaataaaatggtagtaatgaatgcaatcagtattagccaaaataaagaatttatgagtc

SEQ ID NO: 12443 - DNA, 845 bp, Homo sapiens
  source 1..845: mol_type = unassigned DNA
agttgcccagccacgacagtgacagagtttaacaaactaagcttagagaaacctccaggagactgctatcatggcagagaagcccaagctccactactccaatgcacggggcagtatggagtccattcggtggctcctggctgcagctggagtagagttggaagagaaatttctagaatctgcagaagatttggacaagttaagaaatgatgggagtttgctgttccagcaagtaccaatggttgagattgacgggatgaagctggtgcagaccagagccattcttaactacattgccagcaaatacaacctttatgggaaagacatgaaggagagagccctgattgatatgtacacagaaggtatagtagatttgactgaaatgatccttcttctgctcatatgtcaaccagaggaaagagatgccaagactgccttggtcaaagagaaaataaaaaatcgctacttccctgcctttgaaaaagtcttaaagagccacagacaagactaccttgttggcaacaagctgagctgggctgacattcacctggtggaacttttctactacgtggaagagcttgactcgagtcttatctccagcttccctctgctgaaggccctgaaaaccagaatcagcaacctgcccacggtgaagaagtttctgcagcctggcagccagagaaagcctcccatggatgagaaatctttagaagaagcaaggaagattttcaggttttaataaagcagctatggaggccaagaacatgccagaccaatattctacagtttgcaacaatgaagtgctttacctaagtgtggattgtgcctcttgtaaagctaataaa

SEQ ID NO: 12444 - DNA, 1021 bp, Homo sapiens
  source 1..1021: mol_type = unassigned DNA
gtgggttttccctaacttgacctttctcctttcagtgggagggaactattgaaaggaacaaagagcttataaatacattaagacctggaattcagttgcccagccacgacagtgacagagtttaacaaagcttagagaaacctccaggagactgctatcatggcagagaagcccaagctccactactccaatgcacggggcagtatggagtccattcggtggctcctggctgcagctggagtagagttggaagagaaatttctagaatctgcagaagatttggacaagttaagaaatgatgggagtttgctgttccagcaagtaccaatggttgagattgacgggatgaagctggtgcagaccagagccattcttaactacattgccagcaaatacaacctttatgggaaagacatgaaggagagagccctgattgatatgtacacagaaggtatagtagatttgactgaaatgatccttcttctgctcatatgtcaaccagaggaaagagatgccaagactgccttggtcaaagagaaaataaaaaatcgctacttccctgcctttgaaaaagtcttaaagagccacagacaagactaccttgttggcaacaagctgagctgggctgacattcacctggtggaacttttctactacgtggaagagcttgactcgagtcttatctccagcttccctctgctgaaggccctgaaaaccagaatcagcaacctgcccacggtgaagaagtttctgcagcctggcagccagagaaagcctcccatggatgagaaatctttagaagaagcaaggaagattttcaggttttaataaagcagctatggaggccaagaacatgccagaccaatattctacagtttgcaacaatgaagtgctttacctaagtgtggattgtgcctcttgtaaagctaataaactctttccaattacatgctaattaaataataaataactcttatctgtcaacttagctaaaattgatttgttttcattagtatctgat

SEQ ID NO: 12445 - DNA, 1131 bp, Homo sapiens
  source 1..1131: mol_type = unassigned DNA
gcggaatccgcaccaaccagcaccatgcccatgatactggggtactgggacatccgcgggctggcccacgccatccgcctgctcctggaatacacagactcaagctatgaggaaaagaagtacacgatgggggacgctcctgattatgacagaagccagtggctgaatgaaaaattcaagctgggcctggactttcccaatctgccctacttgattgatggggctcacaagatcacccagagcaacgccatcttgtgctacattgcccgcaagcacaacctgtgtggggagacagaagaggagaagattcgtgtggacattttggagaaccagaccatggacaaccatatgcagctgggcatgatctgctacaatccagaatttgagaaactgaagccaaagtacttggaggaactccctgaaaagctaaagctctactcagagtttctggggaagcggccatggtttgcaggaaacaagatcacttttgtagattttctcgtctatgatgtccttgacctccaccgtatatttgagcccaagtgcttggacgccttcccaaatctgaaggacttcatctcccgctttgagggcttggagaagatctctgcctacatgaagtccagccgcttcctcccaagacctgtgttctcaaagatggctgtctggggcaacaagtagggccttgaaggccaggaggtgggagtgaggagcccatactcagcctgctgcccaggctgtgcagcgcagctggactctgcatcccagcacctgcctcctcgttcctttctcctgtttattcccatctttactcccaagacttcattgtccctcttcactccccctaaacccctgtcccatgcaggccctttgaagcctcagctacccactatccttcgtgaacatcccctcccatcattacccttccctgcactaaagccagcctgaccttccttcctgttagtggttgtgtctgctttaaagggcctgcctggcccctcgcctgtggagctcagccccgagctgtccccgtgttgcatgaaggagcagcattgactggtttacaggccctgctcctgcagcatggtccctgccttaggcctacctgatggaagtaaagcctcaaccaca

SEQ ID NO: 12446 - DNA, 1028 bp, Homo sapiens
  source 1..1028: mol_type = unassigned DNA
aggcctgtctgcggaatccgcaccaaccagcaccatgcccatgatactggggtactgggacatccgcgggctggcccacgccatccgcctgctcctggaatacacagactcaagctatgaggaaaagaagtacacgatgggggacgctcctgattatgacagaagccagtggctgaatgaaaaattcaagctgggcctggactttcccaatctgccctacttgattgatggggctcacaagatcacccagagcaacgccatcttgtgctacattgcccgcaagcacaacctgtgtggggagacagaagaggagaagattcgtgtggacattttggagaaccagaccatggacaaccatatgcagctgggcatgatctgctacaatccagaatttgagaaactgaagccaaagtacttggaggaactccctgaaaagctaaagctctactcagagtttctggggaagcggccatggtttgcaggaaacaagggcttggagaagatctctgcctacatgaagtccagccgcttcctcccaagacctgtgttctcaaagatggctgtctggggcaacaagtagggccttgaaggccaggaggtgggagtgaggagcccatactcagcctgctgcccaggctgtgcagcgcagctggactctgcatcccagcacctgcctcctcgttcctttctcctgtttattcccatctttactcccaagacttcattgtccctcttcactccccctaaacccctgtcccatgcaggccctttgaagcctcagctacccactatccttcgtgaacatcccctcccatcattacccttccctgcactaaagccagcctgaccttccttcctgttagtggttgtgtctgctttaaagggcctgcctggcccctcgcctgtggagctcagccccgagctgtccccgtgttgcatgaaggagcagcattgactggtttacaggccctgctcctgcagcatggtccctgccttaggcctacctgatggaagtaaagcctcaacca

SEQ ID NO: 12447 - DNA, 700 bp, Homo sapiens
  source 1..700: mol_type = unassigned DNA
cgcaccaaccagcaccatgcccatgatactggggtactgggacatccgcgggctggcccacgccatccgcctgctcctggaatacacagactcaagctatgaggaaaagaagtacacgatgggggacgctcctgattatgacagaagccagtggctgaatgaaaaattcaagctgggcctggactttcccaatctgccctacttgattgatggggctcacaagatcacccagagcaacgccatcttgtgctacattgcccgcaagcacaacctgtgtggggagacagaagaggagaagattcgtgtggacattttggagaaccagaccatggacaaccatatgcagctgggcatgatctgctacaatccagaatttggcttggagaagatctctgcctacatgaagtccagccgcttcctcccaagacctgtgttctcaaagatggctgtctggggcaacaagtagggccttgaaggccaggaggtgggagtgaggagcccatactcagcctgctgcccaggctgtgcagcgcagctggactctgcatcccagcacctgcctcctcgttcctttctcctgtttattcccatctttactcccaagacttcattgtccctcttcactccccctaaacccctgtcccatgcaggccctttgaagcctcagctacccactatccttcgtgaacatcccctccca

SEQ ID NO: 12448 - DNA, 850 bp, Homo sapiens
  source 1..850: mol_type = unassigned DNA
ctgctcggtttaggcctgtctgcggaatccgcaccaaccagcaccatgcccatgatactggggtactgggacatccgcgggctggcccacgccatccgcctgctcctggaatacacagactcaagctatgaggaaaagaagtacacgatgggggacgctcctgattatgacagaagccagtggctgaatgaaaaattcaagctgggcctggactttcccaatgggatgctggggagcctggtggcccaactgagcttcgccggtttcccatccatccagctgccctacttgattgatggggctcacaagatcacccagagcaacgccatcttgtgctacattgcccgcaagcacaacctgtgtggggagacagaagaggagaagattcgtgtggacattttggagaaccagaccatggacaaccatatgcagctgggcatgatctgctacaatccagaatttgagaaactgaagccaaagtacttggaggaactccctgaaaagctaaagctctactcagagtttctggggaagcggccatggtttgcaggaaacaagatcacttttgtagattttctcgtctatgatgtccttgacctccaccgtatatttgagcccaagtgcttggacgccttcccaaatctgaaggacttcatctcccgctttgagggcttggagaagatctctgcctacatgaagtccagccgcttcctcccaagacctgtgttctcaaagatggctgtctggggcaacaagtagggccttgaaggccaggaggtgggagtgaggagcccatactcagcctgctgcccaggctgtgcagcgcagctggactctgcatcccagcacc

SEQ ID NO: 12449 - DNA, 1121 bp, Homo sapiens
  source 1..1121: mol_type = unassigned DNA
cagcaaccagcaccatgcccatgacactggggtactggaacatccgcgggctggcccattccatccgcctgctcctggaatacacagactcaagctacgaggaaaagaagtacacgatgggggacgctcctgattatgacagaagccagtggctgaatgaaaaattcaagctgggcctggactttcccaatctgccctacttgattgatgggactcacaagatcacccagagcaacgccatcctgcggtacattgcccgcaagcacaacctgtgcggggaatcagaaaaggagcagattcgcgaagacattttggagaaccagtttatggacagccgtatgcagctggccaaactctgctatgacccagattttgagaaactgaaaccagaatacctgcaggcactccctgaaatgctgaagctctactcacagtttctggggaagcagccatggtttcttggggacaagatcacctttgtggatttcatcgcttatgatgtccttgagagaaaccaagtatttgagcccagctgcctggatgccttcccaaacctgaaggacttcatctcccgatttgagggcttggagaagatctctgcctacatgaagtccagccgcttcctcccaagacctgtgttcacaaagatggctgtctggggcaacaagtagggccttgaaggccaggaggtgggagtgaggagcccatactcagcctgctgcccaggctgtgcagcgcagctggactctgcatcccagcacctgcctcctcgttcctttctcctgtttattcccatctttactcccaagacttcattgtccctcttcactccccctaaacccctgtcccatgcaggccctttgaagcctcagctacccactatccttcgtgaacatcccctcccatcattacccttccctgcactaaagccagcctgaccttccttcctgttagtggttgtgtctgctttaaagggcctgcctggcccctcgcctgtggagctcagccccgagctgtccccgtgttgcatgaaggagcagcattgactggtttacaggccctgctcctgcagcatggtccctgccttaggcctacctgatggaagtaaagcctcaaccaca

SEQ ID NO: 12450 - DNA, 1087 bp, Homo sapiens
  source 1..1087: mol_type = unassigned DNA
agcaaggcttcccctctaccctctctgggcctctcacaaacgctgagccccgccccgctgaggcctgtctgcagaatccacagcaaccagcaccatgcccatgacactggggtactggaacatccgcgggctggcccattccatccgcctgctcctggaatacacagactcaagctacgaggaaaagaagtacacgatgggggacgctcctgattatgacagaagccagtggctgaatgaaaaattcaagctgggcctggactttcccaatctgccctacttgattgatgggactcacaagatcacccagagcaacgccatcctgcggtacattgcccgcaagcacaacctgtgcggggaatcagaaaaggagcagattcgcgaagacattttggagaaccagtttatggacagccgtatgcagctggccaaactctgctatgacccagattttgagaaactgaaaccagaatacctgcaggcactccctgaaatgctgaagctctactcacagtttctggggaagcagccatggtttcttggggacaagggcttggagaagatctctgcctacatgaagtccagccgcttcctcccaagacctgtgttcacaaagatggctgtctggggcaacaagtagggccttgaaggccaggaggtgggagtgaggagcccatactcagcctgctgcccaggctgtgcagcgcagctggactctgcatcccagcacctgcctcctcgttcctttctcctgtttattcccatctttactcccaagacttcattgtccctcttcactccccctaaacccctgtcccatgcaggccctttgaagcctcagctacccactatccttcgtgaacatcccctcccatcattacccttccctgcactaaagccagcctgaccttccttcctgttagtggttgtgtctgctttaaagggcctgcctggcccctcgcctgtggagctcagccccgagctgtccccgtgttgcatgaaggagcagcattgactggtttacaggccctgctcctgcagcatggtccctgccttaggcctacctgatggaagtaaagcctcaacc

SEQ ID NO: 12451 - DNA, 982 bp, Homo sapiens
  source 1..982: mol_type = unassigned DNA
gtctgcagaatccacagcaaccagcaccatgcccatgacactggggtactggaacatccgcgggctggcccattccatccgcctgctcctggaatacacagactcaagctacgaggaaaagaactcctgattatgacagaagccagtggctgaatgaaaaattcaagctgggcctggactttcccaatctgccctacttgattgatgggactcacaagatcacccagagcaacgccatcctgcggtacattgcccgcaagcacaacctgtgcggggaatcagaaaaggagcagattcgcgaagacattttggagaaccagtttatggacagccgtatgcagctggccaaactctgctatgacccagattttgagaaactgaaaccagaatacctgcaggcactccctgaaatgctgaagctctactcacagtttctggggaagcagccatggtttcttggggacaagatcacctttgtggatttcatcgcttatgatgtccttgagagaaaccaagtatttgagcccagctgcctggatgccttcccaaacctgaaggacttcatctcccgatttgagcattcctgatgtttggattcaggctgcttccctcatccctgctgctcctgatccccgtccacagacccactttccccgctggtgtgatccttgtggccactatggcagctactttggagagccgctagtccagtccttcccgccttccgcagagctctactcctgcttctgaagaagccacctggggcctggccttcttcctggctcctcagagtccttgcaacagcaggcactacttctctctcctgcactcaacccctctcccactccactgcctctcagtgtgccaaaacacgaagatgtgtcctgattttcaaaatctctcccctgaagttcccacctgatatgtagttggagatgggcaaatacagcgtccttgaagcatcattttattcatagtgcct

SEQ ID NO: 12452 - DNA, 1478 bp, Homo sapiens
  source 1..1478: mol_type = unassigned DNA
agcaaggcttcccctctaccctctctgggcctctcacaaacgctgagccccgccccgctgaggcctgtctgcagaatccacagcaaccagcaccatgcccatgacactggggtactggaacatccgcgggctggcccattccatccgcctgctcctggaatacacagactcaagctacgaggaaaagaagtacacgatgggggacgctcctgattatgacagaagccagtggctgaatgaaaaattcaagctgggcctggactttcccaatctgccctacttgattgatgggactcacaagatcacccagagcaacgccatcctgcggtacattgcccgcaagcacaacctgtgcggggaatcagaaaaggagcagattcgcgaagacattttggagaaccagtttatggacagccgtatgcagctggccaaactctgctatgacccagattttgagaaactgaaaccagaatacctgcaggcactccctgaaatgctgaagctctactcacagtttctggggaagcagccatggtttcttggggacaagatcacctttgtggatttcatcgcttatgatgtccttgagagaaaccaagtatttgagcccagctgcctggatgccttcccaaacctgaaggacttcatctcccgatttgagcattcctgatgtttggattcaggctgcttccctcatccctgctgctcctgatccccgtccacagacccactttccccgctggtgtgatccttgtggccactatggcagctactttggagagccgctagtccagtccttcccgccttccgcagagctctactcctgcttctgaagaagccacctggggcctggccttcttcctggctcctcagagtccttgcaacagcaggcactacttctctctcctgcactcaacccctctcccactccactgcctctcagtgtgccaaaacacgaagatgtgtcctgattttcaaaatctctcccctgaagttcccacctgatatgtagttggagatgggcaaatacagcgtccttgaagcatcattttattcatagtgcctggaatgtagtaggatctcgacaattgttgtttcaataaaggaatgaccaaatatattaatactgtaaaaagtaaagtagaggttcctcttcaaagagacttttctccccatctaattaagaataagtcgtaacttctcttagaagcaaaatttattcaaagaccggtgctgatattctgaaatatctgctagctgtaataaagaaattaatgtactttatgttcttaactcccacaatttagcctaaatacttgccctggcatgcttatactgatccaaacaagcatgaggtcatagcctgttcctcttccttatttgaaggtgtttttaccttactcagcattccacaagtgagttcccccttcctttgttctcctctgcctctgcctcttttaaaaagttctaagttgcta

SEQ ID NO: 12453 - DNA, 1443 bp, Homo sapiens
  source 1..1443: mol_type = unassigned DNA
acaaacgctgagccccgccccgctgaggcctgtctgcagaatccacagcaaccagcaccatgcccatgacactggggtactggaacatccgcgggctggcccattccatccgcctgctcctggaatacacagactcaagctacgaggaaaagaagtacacgatgggggacgctcctgattatgacagaagccagtggctgaatgaaaaattcaagctgggcctggactttcccaatctgccctacttgattgatgggactcacaagatcacccagagcaacgccatcctgcggtacattgcccgcaagcacaacctgtgcggggaatcagaaaaggagcagattcgcgaagacattttggagaaccagtttatggacagccgtatgcagctggccaaactctgctatgacccagattttgagaaactgaaaccagaatacctgcaggcactccctgaaatgctgaagctctactcacagtttctggggaagcagccatggtttcttggggacaagatcacctttgtggatttcatcgcttatgatgtccttgagagaaaccaagtatttgagcccagctgcctggatgccttcccaaacctgaaggacttcatctcccgatttgagcattcctgatgtttggattcaggctgcttccctcatccctgctgctcctgatccccgtccacagacccactttccccgctggtgtgatccttgtggccactatggcagctactttggagagccgctagtccagtccttcccgccttccgcagagctctactcctgcttctgaagaagccacctggggcctggccttcttcctggctcctcagagtccttgcaacagcaggcactacttctctctcctgcactcaacccctctcccactccactgcctctcagtgtgccaaaacacgaagatgtgtcctgattttcaaaatctctcccctgaagttcccacctgatatgtagttggagatgggcaaatacagcgtccttgaagcatcattttattcatagtgcctggaatgtagtaggatctcgacaattgttgtttcaataaaggaatgaccaaatatattaatactgtaaaaagtaaagtagaggttcctcttcaaagagacttttctccccatctaattaagaataagtcgtaacttctcttagaagcaaaatttattcaaagaccggtgctgatattctgaaatatctgctagctgtaataaagaaattaatgtactttatgttcttaactcccacaatttagcctaaatacttgccctggcatgcttatactgatccaaacaagcatgaggtcatagcctgttcctcttccttatttgaaggtgtttttacctttctcagcgttccacaagtgagttcccccttcctttgttctcctctgcctctgcctcttttaaaaagttctaagttgcta

SEQ ID NO: 12454 - DNA, 4046 bp, Homo sapiens
  source 1..4046: mol_type = unassigned DNA
tgcagcactcctgcccgggtcccgcctcggggtcgccaggccctgaaccccaacgccggcattagtcgcgcctgcgcacggccctgtggagccgcggaggcaagggacggagaacggggcggaggcggagtcagggcgcccgcgcgtgggccccgcccccttatgtcgggtataaagcccctcccgctcacagtttccctagtcctcgaaggctcggaagcccgtcaccatgtcgtgcgagtcgtctatggttctcgggtactgggatattcgtgggctggcgcacgccatccgcctgctcctggagttcacggatacctcttatgaggagaaacggtacacgtgcggggaagctcctgactatgatcgaagccaatggctggatgtgaaattcaagctagacctggactttcctaatctgccctacctcctggatgggaagaacaagatcacccagagcaatgccatcttgcgctacatcgctcgcaagcacaacatgtgtggtgagactgaagaagaaaagattcgagtggacatcatagagaaccaagtaatggatttccgcacacaactgataaggctctgttacagctctgaccacgaaaaactgaagcctcagtacttggaagagctacctggacaactgaaacaattctccatgtttctggggaaattctcatggtttgccggggaaaagctcacctttgtggattttctcacctatgatatcttggatcagaaccgtatatttgaccccaagtgcctggatgagttcccaaacctgaaggctttcatgtgccgttttgaggctttggagaaaatcgctgcctacttacagtctgatcagttctgcaagatgcccatcaacaacaagatggcccagtggggcaacaagcctgtatgctgagcaggaggcagacttgcagagcttgttttgtttcatcctgtccgtaaggggtcagcgctcttgctttgctcttttcaatgaatagcacttatgttactggtgtccagctgagtttctcttgggtataaaggctaaaagggaaaaaggatatgtggagaatcatcaagatatgaattgaatcgctgcgatactggcatttccctactccccaactgagttcaagggctgtaggttcatgcccaagccctgagagtgggtactagaaaaaacgagattgcacagttggagagagcaggtgtgttaaatgggactggagtccctgtgaagactgggtgaggataacacaagtaaaactgtggtactgatggacttaaccggagttcggaaaccgtcctgtgtacacatgggagtttagtgtgataaaggcagtatttcagactggtgggctagccaatagagttgggacaattgcttactcattaaaaataatagagccccacttgacactattcactaaaattaatctggaatttaaggcccaacattaaacacaaagctgttgaaatattgatgaaaatgtaagaatttttgtgaccacggggtaggagaagtttctttaaagacgtaaaaagaaaaaaaccataggctgctctgcctgtggagtagccattctttattcttttactttttaaaataataacaatcacaaaggaaagatttgccaattgaataggatcaaattctacaacttttcctaaggcacccacaaataaatgacaagtgagacaaaaagcactagtataaagattatataaagacctataaatcattaagacaactgagtttttaaaaatggacaaaatccatgaacaatttataaaatagaaatatagccaaaaatgtctaaaagatgtttatgatgtaaggaattatcaattacaacagtgagaaaccatatttccttctatccgatgagtaaaaagtttctaaagtgttggcaaggcttaggaaagtgatatgcatttcctgctggtcaagttgtaaattagtatagctactttggaggacaattgtaaaatttaaatcatatcctatgacccagcaattccatgctataaaaactcatccatggccgggcttggtggctcacgcctgtaatcccagcactttgggaggctgaggtgggcagatcacgaggtcaagagatcgagaccatcctggccaacatgatgaaaccccgtttctactaaaaatacaaaaattagctgggcatggtggcatgtgcctatagtcccagctactcaggaggctgaggcaggagaattgcttgaacctgggaggcagaggttgcagtgagccgagatcacgccactgcactccagcctggctacagggcgagactctgtctcaaaaaaaaaaaaaaaaaaaaaaaaaaaacattcaaagagacatatactaagatgttcactgtggcattgtctgtaatgacaaataagtggaaaccgtgtaaatacctgtcaatactatggagtaccatgtggcaacggaagaatgagactgaactgtgtgaactaacatgcaaagatccccaaaacaggccaggtgtggttgctcacagctgtaataacaacaccttcagaggctgaggtgagaggatcagttgaggccaggagtttaagaccagcctgggcaacatagtgagacccctgtctcccaaaaattttttttaattagctgtgcgcaattgctcatgcatagtcccagctacccaggaggctgaggtgggaggatcacttgagcccaggaatttgaagctgcagtgagctgtgttcttgccactgcactccaatctgggtgactgagcaagaccctgtctcttaaaaaaataaaaaagatctccaagcatagagaagagtctggagggaaacaccaaactcataacagtcttactgcaggcaagtgggataaaggcccagactccatggtggaagttaaagggcatttccaagttaaggctaagacttgcttttctaactaagagaatgtgctcatgcattgcttgtgtagtagaaactagtttttagaaaagaaagcaaacttaagaaacactgactcctgtggagatgacttggcaccactctcctttcacagagcagagtctgaatagtcttcagagataggcctgtgggccagattgccatcccctatggaccagaagccaaggatctctctagtgatggtcagagggcccaaatggcagggatacccagtgatgtcaggaggaatagtacagacagaaggtgctaagcagacaattcaactgccatgttttgccaccccctgtgagcagggattaggtgttcaggccagtatcttgggcatgggggagcctttggccagaagaggtataaagctcagaagtttttcagtctgataactattgatataatttccatagtgtgagggagcggtatgctctacccttgtgtatttaaggcaggacagagaaattgaggatgcccctggggctagatcgatgatatgaccagaaatcaaaaagggaatgcattatttattgctgtgtaacactgttaagagaggaggtagttaagggatggataggcacatagagagggaaggtctcaggagaagggatagaaaggaactatgttcacaagaacaacggcaagacagtgcctatactgcctctacagttaataggaaaaacggaagaagttacccttaagctaggatgttgctcagaagtgaccatcccaactttggtgcgggcacaataaatcagcctaaatgtccctaatttaacccagctcattataatgtcattaaacatgacattagcattgtggttttagcacccccatgggttttgcttaggcactcatgggtaataaccaagatggagtccctttggcaaaacttaggcatgcacagctgtagtaccccaagaagaaaatgttacttctctcatctgggcaaaacccacagaagacttcccagcttctgccacataaaagacacagaacacagacgccttactggcaacctgctttcaagacccctgtctttgctgagagctttcctttttcccaataaattctactctgccctactcactctc

SEQ ID NO: 12455 - DNA, 1557 bp, Homo sapiens
  source 1..1557: mol_type = unassigned DNA
ggttggttctgagaaggcttcaaggaataggcagacatttcagcaaggctgctgaggaaggataggctgtggaaattaggatgcagcactcctgcccgggtcccgcctcggggtcgccaggccctgaaccccaacgccggcattagtcgcgcctgcgcacggccctgtggagccgcggaggcaagggacggagaacggggcggaggcggagtcagggcgcccgcgcgtgggccccgcccccttatgtcgggtataaagcccctcccgctcacagtttccctagtcctcgaaggctcggaagcccgtcaccatgtcgtgcgagtcgtctatggttctcgggtactgggatattcgtgggctggcgcacgccatccgcctgctcctggagttcacggatacctcttatgaggagaaacggtacacgtgcggggaagctcctgactatgatcgaagccaatggctggatgtgaaattcaagctagacctggactttcctaatctgccctacctcctggatgggaagaacaagatcacccagagcaatgccatcttgcgctacatcgctcgcaagcacaacatgtgtggtgagactgaagaagaaaagattcgagtggacatcatagagaaccaagtaatggatttccgcacacaactgataaggctctgttacagctctgaccacgaaaaactgaagcctcagtacttggaagagctacctggacaactgaaacaattctccatgtttctggggaaattctcatggtttgccggggaaaagctcacctttgtggattttctcacctatgatatcttggatcagaaccgtatatttgaccccaagtgcctggatgagttcccaaacctgaaggctttcatgtgccgttttgaggctttggagaaaatcgctgcctacttacagtctgatcagttctgcaagatgcccatcaacaacaagatggcccagtggggcaacaagcctgtatgctgagcaggaggcagacttgcagagcttgttttgtttcatcctgtccgtaaggggtcagcgctcttgctttgctcttttcaatgaatagcacttatgttactggtgtccagctgagtttctcttgggtataaaggctaaaagggaaaaaggatatgtggagaatcatcaagatatgaattgaatcgctgcgatactggcatttccctactccccaactgagttcaagggctgtaggttcatgcccaagccctgagagtgggtactagaaaaaacgagattgcacagttggagagagcaggtgtgttaaatgggactggagtccctgtgaagactgggtgaggataacacaagtaaaactgtggtactgatggacttaaccggagttcggaaaccgtcctgtgtacacatgggagtttagtgtgataaaggcagtatttcagactggtgggctagccaatagagttgggacaattgcttactcattaaaaataatagagccccacttgacactattcactaaaattaatctggaatttaaggcccaacattaaacacaaagctgttgaaatatt

SEQ ID NO: 12456 - DNA, 4128 bp, Homo sapiens
  source 1..4128: mol_type = unassigned DNA
gggtgattctgagaaggcttcaaggaagaagtgagcatttgagcacggctacttgaggaaggctaggccatggacattagggtgcagcactcctgcccgggtcccgcctcggggtcgccaggccctgaaccccaacgccggcattagtcgcgcctgcgcacggccctgtggagccgcggaggcaagggacggagaacggggcggaggcggagtcagggcgcccgcgcgtgggccccgcccccttatgtcgggtataaagcccctcccgctcacagtttccctagtcctcgaaggctcggaagcccgtcaccatgtcgtgcgagtcgtctatggttctcgggtactgggatattcgtgggctggcgcacgccatccgcctgctcctggagttcacggatacctcttatgaggagaaacggtacacgtgcggggaagctcctgactatgatcgaagccaatggctggatgtgaaattcaagctagacctggactttcctaatctgccctacctcctggatgggaagaacaagatcacccagagcaatgccatcttgcgctacatcgctcgcaagcacaacatgtgtggtgagactgaagaagaaaagattcgagtggacatcatagagaaccaagtaatggatttccgcacacaactgataaggctctgttacagctctgaccacgaaaaactgaagcctcagtacttggaagagctacctggacaactgaaacaattctccatgtttctggggaaattctcatggtttgccggggaaaagctcacctttgtggattttctcacctatgatatcttggatcagaaccgtatatttgaccccaagtgcctggatgagttcccaaacctgaaggctttcatgtgccgttttgaggctttggagaaaatcgctgcctacttacagtctgatcagttctgcaagatgcccatcaacaacaagatggcccagtggggcaacaagcctgtatgctgagcaggaggcagacttgcagagcttgttttgtttcatcctgtccgtaaggggtcagcgctcttgctttgctcttttcaatgaatagcacttatgttactggtgtccagctgagtttctcttgggtataaaggctaaaagggaaaaaggatatgtggagaatcatcaagatatgaattgaatcgctgcgatactggcatttccctactccccaactgagttcaagggctgtaggttcatgcccaagccctgagagtgggtactagaaaaaacgagattgcacagttggagagagcaggtgtgttaaatgggactggagtccctgtgaagactgggtgaggataacacaagtaaaactgtggtactgatggacttaaccggagttcggaaaccgtcctgtgtacacatgggagtttagtgtgataaaggcagtatttcagactggtgggctagccaatagagttgggacaattgcttactcattaaaaataatagagccccacttgacactattcactaaaattaatctggaatttaaggcccaacattaaacacaaagctgttgaaatattgatgaaaatgtaagaatttttgtgaccacggggtaggagaagtttctttaaagacgtaaaaagaaaaaaaccataggctgctctgcctgtggagtagccattctttattcttttactttttaaaataataacaatcacaaaggaaagatttgccaattgaataggatcaaattctacaacttttcctaaggcacccacaaataaatgacaagtgagacaaaaagcactagtataaagattatataaagacctataaatcattaagacaactgagtttttaaaaatggacaaaatccatgaacaatttataaaatagaaatatagccaaaaatgtctaaaagatgtttatgatgtaaggaattatcaattacaacagtgagaaaccatatttccttctatccgatgagtaaaaagtttctaaagtgttggcaaggcttaggaaagtgatatgcatttcctgctggtcaagttgtaaattagtatagctactttggaggacaattgtaaaatttaaatcatatcctatgacccagcaattccatgctataaaaactcatccatggccgggcttggtggctcacgcctgtaatcccagcactttgggaggctgaggtgggcagatcacgaggtcaagagatcgagaccatcctggccaacatgatgaaaccccgtttctactaaaaatacaaaaattagctgggcatggtggcatgtgcctatagtcccagctactcaggaggctgaggcaggagaattgcttgaacctgggaggcagaggttgcagtgagccgagatcacgccactgcactccagcctggctacagggcgagactctgtctcaaaaaaaaaaaaaaaaaaaaaaaaaaaacattcaaagagacatatactaagatgttcactgtggcattgtctgtaatgacaaataagtggaaaccgtgtaaatacctgtcaatactatggagtaccatgtggcaacggaagaatgagactgaactgtgtgaactaacatgcaaagatccccaaaacaggccaggtgtggttgctcacagctgtaataacaacaccttcagaggctgaggtgagaggatcagttgaggccaggagtttaagaccagcctgggcaacatagtgagacccctgtctcccaaaaattttttttaattagctgtgcgcaattgctcatgcatagtcccagctacccaggaggctgaggtgggaggatcacttgagcccaggaatttgaagctgcagtgagctgtgttcttgccactgcactccaatctgggtgactgagcaagaccctgtctcttaaaaaaataaaaaagatctccaagcatagagaagagtctggagggaaacaccaaactcataacagtcttactgcaggcaagtgggataaaggcccagactccatggtggaagttaaagggcatttccaagttaaggctaagacttgcttttctaactaagagaatgtgctcatgcattgcttgtgtagtagaaactagtttttagaaaagaaagcaaacttaagaaacactgactcctgtggagatgacttggcaccactctcctttcacagagcagagtctgaatagtcttcagagataggcctgtgggccagattgccatcccctatggaccagaagccaaggatctctctagtgatggtcagagggcccaaatggcagggatacccagtgatgtcaggaggaatagtacagacagaaggtgctaagcagacaattcaactgccatgttttgccaccccctgtgagcagggattaggtgttcaggccagtatcttgggcatgggggagcctttggccagaagaggtataaagctcagaagtttttcagtctgataactattgatataatttccatagtgtgagggagcggtatgctctacccttgtgtatttaaggcaggacagagaaattgaggatgcccctggggctagatcgatgatatgaccagaaatcaaaaagggaatgcattatttattgctgtgtaacactgttaagagaggaggtagttaagggatggataggcacatagagagggaaggtctcaggagaagggatagaaaggaactatgttcacaagaacaacggcaagacagtgcctatactgcctctacagttaataggaaaaacggaagaagttacccttaagctaggatgttgctcagaagtgaccatcccaactttggtgcgggcacaataaatcagcctaaatgtccctaatttaacccagctcattataatgtcattaaacatgacattagcattgtggttttagcacccccatgggttttgcttaggcactcatgggtaataaccaagatggagtccctttggcaaaacttaggcatgcacagctgtagtaccccaagaagaaaatgttacttctctcatctgggcaaaacccacagaagacttcccagcttctgccacataaaagacacagaacacagacgccttactggcaacctgctttcaagacccctgtctttgctgagagctttcctttttcccaataaattctactctgccctactcactctc

SEQ ID NO: 12457 - DNA, 1321 bp, Homo sapiens
  source 1..1321: mol_type = unassigned DNA
ctgaacactcggaggtggcggtggatcttactccttccagccagtgaggatccagcaacctgctccgtgcctcccgcgcctgttggttggaagtgacgaccttgaagatcggccggttggaagtgacgaccttgaagatcggcgggcgcagcggggccgagggggcgggtctggcgctaggtccagcccctgcgtgccgggaaccccagaggaggtcgcagttcagcccagctgaggcctgtctgcagaatcgacaccaaccagcatcatgtccatgacactggggtactgggacatccgcgggctggcccacgccatccgcctgctcctggaatacacagactcaagctacgaggaaaagaagtatacgatgggggacgctcctgactatgacagaagccagtggctgaatgaaaaattcaagctgggcctggactttcccaatctgccctacttgattgatggggctcacaagatcacccagagcaacgccatcctgtgctacattgcccgcaagcacaacctgtgtggggagacagaagaggagaagattcgtgtggacattttggagaaccaggctatggacgtctccaatcagctggccagagtctgctacagccctgactttgagaaactgaagccagaatacttggaggaacttcctacaatgatgcagcacttctcacagttcctggggaagaggccatggtttgttggagacaagatcacctttgtagatttcctcgcctatgatgtccttgacctccaccgtatatttgagcccaactgcttggacgcctttccaaatctgaaggacttcatctcccgctttgaggtttcctgtggcataatgtgatggtcaattttctgcatcaacttgactgggctaagggatgctcagatggcaggtaaaatcattgtgcttgtgagggtgtttccagaagagatttgcctttgaatcagaagacagcaaagatttccttcagcaatgaaggaggcatccaccaaactgtcagggcccagagagaagaaaaagacaggaagggtgaatttgacctctctgactgggacatccatctctgcctatcctgggacctccacactcctggttctctggccttcagacttgatcagggactaacaccatcgcctcccacccccacctttgttctgaggcctttagcctctgaatgataccactggctttcctgcttctctatcctgcagtcggcagatcatgggacttcttcactccaaaattgtgtgagccaattcccataacagatagataaatttataaataaacacacaaatttcctac

SEQ ID NO: 12458 - DNA, 1118 bp, Homo sapiens
  source 1..1118: mol_type = unassigned DNA
cttccggaccttgctccctgaacactcggaggtggcggtggatcttactccttccagccagtgaggatccagcaacctgctccgtgcctcccgcgcctgttggttggaagtgacgaccttgaagatcggccggttggaagtgacgaccttgaagatcggcgggcgcagcggggccgagggggcgggtctggcgctaggtccagcccctgcgtgccgggaaccccagaggaggtcgcagttcagcccagctgaggcctgtctgcagaatcgacaccaaccagcatcatgtccatgacactggggtactgggacatccgcgggctggcccacgccatccgcctgctcctggaatacacagactcaagctacgaggaaaagaagtatacgatgggggacgctcctgactatgacagaagccagtggctgaatgaaaaattcaagctgggcctggactttcccaatgagaaactgaagccagaatacttggaggaacttcctacaatgatgcagcacttctcacagttcctggggaagaggccatggtttgttggagacaagatcacctttgtagatttcctcgcctatgatgtccttgacctccaccgtatatttgagcccaactgcttggacgcctttccaaatctgaaggacttcatctcccgctttgagggcttggagaagatctctgcctacatgaagtccagccgcttcctcccaaaacctctgtacacaagggtggctgtctggggcaacaagtaatgccttgaaggccaggaggtgggagtgaggagcccatactcagcctgctgcccaggctgtgcagcgcagctggactctgcatcccagcacctgcctcctcgttcctttctcctgtttattcccatctttacccccaagactttattgggcctcttcacttcccctaaacccctgtcccatgcaggccctttgaagcctcagctacccactttccttcatgaacatccccctcccaacactacccttccctgcactaaagccagcctgaccttccttcctgttagtggttgtatctgctttgaagggcctacctggcccctcgcctgtggagctcagccctgagctgtccccgtgttgca

SEQ ID NO: 12459 - DNA, 3990 bp, Homo sapiens
  source 1..3990: mol_type = unassigned DNA
gtcgcagttcagcccagctgaggcctgtctgcagaatcgacaccaaccagcatcatgtccatgacactggggtactgggacatccgcgggctggcccacgccatccgcctgctcctggaatacacagactcaagctacgaggaaaagaagtatacgatgggggacggtaatgacacccttgtgtccgggctctgcccactcacgctgagttggcaccaagcaacccatggtggccacctgtggctacctctgcaggcctcccctgctggagctgcaggctgtcccttccctgagccccggtgagggagtcctgtggccttgcaaggcagaatgctggggcgggatgctgggccccctgtttaattgggttgggtgtccctcagagcttccctaaaccctggaagccttagccgtgtggggtccagagccctcagcgggattctttgtccctgaaccctgggatgtgggactgagtggtcagattctagatccacctgtctcagggatcttgccactggttccttgggagggtccccgggaaggagggctgggctctggggaggtttgttttcacttcttcttccccacggcagctcctgactatgacagaagccagtggctgaatgaaaaattcaagctgggcctggactttcccaatgtaggtgcaggggaaggggcggttttgggggaaagtgcgacgtgtctctgactgcatctcctctccccagattagaggtgttcggatcaggagtcttctgcccaattcctctcactcctggttgtctacacagcccctgcatgatgttctgtgtcccagctcatttgttcatgtgacagtatttctatgtcaggcctgccatgagcgggcacagtgagtgcctggtctcccctctgcccttgcatatgggaaggggatgctggggagcctgctggcccaactgagcttccccggtttcccatctatccagctgccctacttgattgatggggctcacaagatcacccagagcaacgccatcctgtgctacattgcccgcaagcacaacctgtgtggggagacagaagaggagaagattcgtgtggacattttggagaaccaggctatggacgtctccaatcagctggccagagtctgctacagccctgactttgagaaactgaagccagaatacttggaggaacttcctacaatgatgcagcacttctcacagttcctggggaagaggccatggtttgttggagacaagatcacctttgtagatttcctcgcctatgatgtccttgacctccaccgtatatttgagcccaactgcttggacgcctttccaaatctgaaggacttcatctcccgctttgaggtgatgcccccatcctcctttctctttgatgccccttgttccgttacctcctttcagatgctttcccagtcctggagctacataaagaataacttgcatttattgagtgctggcttcatgccaggaaccttgcccagcacattatacctatcgtgtggaatttgaaatttccaacattcctacagggtgacagaattatcttgcccatttagagataagaaaactttgaatgagagggtcagtcctttgttctgggtcccagagccagtggaggctgtgctgggctccctgtgagcatctggatctatgggtggcagtcagggctctcccttttgtgacaaaagaaagaagcctcaggcctcatccagcctggatttcacagcccagggcactttggaagaggcagagaactttaggagcatggatgcagctggcaatagtaggactgacacacggtggcattgacgtcgagtacgaaacccacaggcagtattcatagctactcccagaagctttgcacgatcagacccccacgtggggaatcctgagagccagagctgtggccagagctggattagggtacatatgtgggtgcccctgttgaaggagtgtatgttgaagtgctctgtgctggggcactctccttctttatcttttttcctctcttttttccctccagtgttccaagtgttccccctgtgagatgagtagcacactgattttactgctattcaccgaccttctcctctgcatgaggcagggtgtgaggcacagtgggagttgcatagatgactgccccatcctggaaatgagtgcagtgagaggcctgcaggcagagcagcctgtgaggtgtgtggcaccacctgggtaccaggcctggggcctgcccctcactcatggggaaccatccctcacccgtgctgaatttgtttgagagcagcaaatcctacttttagtacagatgtgagaatttgaggcattagtccaacaagtttttcagcctagaatttgttttcctttcccactacccatcaagggatctggttactcagctagttcccatcagctctggctgtggtctcggctgagtggccttggggttatgtaagaggtagtgggaggggaagagagctgagggctgcagcatatggtccacctgggcttggccctttgggaataggcagccctggctctctctgaatccttagaaattacacggctatttgatcctggaaagatcgtgcagagcacacctgagtgtcatacagcctggtctgaggtagtggggttggagatgaggtgggttggggcacagtggtgtttagctcaggtaccaggtggggaggtttagactttctgctttaaaaggaatgattagagcctggtctggcgtttcttttgctggtccaacacaccttgaccactttcatccaggttttgccaggtccttgggtgagatctgggctctcttccaggctgcacagacattttcagaggtcccctctgtgtgtgcaaacctaggcaagccaggtgcctccctgtgaaacaggagaatgttgtgtagtcagagagtgacaggacctcctgagggatttgggggaggatggggatttgacagaaagaggccagaactggagagagacagaaccagtctacgttgcagctctgtcccccttagtagctatttgagtgtgaggaagttactgaacttctgtttcccacatgagaaatggtgataatagattcagccttgcagagtagtcgagtgggttttctaagcttatgttgtaatttctcttgggtacagagcacccagcaccgggtagaatcttcataagtgttagctgttactgtggtacaacattacttaaaggaagttggaagagttaactccgcaaatctggggaccctaagaggctgtgtgatgcctcagcacttgagcccacgtggaaaggctgtggccagggccctgacctgctgtgtctgcagtggggttgtcccagccctcatgggcagctgaccttgagttctggccttattttcccccctctcagggcttggagaagatctctgcctacatgaagtccagccgcttcctcccaaaacctctgtacacaagggtggctgtctggggcaacaagtaatgccttgaaggccaggaggtgggagtgaggagcccatactcagcctgctgcccaggctgtgcagcgcagctggactctgcatcccagcacctgcctcctcgttcctttctcctgtttattcccatctttacccccaagactttattgggcctcttcacttcccctaaacccctgtcccatgcaggccctttgaagcctcagctacccactttccttcatgaacatccccctcccaacactacccttccctgcactaaagccagcctgaccttccttcctgttagtggttgtatctgctttgaagggcctacctggcccctcgcctgtggagctcagccctgagctgtccccgtgttgcatgacagcattgactggtttacaggccctgctcctgcagcatggcccctgccttaggcctacctgatcaaaataaagcctcagccacatttgctatagtcttgtcttatttgctcctggctgcccagact

SEQ ID NO: 12460 - DNA, 1412 bp, Homo sapiens
  source 1..1412: mol_type = unassigned DNA
ggcgaggccgagcccctcctagtgcttccggaccttgctccctgaacactcggaggtggcggtggatcttactccttccagccagtgaggatccagcaacctgctccgtgcctcccgcgcctgttggttggaagtgacgaccttgaagatcggccggttggaagtgacgaccttgaagatcggcgggcgcagcggggccgagggggcgggtctggcgctaggtccagcccctgcgtgccgggaaccccagaggaggtcgcagttcagcccagctgaggcctgtctgcagaatcgacaccaaccagcatcatgtccatgacactggggtactgggacatccgcgggctggcccacgccatccgcctgctcctggaatacacagactcaagctacgaggaaaagaagtatacgatgggggacgctcctgactatgacagaagccagtggctgaatgaaaaattcaagctgggcctggactttcccaatctgccctacttgattgatggggctcacaagatcacccagagcaacgccatcctgtgctacattgcccgcaagcacaacctgtgtggggagacagaagaggagaagattcgtgtggacattttggagaaccaggctatggacgtctccaatcagctggccagagtctgctacagccctgactttgagaaactgaagccagaatacttggaggaacttcctacaatgatgcagcacttctcacagttcctggggaagaggccatggtttgttggagacaagatcacctttgtagatttcctcgcctatgatgtccttgacctccaccgtatatttgagcccaactgcttggacgcctttccaaatctgaaggacttcatctcccgctttgagggcttggagaagatctctgcctacatgaagtccagccgcttcctcccaaaacctctgtacacaagggtggctgtctggggcaacaagtaatgccttgaaggccaggaggtgggagtgaggagcccatactcagcctgctgcccaggctgtgcagcgcagctggactctgcatcccagcacctgcctcctcgttcctttctcctgtttattcccatctttacccccaagactttattgggcctcttcacttcccctaaacccctgtcccatgcaggccctttgaagcctcagctacccactttccttcatgaacatccccctcccaacactacccttccctgcactaaagccagcctgaccttccttcctgttagtggttgtatctgctttgaagggcctacctggcccctcgcctgtggagctcagccctgagctgtccccgtgttgcatgacagcattgactggtttacaggccctgctcctgcagcatggcccctgccttaggcctacctgatcaaaataaagcctcagccaca

SEQ ID NO: 12461 - DNA, 1555 bp, Homo sapiens
  source 1..1555: mol_type = unassigned DNA
caaagtctgagccccgctccgctgatgcctgtctgcagaatccgcaccaaccagcaccatgcccatgactctggggtactgggacatccgtgggctggcccacgccatccgcttgctcctggaatacacagactcaagctatgtggaaaagaagtacacgctgggggacgctcctgactatgacagaagccagtggctgaatgaaaaattcaagctgggcctggactttcccaatctgccctacttgattgatggggctcacaagatcacccagagcaatgccatcctgcgctacattgcccgcaagcacaacctgtgtggggagacagaagaggagaagattcgtgtggacattttggagaaccaggttatggataaccacatggagctggtcagactgtgctatgacccagattttgagaaactgaagccaaaatacttggaggaactccctgaaaagctaaagctctactcagagtttctggggaagcggccatggtttgcaggagacaagatcacctttgtggatttccttgcctatgatgtccttgacatgaagcgtatatttgagcccaagtgcttggacgccttcctaaacttgaaggacttcatctcccgctttgagggtttgaagaagatctctgcctacatgaagtccagccaattcctccgaggtcttttgtttggaaagtcagctacatggaacagcaaatagggcccagtgatgccagaagatgggagggaggagccaaccttgctgcctgcgaccctggaggacagcctgactccctggacctgccttcttcctttttccttctttctactctcttctcttccccaaggcctcattggcttcctttcttctaacatcatccctccccgcatcgaggctctttaaagcttcagctccccactgtcctccatcaaagtccccctcctaacgtcttcctttccctgcactaacgccaacctgactgcttttcctgtcagtgcttttctcttctttgagaagccagactgatctctgagctccctagcactgtcctcaaagaccatctgtatgccctgctccctttgctgggtccctaccccagctccgtgtgatgcccagtaaagcctgaaccatgcctgccatgtcttgtcttattccctgaggctcccttgactcaggactgtgctcgaattgtgggtggttttttgtcttctgttgtccacagccagagcttagtggatgggtgtgtgtgtgtgtgtgttgggggtggtgatcaggcaggttcataaatttccttggtcatttctgccctctagccacatccctctgttcctcactgtggggattactacagaaaggtgctctgtgccaagttcctcactcattcgcgctcctgtaggccgtctagaactggcatggttcaaagaggggctaggctgatggggaagggggctgagcagctcccaggcagactgccttctttcaccctgtcctgatagacttccctgatctagatatccttcgtcatgacacttctcaataaaacgtatcccaccgtattgt

SEQ ID NO: 12462 - DNA, 815 bp, Homo sapiens
  source 1..815: mol_type = unassigned DNA
gctccgctgatgcctgtctgcagaatccgcaccaaccagcaccatgcccatgactctggggtactgggacatccgtgggctggcccacgccatccgcttgctcctggaatacacagactcaagctatgtggaaaagaagtacacgctgggggacgctcctgactatgacagaagccagtggctgaatgaaaaattcaagctgggcctggactttcccaatgggatgctggggagcctggtggcccaactgagcttccccggtttcccatctatccagctgccctacttgattgatggggctcacaagatcacccagagcaatgccatcctgcgctacattgcccgcaagcacaacctgtgtggggagacagaagaggagaagattcgtgtggacattttggagaaccaggttatggataaccacatggagctggtcagactgtgctatgacccagattttgagaaactgaagccaaaatacttggaggaactccctgaaaagctaaagctctactcagagtttctggggaagcggccatggtttgcaggagacaagatcacctttgtggatttccttgcctatgatgtccttgacatgaagcgtatatttgagcccaagtgcttggacgccttcctaaacttgaaggacttcatctcccgctttgagggtttgaagaagatctctgcctacatgaagtccagccaattcctccgaggtcttttgtttggaaagtcagctacatggaacagcaaatagggcccagtgatgccagaagatgggagggaggagccaaccttgctgcctgcgaccctgg

SEQ ID NO: 12463 - DNA, 4370 bp, Homo sapiens
  source 1..4370: mol_type = unassigned DNA
aaagtctgagccccgctccgctgatgcctgtctgcagaatccgcaccaaccagcaccatgcccatgactctggggtactgggacatccgtgggctggcccacgccatccgcttgctcctggaatacacagactcaagctatgtggaaaagaagtacacgctgggggacggtaatggcaccctcgtgtccgggccctgcccactcacgctgagttggcaccaagcaacccatggtggccacctgtggctgcctctgcaggcctcccctgctggagctgcaggctgtcccttccctgagctcccgtgagtgagccctctggccttgcaaggcagaatgctggggcgggatgctggacaccctgtctaattgggttgggtgtccctcagagcttccctaaaccctggaagccttagccgttgtggggtccagagccctcagtgggattctttctccctgaaccctgggatgtgggactgagtggtcagattctagatccacctgtctcagggatcttgccactggctccttgggagggtccccgggaaggagggctgggctctggggaggtttgttttcacttcttccccaccacagctcctgactatgacagaagccagtggctgaatgaaaaattcaagctgggcctggactttcccaatgtaggtgcaggggaaggggcggttttgggggaaagtgcgacgtgtctctgactgcatctcctctccccaccttagaggtgttaagatcaggagtcttctgcccaattcctctcactcttggctgtctacacagcccttgcatgatgttctgtgtcccagctcatttattagtgtgacagtatttctatctcaggcctgccatgagcaggccctggtctcctctctgcccttgcatatgggaaggggatgctggggagcctggtggcccaactgagcttccccggtttcccatctatccagctgccctacttgattgatggggctcacaagatcacccagagcaatgccatcctgcgctacattgcccgcaagcacaacctgtgtggggagacagaagaggagaagattcgtgtggacattttggagaaccaggttatggataaccacatggagctggtcagactgtgctatgacccagattttgagaaactgaagccaaaatacttggaggaactccctgaaaagctaaagctctactcagagtttctggggaagcggccatggtttgcaggagacaagatcacctttgtggatttccttgcctatgatgtccttgacatgaagcgtatatttgagcccaagtgcttggacgccttcctaaacttgaaggacttcatctcccgctttgaggtgatgcccccatcctcctttctctttgatgccccttgttcctttctctcctttcagatgctttcccagtcctggagctacacaaagaataactcgtatgtattgagtacgggcttcatgccaggaatcatgcccagcacattatacctatcgtgtagaatttgaaatttccaacattcctacagggtgacagaattatcttgcccattttagagataagaaaactgagaatgagagggtcagtcctttgctcagggtcccagagccagtggaggctgtgctgggctccctgtgagcctctggatctatgggtggcagtcagggctctcccatttgtgacaaaaggagaagcctcaggcctcatccagcctgggtttcacagcccagaacactttgaaagaggcagagcacttcaggaccacggatgcagctggcaatagtaggactgacacacagtggcattgatgttgagtactaaacctgcaggcagtattcatagccacccccagaagctttgcatgatcggacccccatgtggaaaatcctgagatccggagctgtggctggagctggattagggtacatatgtgggtgcccctgttgaagcagtgtgtgttgaagtgctctgtgctggggcactctccttctttatctttcttcctctctttttttccctccaatgttccacgtcttccccctgtgagatgagtagcacactgattttactcctattcaccgaccttctcctctgcatgaggcagggtgtgaggcacagtgggagttgcatagatgactgccccatcctggaaatgagtgcagtgagaggcctgcaggcagagcagcctgtgaggtgtgtgtggcaccacctgggtaccgggcctggggcctgcccctcactcacggggaaccatccctcacctgtgttgaagttgtttgagagcagcaaatcctactttagtacagatttggggatttgaggcattagtccaacaggcttctgagcctagaatctgtttccctttcccactccccatcaagaaatctgcttgctcagctagttcccatcagctctggttctggtccagcctgagcagccttggggttatgtaagaggtggtgggaggggagcggtggggaacagccgagggctggggcatggagcctgcctgggcctggccctggccctttggggagagggagccctggatctctttgaattctttagaagttacatggtcattgaatcctggtaagattgtgtgcagcacacctgagtgtcatgtggcctggctagcagtagtagggctggagatgtgatgggggcacagggacatagggagatttagctcaggtaccaggtggagaagtttggactttatgctttaatgggaatgattagagcctggtctggccttcctttggtggttcacccttaccctattcagtttcatccaggttttgctaagtcattgggtgagatctgtgctctcttcttggctgcacaggtgtgttctgagcccctttgttctgctggaggtcctttctgtgtgtgcaatcctaggcaagccaagaacctccctgtgaaaaaggagaatgtttgtgccgacaaggagtgacaggatctggcatggggtgtggctgggtggaagaggaggagaatttggcaaaaacatgctagaactgaagacagaaccaggctatattccagccctgtcccacttactagctatttgagtgtgaggaagttgctgaacttctgttcttctatatgagaaacggtgataatagaactgaccatggagggtagtcgagtggattttctaagcctgtgttgtaatttctgttggatataaagcacccagcacagtgtagatctttcgtaaatggtagctgttattatggtataacattacttaaaggaagttggaagagttaacttagaagagctggggacctaagagaccgtgtgatgctccagcacttgagcccacatggaaaggctgtggccagggccctgacctgctgtgcctgcagcaaagctacttgagcccttctagacagcagacctggctctggccccttcttcccgccctcagggtttgaagaagatctctgcctacatgaagtccagccaattcctccgaggtcttttgtttggaaagtcagctacatggaacagcaaatagggcccagtgatgccagaagatgggagggaggagccaaccttgctgcctgcgaccctggaggacagcctgactccctggacctgccttcttcctttttccttctttctactctcttctcttccccaaggcctcattggcttcctttcttctaacatcatccctccccgcatcgaggctctttaaagcttcagctccccactgtcctccatcaaagtccccctcctaacgtcttcctttccctgcactaacgccaacctgactgcttttcctgtcagtgcttttctcttctttgagaagccagactgatctctgagctccctagcactgtcctcaaagaccatctgtatgccctgctccctttgctgggtccctaccccagctccgtgtgatgcccagtaaagcctgaaccatgcctgccatgtcttgtcttattccctgaggctcccttgactcaggactgtgctcgaattgtgggtggttttttgtcttctgttgtccacagccagagcttagtggatgggtgtgtgtgtgtgtgtgttgggggtggtgatcaggcaggttcataaatttccttggtcatttctgccctctagccacatccctctgttcctcactgtggggattactacagaaaggtgctctgtgccaagttcctcactcattcgcgctcctgtaggccgtctagaactggcatggttcaaagaggggctaggctgatggggaagggggctgagcagctcccaggcagactgccttctttcaccctgtcctgatagacttccctgatctagatatccttcgtcatgacacttctcaataaaacgtatcccaccgt

SEQ ID NO: 12464 - DNA, 900 bp, Homo sapiens
  source 1..900: mol_type = unassigned DNA
cccttggccagcgagatgctttgacacagccccttaagatgttttaagggctatcccataaagccgggaaggcacaacgggtggagctggcggccgccgggggcaggcacttttgagctaaggaggaagcgggggagggaaggagggcgggaaggacgcgccacctacttcctgaatcccctgcaaaccccagaggagctcggcctgcgctgcgccacgatgtccggggagtcagccaggagcttggggaagggaagcgcgcccccggggccggtcccggagggctcgatccgcatctacagcatgaggttctgcccgtttgctgagaggacgcgtctagtcctgaaggccaagggaatcaggcatgaagtcatcaatatcaacctgaaaaataagcctgagtggttctttaagaaaaatccctttggtctggtgccagttctggaaaacagtcagggtcagctgatctacgagtctgccatcacctgtgagtacctggatgaagcatacccagggaagaagctgttgccggatgacccctatgagaaagcttgccagaagatgatcttagagttgttttctaaggttctgactaataagaagacgaccttctttggtggcaattctatctctatgattgattacctcatctggccctggtttgaacggctggaagcaatgaagttaaatgagtgtgtagaccacactccaaaactgaaactgtggatggcagccatgaaggaagatcccacagtctcagccctgcttactagtgagaaagactggcaaggtttcctagagctctacttacagaacagccctgaggcctgtgactatgggctctgaagggggcaggagtcagcaataaagctatgtctgatattttccttcactaatatg

SEQ ID NO: 12465 - DNA, 972 bp, Homo sapiens
  source 1..972: mol_type = unassigned DNA
acagccccttaagatgttttaagggctatcccataaagccgggaaggcacaacgggtggagctggcggccgccgggggcaggcacttttgagctaaggaggaagcgggggagggaaggagggcgggaaggacgcgccacctacttcctgaatcccctgcaaaccccagaggagctcggcctgcgctgcgccacgatgtccggggagtcagccaggagcttggggaagggaagcgcgcccccggggccggtcccggagggctcgatccgcatctacagcatgaggttctgcccgtttgctgagaggacgcgtctagtcctgaaggccaagggaatcaggcatgaagtcatcaatatcaacctgaaaaataagcctgagtggttctttaagaaaaatccctttggtctggtgccagttctggaaaacagtcagggtcagctgatctacgagtctgccatcacctgtgagtacctggatgaagcatacccagggaagaagctgttgccggatgacccctatgagaaagcttgccagaagatgatcttagagttgttttctaaggtgccatccttggtaggaagctttattagaagccaaaataaagaagactatgctggcctaaaagaagaatttcgtaaagaatttaccaagctagaggaggttctgactaataagaagacgaccttctttggtggcaattctatctctatgattgattacctcatctggccctggtttgaacggctggaagcaatgaagttaaatgagtgtgtagaccacactccaaaactgaaactgtggatggcagccatgaaggaagatcccacagtctcagccctgcttactagtgagaaagactggcaaggtttcctagagctctacttacagaacagccctgaggcctgtgactatgggctctgaagggggcaggagtcagcaataaagctatgtctgatattttccttcactaata

SEQ ID NO: 12466 - DNA, 592 bp, Homo sapiens
  source 1..592: mol_type = unassigned DNA
gaagcgcgcccccggggccggtcccggagggctcgatccgcatctacagcatgaggttctgcccgtttgctgagaggacgcgtctagtcctgaaggccaagggaatcaggcatgaagtcatcaatatcaacctgaaaaataagcctgagtggttctttaagaaaaatccctttggtctggtgccagttctggaaaacagtcagggtcagctgatctacgagtctgccatcacctgtgagtacctggatgaagcatacccagggaagaagctgttgccggatgacccctatgagaaagcttgccagaagatgatcttagagttgttttctaaggttctgactaataagaagacgaccttctttggtggcaattctatctctatgattgattacctcatctggccctggtttgaacggctggaagcaatgaagttaaatgagtgtgtagaccacactccaaaactgaaactgtggatggcagccatgaaggaagatcccacagtctcagccctgcttactagtgagaaagactggcaaggtttcctagagctctacttacagaacagccctgaggcctgtgactatgggctctg

SEQ ID NO: 12467 - DNA, 829 bp, Homo sapiens
  source 1..829: mol_type = unassigned DNA
gggggtgatctcggcgacccccggcggcatgttcgaggctgctccgggagcccagccgcccgggagcgccccaccggcggggaacgggtcggagctgcagtgggacgcgggggcggtgggatacggggggtctcgacacctctctgggccgtaatcgccttcgcttctccccggcaggaagcgcgcccccggggccggtcccggagggctcgatccgcatctacagcatgaggttctgcccgtttgctgagaggacgcgtctagtcctgaaggccaagggaatcaggcatgaagtcatcaatatcaacctgaaaaataagcctgagtggttctttaagaaaaatccctttggtctggtgccagttctggaaaacagtcagggtcagctgatctacgagtctgccatcacctgtgagtacctggatgaagcatacccagggaagaagctgttgccggatgacccctatgagaaagcttgccagaagatgatcttagagttgttttctaaggtgccatccttggtaggaagctttattagaagccaaaataaagaagactatgctggcctaaaagaagaatttcgtaaagaatttaccaagctagaggaggttctgactaataagaagacgaccttctttggtggcaattctatctctatgattgattacctcatctggccctggtttgaacggctggaagcaatgaagttaaatgagtgtgtagaccacactccaaaactgaaactgtggatggcagccatgaaggaagatcccacagtctcagccctgcttactagtgagaaagactggcaaggtttcctagagctcta

SEQ ID NO: 12468 - DNA, 1052 bp, Homo sapiens
  source 1..1052: mol_type = unassigned DNA
aaggatgactcctagacctgtctttgtcccatacttgggaagataagctgttagtttacattgccaagatgaaattcaactgatctgttttagagtaaagatcttgcgggccaacaaggaatttccttggggaggtgtgtggcctttgatctttgtagctatttagcaacaaaatgggaggcagtgttgcctgactcagtttccaagcttgactcttccctttggcatagtgagtttggagtcaagagatttttattttcccttcacaagctgaacaggagcctttggagagaacgctctggaccggaagcgcgcccccggggccggtcccggagggctcgatccgcatctacagcatgaggttctgcccgtttgctgagaggacgcgtctagtcctgaaggccaagggaatcaggcatgaagtcatcaatatcaacctgaaaaataagcctgagtggttctttaagaaaaatccctttggtctggtgccagttctggaaaacagtcagggtcagctgatctacgagtctgccatcacctgtgagtacctggatgaagcatacccagggaagaagctgttgccggatgacccctatgagaaagcttgccagaagatgatcttagagttgttttctaaggtgccatccttggtaggaagctttattagaagccaaaataaagaagactatgctggcctaaaagaagaatttcgtaaagaatttaccaagctagaggaggttctgactaataagaagacgaccttctttggtggcaattctatctctatgattgattacctcatctggccctggtttgaacggctggaagcaatgaagttaaatgagtgtgtagaccacactccaaaactgaaactgtggatggcagccatgaaggaagatcccacagtctcagccctgcttactagtgagaaagactggcaaggtttcctagagctctacttacagaacagccctgaggcctgtgactatgggctctgaagggggcaggagtcagcaataaagctatgtctgatattttccttcactaatatg

SEQ ID NO: 12469 - DNA, 1493 bp, Homo sapiens
  source 1..1493: mol_type = unassigned DNA
accacctctgctgccgcgcgcctaccggagccgcttggccctagtgctttccagcggatttcccctcaggtgcggagccgggtgccggggtcccacagccaaccactaccggttcctctttcgtcagccaccggcgccggcaggacccgcgaatcccgatctccaggagcctgtaaggaggccgcccattggctcagccgcactgctgggcaggtacttccaaagctttgaggattggctgatgctctgggcgccggggctagttggcgggtaggatcacgtgcgaggggcaggccccgtctaggccccgcctccttgctgctgctgccgccgccaatcctggtccggttgcccgagttcccggaggtctctcgcgggacctctctcaccgccaccgctcctactctcgggcttccaaatctggggcgatgtctccccaggttaaattaccctagctcctgctccagatcgcttccccgtgccccgccagagcccagtagttcaaaaattaaatttggggcaaggggtgcgcgccagagcgcagctgtttctggagcctgcggcagcggtggcgagccacagggcggcgaccgtgagctccgggagctgcgcaaaccacctggagaccatgtctggggatgcgaccaggaccctggggaaaggaagccagcccccagggccagtcccggaggggctgatccgcatctacagcatgaggttctgcccctattctcacaggacccgcctcgtcctcaaggccaaagacatcagacatgaagtggtcaacattaacctgagaaacaagcctgaatggtactatacaaagcacccttttggccacattcctgtcctggagaccagccaatgtcaactgatctatgaatctgttattgcttgtgagtacctggatgatgcttatccaggaaggaagctgtttccatatgacccttatgaacgagctcgccaaaagatgttattggagctattttgtaaggtcccacatttgaccaaggagtgcctggtagcgttgagatgtgggagagaatgcactaatctgaaggcagccctgcgtcaggaattcagcaacctggaagagattcttgagtatcagaacaccaccttctttggtggaacctgtatatccatgattgattacctcctctggccctggtttgagcggctggatgtgtatgggatactggactgtgtgagccacacgccagccctgcggctctggatatcagccatgaagtgggaccccacagtctgtgctcttctcatggataagagcattttccagggcttcttgaatctctattttcagaacaaccctaatgcctttgactttgggctgtgctgagtctcactgtccaccccttcgctgtccagaattccccagcttgttgggagtctacgtcacggcttgtcttgggaaccaatccgtctctctttcttttctttgaagttcccaataaaatgaaaacaggaaatgt

SEQ ID NO: 12470 - DNA, 896 bp, Homo sapiens
  source 1..896: mol_type = unassigned DNA
gctccttcctcaccgggctgactagcctctcctttccctgtccccctccatcgctgctctgcaggaagccagcccccagggccagtcccggaggggctgatccgcatctacagcatgaggttctgcccctattctcacaggacccgcctcgtcctcaaggccaaagacatcagacatgaagtggtcaacattaacctgagaaacaagcctgaatggtactatacaaagcacccttttggccacattcctgtcctggagaccagccaatgtcaactgatctatgaatctgttattgcttgtgagtacctggatgatgcttatccaggaaggaagctgtttccatatgacccttatgaacgagctcgccaaaagatgttattggagctattttgtaaggtcccacatttgaccaaggagtgcctggtagcgttgagatgtgggagagaatgcactaatctgaaggcagccctgcgtcaggaattcagcaacctggaagagattcttgagtatcagaacaccaccttctttggtggaacctgtatatccatgattgattacctcctctggccctggtttgagcggctggatgtgtatgggatactggactgtgtgagccacacgccagccctgcggctctggatatcagccatgaagtgggaccccacagtctgtgctcttctcatggataagagcattttccagggcttcttgaatctctattttcagaacaaccctaatgcctttgactttgggctgtgctgagtctcactgtccaccccttcgctgtccagaattccccagcttgttgggagtctacgtcacggcttgtcttgggaaccaatccgtctctctttcttttctttgaagttcccaataaaatgaaaacaggaaatgta

SEQ ID NO: 12471 - DNA, 1495 bp, Homo sapiens
  source 1..1495: mol_type = unassigned DNA
accacctctgctgccgcgcgcctaccggagccgcttggccctagtgctttccagcggatttcccctcaggtgcggagccgggtgccggggtcccacagccaaccactaccggttcctctttcgtcagccaccggcgccggcaggacccgcgaatcccgatctccaggagcctgtaaggaggccgcccattggctcagccgcactgctgggcaggtacttccaaagctttgaggattggctgatgctctgggcgccggggctagttggcgggtaggatcacgtgcgaggggcaggccccgtctaggccccgcctccttgctgctgctgccgccgccaatcctggtccggttgcccgagttcccggaggtctctcgcgggacctctctcaccgccaccggctcctactctcgggcttccaaatctggggcgatgtctccccaggttaaattaccctagctcctgctccagatcgcttccccgtgccccgccagagcccagtagttcaaaaattaaatttggggcaaggggtgcgcgccagagcgcagctgtttctggagcctgcggcagcggtggcgagccacagggcggcgaccgtgagctccgggagctgcgcaaaccacctggagaccatgtctggggatgcgaccaggaccctggggaaaggaagccagcccccagggccagtcccggaggggctgatccgcatctacagcatgaggttctgcccctattctcacaggacccgcctcgtcctcaaggccaaagacatcagacatgaagtggtcaacattaacctgagaaacaagcctgaatggtactatacaaagcacccttttggccacattcctgtcctggagaccagccaatgtcaactgatctatgaatctgttattgcttgtgagtacctggatgatgcttatccaggaaggaagctgtttccatatgacccttatgaacgagctcgccaaaagatgttattggagctattttgtaaggtcccacatttgaccaaggagtgcctggtagcgttgagatgtgggagagaatgcactaatctgaaggcagccctgcgtcaggaattcagcaacctggaagagattcttgagtatcagaacaccaccttctttggtggaacctgtatatccatgattgattacctcctctggccctggtttgagcggctggatgtgtatgggatactggactgtgtgagccacacgccagccctgcggctctggatatcagccatgaagtgggaccccacagtctgtgctcttctcatggataagagcattttccagggcttcttgaatctctattttcagaacaaccctaatgcctttgactttgggctgtgctgagtctcactgtccaccccttcgctgtccagaattccccagcttgttgggagtctacgtcacggcttgtcttgggaaccaatccgtctctctttcttttctttgaagttcccaataaaatgaaaacaggaaatgta

SEQ ID NO: 12472 - DNA, 972 bp, Homo sapiens
  source 1..972: mol_type = unassigned DNA
gagctgcgcaaaccacctggagaccatgtctggggatgcgaccaggaccctggggaaaggaagccagcccccagggccagtcccggaggggctgatccgcatctacagcatgaggttctgcccctattctcacaggacccgcctcgtcctcaaggccaaagacatcagacatgaagtggtcaacattaacctgagaaacaagcctgaatggtactatacaaagcacccttttggccacattcctgtcctggagaccagccaatgtcaactgatctatgaatctgttattgcttgtgagtacctggatgatgcttatccaggaaggaagctgtttccatatgacccttatgaacgagctcgccaaaagatgttattggagctattttgtaaggtcccacatttgaccaaggagtgcctggtagcgttgagatgtgggagagaatgcactaatctgaaggcagccctgcgtcaggaattcagcaacctggaagaggataggaagaaaagaaagtttatacctggttaattcgtcactgaaaacaattttctggaagtggaaggttttcccggaagtatgtcatcccttgctcctggtcttgcaaaatttgtctgttcagttcaggggctttgcctatctggccatcagagtcttactaattttctttgttgatttgtaaaagttccttttaaagcgttccttgtatagaaaagatatttgactggttttaaaacacatttttgttttcttttgacttttaatttggcttatatatttttgcatatggaagtacagcatttgaaagtattgtgctataaggctttccttatatgtgctatgatttcctccactgttttatgtgtaggaagtcctctccccacttcagagacttgataaatattcatttatattttcatctaccaccaatcactttacagacatttgactggtcaagcattaccctcctagctttt

SEQ ID NO: 12473 - DNA, 1123 bp, Homo sapiens
  source 1..1123: mol_type = unassigned DNA
cttcctcaccgggctgactagcctctcctttccctgtccccctccatcgctgctctgcaggaagccagcccccagggccagtcccggaggggctgatccgcatctacagcatgaggttctgcccctattctcacaggacccgcctcgtcctcaaggccaaagacatcagacatgaagtggtcaacattaacctgagaaacaagcctgaatggtactatacaaagcacccttttggccacattcctgtcctggagaccagccaatgtcaactgatctatgaatctgttattgcttgtgagtacctggatgatgcttatccaggaaggaagctgtttccatatgacccttatgaacgagctcgccaaaagatgttattggagctattttgtaagctgtgtgagccacacgccagccctgcggctctggatatcagccatgaagtgggaccccacagtctgtgctcttctcatggataagagcattttccagggcttcttgaatctctattttcagaacaaccctaatgcctttgactttgggctgtgctgagtctcactgtccaccccttcgctgtccagaattccccagcttgttgggagtctacgtcacggcttgtcttgggaaccaatccgtctctctttcttttctttgaagttcccaataaaatgaaaacaggaaatgtattcttctgataatcatttgtctgactcctctagcctgtagctgctgctactgctgcttttttttcctttttttttttgaggcaagatcttgcttcgttactcaggctggagtgcagtgggacagtcggctcactgcagccttgaactcctgggctcagttgattctcccgcctcagcctcctgagaagctaggactacaggtatgtgtcaccacgcccagctaatttttaaaaaaatgttgttgagacagggtctcactatgttgctcaggctggtctccatctcctggccgcaagccatccacccaacttggtctccaaagtgttgagattacaggcatgagccacctggcctgcctagcctgtagcttctaactattttctagaaagtgcctggtgctaatgtcagagcacattttgggagcctgtgtgcctcctaac

SEQ ID NO: 12474 - DNA, 1391 bp, Homo sapiens
  source 1..1391: mol_type = unassigned DNA
accacctctgctgccgcgcgcctaccggagccgcttggccctagtgctttccagcggatttcccctcaggtgcggagccgggtgccggggtcccacagccaaccactaccggttcctctttcgtcagccaccggcgccggcaggacccgcgaatcccgatctccaggagcctgtaaggaggccgcccattggctcagccgcactgctgggcaggtacttccaaagctttgaggattggctgatgctctgggcgccggggctagttggcgggtaggatcacgtgcgaggggcaggccccgtctaggccccgcctccttgctgctgctgccgccgccaatcctggtccggttgcccgagttcccggaggtctctcgcgggacctctctcaccgccaccgctcctactctcgggcttccaaatctggggcgatgtctccccaggttaaattaccctagctcctgctccagatcgcttccccgtgccccgccagagcccagtagttcaaaaattaaatttggggcaaggggtgcgcgccagagcgcagctgtttctggagcctgcggcagcggtggcgagccacagggcggcgaccgtgagctccgggagctgcgcaaaccacctggagaccatgtctggggatgcgaccaggaccctggggaaaggaagccagcccccagggccagtcccggaggggctgatccgcatctacagcatgaggttctgcccctattctcacaggacccgcctcgtcctcaaggccaaagacatcagacatgaagtggtcaacattaacctgagaaacaagcctgaatggtactatacaaagcacccttttggccacattcctgtcctggagaccagccaatgtcaactgatctatgaatctgttattgcttgtgagtacctggatgatgcttatccaggaaggaagctgtttccatatgacccttatgaacgagctcgccaaaagatgttattggagctattttgtaagattcttgagtatcagaacaccaccttctttggtggaacctgtatatccatgattgattacctcctctggccctggtttgagcggctggatgtgtatgggatactggactgtgtgagccacacgccagccctgcggctctggatatcagccatgaagtgggaccccacagtctgtgctcttctcatggataagagcattttccagggcttcttgaatctctattttcagaacaaccctaatgcctttgactttgggctgtgctgagtctcactgtccaccccttcgctgtccagaattccccagcttgttgggagtctacgtcacggcttgtcttgggaaccaatccgtctctctttcttttctttgaagttcccaataaaatgaaaacaggaaatgt

SEQ ID NO: 12475 - DNA, 1066 bp, Homo sapiens
  source 1..1066: mol_type = unassigned DNA
actggagtttgctgactccctctggtttccggtcaggtcggtcggtccccactatgggcctggagctgtacctggacctgctgtcccagccctgccgcgctgtttacatctttgccaagaagaacgacattcccttcgagctgcgcatcgtggatctgattaaaggtcagcacttaagcgatgcctttgcccaggtgaaccccctcaagaaggtgccagccttgaaggacggggacttcaccttgacggagagtgtggccatcctgctctacctgacgcgcaaatataaggtccctgactactggtaccctcaggacctgcaggcccgtgcccgtgtggatgagtacctggcatggcagcacacgactctgcggagaagctgcctccgggccttgtggcataaggtgatgttccctgttttcctgggtgagccagtatctccccagacactggcagccaccctggcagagttggatgtgaccctgcagttgctcgaggacaagttcctccagaacaaggccttccttactggtcctcacatctccttagctgacctcgtagccatcacggagctgatgcatcccgtgggtgctggctgccaagtcttcgaaggccgacccaagctggccacatggcggcagcgcgtggaggcagcagtgggggaggacctcttccaggaggcccatgaggtcattctgaaggccaaggacttcccacctgcagaccccaccataaagcagaagctgatgccctgggtgctggccatgatccggtgagctgggaaacctcacccttgcaccgtcctcagcagtccacaaagcattttcatttctaatggcccatgggagccaggcccagaaagcaggaatggcttgcctaagacttgcccaagtcccagagcacctcacctcccgaagccaccatccccaccctgtcttccacagccgcctgaaagccacaatgagaatgatgcacactgaggccttgtgtcctttaatcactgcatttcattttgattttggataataaacctgggctcagcctgagcctctgcttctaactctaa

SEQ ID NO: 12476 - DNA, 807 bp, Homo sapiens
  source 1..807: mol_type = unassigned DNA
gactccctctggtttccggtcaggtcggtcggtccccactatgggcctggagctgtacctggacctgctgtcccagccctgccgcgctgtttacatctttgccaagaagaacgacattcccttcgagctgcgcatcgtggatctgattaaaggggtgatgttccctgttttcctgggtgagccagtatctccccagacactggcagccaccctggcagagttggatgtgaccctgcagttgctcgaggacaagttcctccagaacaaggccttccttactggtcctcacatctccttagctgacctcgtagccatcacggagctgatgcatcccgtgggtgctggctgccaagtcttcgaaggccgacccaagctggccacatggcggcagcgcgtggaggcagcagtgggggaggacctcttccaggaggcccatgaggtcattctgaaggccaaggacttcccacctgcagaccccaccataaagcagaagctgatgccctgggtgctggccatgatccggtgagctgggaaacctcacccttgcaccgtcctcagcagtccacaaagcattttcatttctaatggcccatgggagccaggcccagaaagcaggaatggcttgcctaagacttgcccaagtcccagagcacctcacctcccgaagccaccatccccaccctgtcttccacagccgcctgaaagccacaatgagaatgatgcacactgaggccttgtgtcctttaatcactgcatttcattttgattttggataataaacctgggctcagcctgagcctctgcttc

SEQ ID NO: 12477 - DNA, 778 bp, Homo sapiens
  source 1..778: mol_type = unassigned DNA
cggtccccactatgggcctggagctgtacctggacctgctgtcccagccctgccgcgctgtttacatctttgccaagaagaacgacattcccttcgagctgcgcatcgtggatctgattaaagtgtggccatcctgctctacctgacgcgcaaatataaggtccctgactactggtaccctcaggacctgcaggcccgtgcccgtgtggatgagtacctggcatggcagcacacgactctgcggagaagctgcctccgggccttgtggcataaggtgatgttccctgttttcctgggtgagccagtatctccccagacactggcagccaccctggcagagttggatgtgaccctgcagttgctcgaggacaagttcctccagaacaaggccttccttactggtcctcacatctccttagctgacctcgtagccatcacggagctgatgcatcccgtgggtgctggctgccaagtcttcgaaggccgacccaagctggccacatggcggcagcgcgtggaggcagcagtgggggaggacctcttccaggaggcccatgaggtcattctgaaggccaaggacttcccacctgcagaccccaccataaagcagaagctgatgccctgggtgctggccatgatccggtgagctgggaaacctcacccttgcaccgtcctcagcagtccacaaagcattttcatttctaatggcccatgggagccaggcccagaaagcaggaatggcttgcctaagacttgcccaagtcccagagcacctcac

SEQ ID NO: 12478 - DNA, 559 bp, Homo sapiens
  source 1..559: mol_type = unassigned DNA
agtgttgagccaagaggatggactttggagccagactttctgggtctataatcattcagtgtctgtctcctcctctaaaatgcggacggtgggaaattctgacacacgcttcaacacagatgcaccttgaagacattatgctaagtgaaatgagcgagccaggcacgaaagggatgggactggggcctctctgtgcgtccccctgagagacaacggtctcttggccacccaccctgatcccacaggagccaggcgggcccagccctgagacaggccgcccgccgcccgcaattggactaaagagtgtcccaggcgtccgtgccgcccaatggggcacagcggtcggggtcggtcggtccccactatgggcctggagctgtacctggacctgctgtcccagccctgccgcgctgtttacatctttgccaagaagaacgacattcccttcgagctgcgcatcgtggatctgattaaaggtcagcacttaagcgatgcctttgcccaggtgaaccccctcaagaaggtgccagccttgaaggacggggacttcaccttgacg

SEQ ID NO: 12479 - DNA, 628 bp, Homo sapiens
  source 1..628: mol_type = unassigned DNA
gactccctctggtttccggtcaggtcggtcggtccccactatgggcctggagctgtacctggacctgctgtcccagccctgccgcgctgtttacatctttgccaagaagaacgacattcccttcgagctgcgcatcgtggatctgattaaagcccgtgggtgctggctgccaagtcttcgaaggccgacccaagctggccacatggcggcagcgcgtggaggcagcagtgggggaggacctcttccaggaggcccatgaggtcattctgaaggccaaggacttcccacctgcagaccccaccataaagcagaagctgatgccctgggtgctggccatgatccggtgagctgggaaacctcacccttgcaccgtcctcagcagtccacaaagcattttcatttctaatggcccatgggagccaggcccagaaagcaggaatggcttgcctaagacttgcccaagtcccagagcacctcacctcccgaagccaccatccccaccctgtcttccacagccgcctgaaagccacaatgagaatgatgcacactgaggccttgtgtcctttaatcactgcatttcattttgattttggataataaacctgggctcagcctgagcctctgcttc

SEQ ID NO: 12480 - DNA, 1094 bp, Homo sapiens
  source 1..1094: mol_type = unassigned DNA
ccgcgctcagcgccttcactgccatccccgctgtccttgccgcccccgccatgggcctagagctgtttcttgacctggtgtcccagcccagccgcgccgtctacatcttcgccaagaagaatggcatccccttagagctgcgcaccgtggatttggtcaaagggcagcacaagagcaaggagttcttgcagatcaacagcctggggaaactgccgacgctcaaggatggtgatttcatcttgaccgaaagctcggccatcctgatttacctgagctgtaagtaccagacgccggaccactggtatccatctgacctgcaggctcgtgcccgtgttcatgagtacctgggctggcatgccgactgcatccgtggcacctttggtatacccctgtgggtccaggtgttggggccactcattggggtccaggtgcccaaggagaaggtggaacgcaacaggactgccatggaccaggccctgcaatggctggaggacaagttcctgggggacaggcccttcctcgctggccagcaggtgacactggctgatctcatggccctggaggagctgatgcagccggtggctctcggctatgaactgtttgagggacggccacgactggcagcatggcgtggacgagtggaggctttcctgggtgctgagctatgccaggaggcccacagcatcatcttgagcatcctggaacaggcggccaagaaaaccctcccaacaccctcaccagaggcctatcaggctatgctgcttcgaatcgccaggatcccctgaagggtctgggatgggggccaggagattagcaacaaggattcattctgttacttacttgcccctttttatctttccctcttgccccagtcccttctctccagcttcatgtgaagctctgcacagacaagacactcagtgtccttggcagtgctgctactcctcaggtgcagcatacataaccagtaagagactaaatctgcaatatataaagagctcctacaaatcagtaacatgaagaacactcaaaaattggcaaatgtcatcagtgttttaaacagaataaagattccaaacactttgaatagagaa

SEQ ID NO: 12481 - DNA, 1919 bp, Homo sapiens
  source 1..1919: mol_type = unassigned DNA
aagcgcactgggtcgcatcgaggccccgccccctgagcctgggtagcggcgcgagggccgggagaaccgttcgcggaggaaaggcgaactagtgttgggatggccaccaactgggggagcctcttgcaggataaacagcagctagaggagctggcacggcaggccgtggaccgggccctggctgagggagtattgctgaggacctcacaggagcccacttcctcggaggtggtgagctatgccccattcacgctcttcccctcactggtccccagtgccctgctggagcaagcctatgctgtgcagatggacttcaacctgctagtggatgctgtcagccagaacgctgccttcctggagcaaactctttccagcaccatcaaacaggatgactttaccgctcgtctctttgacatccacaagcaagtcctaaaagagggcattgcccagactgtgttcctgggcctgaatcgctcagactacatgttccagcgcagcgcagatggctccccagccctgaaacagatcgaaatcaacaccatctctgccagctttgggggcctggcctcccggaccccagctgtgcaccgacatgttctcagtgtcctgagtaagaccaaagaagctggcaagatcctctctaataatcccagcaagggactggccctgggaattgccaaagcctgggagctctacggctcacccaatgctctggtgctactgattgctcaagagaaggaaagaaacatatttgaccagcgtgccatagagaatgagctactggccaggaacatccatgtgatccgacgaacatttgaagatatctctgaaaaggggtctctggaccaagaccgaaggctgtttgtggatggccaggaaattgctgtggtttacttccgggatggctacatgcctcgtcagtacagtctacagaattgggaagcacgtctactgctggagaggtcacatgctgccaagtgcccagacattgccacccagctggctgggactaagaaggtgcagcaggagctaagcaggccgggcatgctggagatgttgctccctggccagcctgaggctgtggcccgcctccgcgccacctttgctggcctctactcactggatgtgggtgaagaaggggaccaggccatcgccgaggcccttgctgcccctagccggtttgtgctaaagccccagagagagggtggaggtaacaacctatatggggaggaaatggtacaggccctgaaacagctgaaggacagtgaggagagggcctcctacatcctcatggagaagatcgaacctgagccttttgagaattgcctgctacggcctggcagccctgcccgagtggtccagtgcatttcagagctgggcatctttggggtctatgtcaggcaggaaaagacactcgtgatgaacaagcacgtggggcatctacttcgaaccaaagccatcgagcatgcagatggtggtgtggcagcgggagtggcagtcctggacaacccataccctgtgtgagggcacaaccaggccacgggaccttctatcctctgtatttgtcattcctctcctagccctcctgaggggtatcctcctaaagacctccaaagtttttatggaagggtaaatactggtaccttcccccagctttccatctgaggaccagaaaagttgtgtctcccttagatgagatctagacgcccccaaatccttgagatgtgggtatagctcagggtaagctgctctgaggtaaaggtccatgaaccctgccccactcctgtcagcccctcatcagccttttcagcaggttccagtgcctgacttgggataggactgagtggtaggaggagggggagtggaggggcatagcctttccctaattctgccttaaataaaactgcattgctgattca

SEQ ID NO: 12482 - DNA, 1092 bp, Homo sapiens
  source 1..1092: mol_type = unassigned DNA
atggccaccaactgggggagcctcttgcaggataaacagcagctagaggagctggcacggcaggccgtggaccgggccctggctgagggagtattgctgaggacctcacaggagcccacttcctcggaggtggtgagctatgccccattcacgctcttcccctcactggtccccagtgccctgctggagcaagcctatgctgtgcagatggacttcaacctgctagtggatgctgtcagccagaacgctgccttcctggagcaaactctttccagtgctctggtgctactgattgctcaagagaaggaaagaaacatatttgaccagcgtgccatagagaatgagctactggccaggaacatccatgtgatccgacgaacatttgaagatatctctgaaaaggggtctctggaccaagaccgaaggctgtttgtggatggccaggaaattgctgtggtttacttccgggatggctacatgcctcgtcagtacagtctacagaattgggaagcacgtctactgctggagaggtcacatgctgccaagtgcccagacattgccacccagctggctgggactaagaaggtgcagcaggagctaagcaggccgggcatgctggagatgttgctccctggccagcctgaggctgtggcccgcctccgcgccacctttgctggcctctactcactggatgtgggtgaagaaggggaccaggccatcgccgaggcccttgctgcccctagccggtttgtgctaaagccccagagagagggtggaggtaacaacctatatggggaggaaatggtacaggccctgaaacagctgaaggacagtgaggagagggcctcctacatcctcatggagaagatcgaacctgagccttttgagaattgcctgctacggcctggcagccctgcccgagtggtccagtgcatttcagagctgggcatctttggggtctatgtcaggcaggaaaagacactcgtgatgaacaagcacgtggggcatctacttcgaaccaaagccatcgagcatgcagatggtggtgtggcagcgggagtggcagtcctggacaacccataccctgtgtga

SEQ ID NO: 12483 - DNA, 1780 bp, Homo sapiens
  source 1..1780: mol_type = unassigned DNA
agtaaccaaatcaaaatcaaaaggcaaggaaactggagtgtgagctcctgatgcatggaagggcctgggcttgaacatcaaccagcaaggagcaggcttccatgtggtgagctatgccccattcacgctcttcccctcactggtccccagtgccctgctggagcaagcctatgctgtgcagatggacttcaacctgctagtggatgctgtcagccagaacgctgccttcctggagcaaactctttccagcaccatcaaacaggatgactttaccgctcgtctctttgacatccacaagcaagtcctaaaagagggcattgcccaggtaaccattcccagccctactccagtctgtaacctgtccctcccatctctgtttgttttctgttttgcttgaagaatttggtccaggccctcagctcatgggaatctgcctctcactggtcctcactgggtttatcccagtgaccaattctaggatgaccagaagaatgattccactgggcttgggagtgtttgctggtacctctaatctctgtgtagagttcatggtacctgtgtgctctgtggctaggtcctcagagtcagtccctgggcaggtactgtcagccttcagttttccccacagactgtgttcctgggcctgaatcgctcagactacatgttccagcgcagcgcagatggctccccagccctgaaacagatcgaaatcaacaccatctctgccagctttgggggcctggcctcccggaccccagctgtgcaccgacatgttctcagtgtcctgagtaagaccaaagaagctggcaagatcctctctaataatcccagcaagggactggccctgggaattgccaaagcctgggagctctacggctcacccaatgctctggtgctactgattgctcaagagaaggaaagaaacatatttgaccagcgtgccatagagaatgagctactggccaggaacatccatgtgatccgacgaacatttgaagatatctctgaaaaggggtctctggaccaagaccgaaggctgtttgtggatggccaggaaattgctgtggtttacttccgggatggctacatgcctcgtcagtacagtctacagaattgggaagcacgtctactgctggagaggtcacatgctgccaagtgcccagacattgccacccagctggctgggactaagaaggtgcagcaggagctaagcaggccgggcatgctggagatgttgctccctggccagcctgaggctgtggcccgcctccgcgccacctttgctggcctctactcactggatgtgggtgaagaaggggaccaggccatcgccgaggcccttgctgcccctagccggtttgtgctaaagccccagagagagggtggaggtaacaacctatatggggaggaaatggtacaggccctgaaacagctgaaggacagtgaggagagggcctcctacatcctcatggagaagatcgaacctgagccttttgagaattgcctgctacggcctggcagccctgcccgagtggtccagtgcatttcagagctgggcatctttggggtctatgtcaggcaggaaaagacactcgtgatgaacaagcacgtggggcatctacttcgaaccaaagccatcgagcatgcagatggtggtgtggcagcgggagtggcagtcctggacaacccataccctgtgtgagggcacaaccaggccacgggaccttctatcctctgtatttgtcattcctctcctagccctcctgaggggtatcctcct

SEQ ID NO: 12484 - DNA, 1338 bp, Homo sapiens
  source 1..1338: mol_type = unassigned DNA
agagcatgtcgggaccgggagggccggccggcccggggcgggggggactgggcaggaggggtcgggctcagggaactgcaactcccagcagcccccaggtacggggcgtggcgggagagctgggcgagccagaggcgaccggaaggatctttctagtccagcccctcgctttacccggacgaaagacacgggcctgattcgtcgagtctcactgagccttagtcgtcggcaggtcccaggcgcgaagtttctcggcctggaggagggggtcgcgcgaagtgccagatgcaggcggggaagcccatcctctattcctatttccgaagctcctgctcatggagagttcgaattgctctggccttgaaaggcatcgactacgagacggtgcccatcaatctcataaaggatgggggccaacagttttctaaggacttccaggcactgaatcctatgaagcaggtgccaaccctgaagattgatggaatcaccattcaccagtcactggccatcattgagtatctagaggagatgcgtcccactccgcgacttctgcctcaggacccaaagaagagggccagcgtgcgtatgatttctgacctcatcgctggtggcatccagcccctgcagaacctgtctgtcctgaagcaagtgggagaggagatgcagctgacctgggcccagaacgccatcacttgtggctttaacgccctggagcagatcctacagagcacagcgggcatatactgtgtaggagacgaggtgaccatggctgatctgtgcttggtgcctcaggtggcaaatgctgaaagattcaaggtggatctcaccccctaccctaccatcagctccatcaacaagaggctgctggtcttggaggccttccaggtgtctcacccctgccggcagccagatacacccactgagctgagggcctagctcccaaatcctgccccgttggcacagggccacaggagcagaagctgggtgggctgaagaggcctggaaacgagagtcttaattgaggagatgggagactcgaactctagccctggatctgccttcctgctgaaacttgttccacctcagtcccctcatctgtcacacgcatgtggggtggagtagggagatgcggggagcagggtgggcaggaatactgttatctatgtgacggggcagtcgtgaggctgagatgagaatgcggattaaaatgcctggcgtgctcaccgtaacaccacggggaaggctgtgtgccttttctcatccgcttttgttgtgtgtgactccaaagaatgcccgcgctgaaatttggcgtgaattaaactgaagcccaggcctcta

SEQ ID NO: 12485 - DNA, 867 bp, Homo sapiens
  source 1..867: mol_type = unassigned DNA
gaaggatctttctagtccagcccctcgctttacccggacgaaagacacgggcctgattcgtcgagtctcactgagccttagtcgtcggcaggtcccaggcgcgaagtttctcggcctggaggagggggtcgcgcgaagtgccagatgcaggcggggaagcccatcctctattcctatttccgaagctcctgctcatggagagttcgaattgctctggccttgaaaggcatcgactacgagacggtgcccatcaatctcataaaggatgggggccaacagttttctaaggacttccaggcactgaatcctatgaagcaggtgccaaccctgaagattgatggaatcaccattcaccagtcaaacctgtctgtcctgaagcaagtgggagaggagatgcagctgacctgggcccagaacgccatcacttgtggctttaacgccctggagcagatcctacagagcacagcgggcatatactgtgtaggagacgaggtgaccatggctgatctgtgcttggtgcctcaggtggcaaatgctgaaagattcaaggtggatctcaccccctaccctaccatcagctccatcaacaagaggctgctggtcttggaggccttccaggtgtctcacccctgccggcagccagatacacccactgagctgagggcctagctcccaaatcctgccccgttggcacagggccacaggagcagaagctgggtgggctgaagaggcctggaaacgagagtcttaattgaggagatgggagactcgaactctagccctggatctgccttcctgctgaaacttgttccacctcagtcccctcatctgtcacacgcatgtggggtggagtagggagatgcgggg

SEQ ID NO: 12486 - DNA, 1010 bp, Homo sapiens
  source 1..1010: mol_type = unassigned DNA
gggagagctgggcgagccagaggcgaccggaaggatctttctagtccagcccctcgctttacccggacgaaagacacgggcctgattcgtcgagtctcactgagccttagtcgtcggcaggtcccaggcgcgaagtttctcggcctggaggagggggtcgcgcgaagtgccagatgcaggcggggaagtggtcaccagcagtccctgtcccttggcaccaggagtccctgtagcctggctaggtaaggaaagggagttgcatctccaaataaggaagatccagttgtggccacccaattcctcctcttcgaaagacactttctgcccatcacctgctttctgtgccaggaccatctttactttctccacaaaagcccatcctctattcctatttccgaagctcctgctcatggagagttcgaattgctctggccttgaaaggcatcgactacgagacggtgcccatcaatctcataaaggatgggggccaacagttttctaaggacttccaggcactgaatcctatgaagcaggtgccaaccctgaagattgatggaatcaccattcaccagtcactggccatcattgagtatctagaggagatgcgtcccactccgcgacttctgcctcaggacccaaagaagagggccagcgtgcgtatgatttctgacctcatcgctggtggcatccagcccctgcagaacctgtctgtcctgaagcaagtgggagaggagatgcagctgacctgggcccagaacgccatcacttgtggctttaacgccctggagcagatcctacagagcacagcgggcatatactgtgtaggagacgaggtgaccatggctgatctgtgcttggtgcctcaggtggcaaatgctgaaagattcaaggtggatctcaccccctaccctaccatcagctccatcaacaagaggctgctggtcttggaggccttccaggtgtctcacccctgccggcagccagatacacccactgagctgagggcctag

SEQ ID NO: 12487 - DNA, 1424 bp, Homo sapiens
  source 1..1424: mol_type = unassigned DNA
ccgggagggttgggccagaggaggcggtcctggtagggagtgcgtagcagggtggagtcgctgtccggtcgcgcttcacttctgctccgccctccctgctccccataacagacccctccctccactaaggcttccaaacgtcgccccaagcctcccaatttctcgcagcccttcatgctcttctcttggccctagcaggagtggtcaccagcagtccctgtcccttggcaccaggagtccctgtagcctggctaggtaaggaaagggagttgcatctccaaataaggaagatccagttgtggccacccaattcctcctcttcgaaagacactttctgcccatcacctgctttctgtgccaggaccatctttactttctccacaaaagcccatcctctattcctatttccgaagctcctgctcatggagagttcgaattgctctggccttgaaaggcatcgactacgagacggtgcccatcaatctcataaaggatgggggccaacagttttctaaggacttccaggcactgaatcctatgaagcaggtgccaaccctgaagattgatggaatcaccattcaccagtcactggccatcattgagtatctagaggagatgcgtcccactccgcgacttctgcctcaggacccaaagaagagggccagcgtgcgtatgatttctgacctcatcgctggtggcatccagcccctgcagaacctgtctgtcctgaagcaagtgggagaggagatgcagctgacctgggcccagaacgccatcacttgtggctttaacgccctggagcagatcctacagagcacagcgggcatatactgtgtaggagacgaggtgaccatggctgatctgtgcttggtgcctcaggtggcaaatgctgaaagattcaaggtggatctcaccccctaccctaccatcagctccatcaacaagaggctgctggtcttggaggccttccaggtgtctcacccctgccggcagccagatacacccactgagctgagggcctagctcccaaatcctgccccgttggcacagggccacaggagcagaagctgggtgggctgaagaggcctggaaacgagagtcttaattgaggagatgggagactcgaactctagccctggatctgccttcctgctgaaacttgttccacctcagtcccctcatctgtcacacgcatgtggggtggagtagggagatgcggggagcagggtgggcaggaatactgttatctatgtgacggggcagtcgtgaggctgagatgagaatgcggattaaaatgcctggcgtgctcaccgtaacaccacggggaaggctgtgtgccttttctcatccgcttttgttgtgtgtgactccaaagaatgcccgcgctgaaatttggcgtgaattaaactgaagcccaggcctct

SEQ ID NO: 12488 - DNA, 714 bp, Homo sapiens
  source 1..714: mol_type = unassigned DNA
ccgggagggttgggccagaggaggcggtcctggtagggagtgcgtagcagggtggagtcgctgtccggtcgcgcttcacttctgctccgccctccctgctccccataacagacccctccctccactaaggcttccaaacgtcgccccaagcctcccaatttctcgcagcccttcatgctcttctcttggccctagcaggagtggtcaccagcagtccctgtcccttggcaccaggagtccctgtagcctggctaggtaaggaaagggagttgcatctccaaataaggaagatccagttgtggccacccaattcctcctcttcgaaagacactttctgcccatcacctgctttctgtgccaggaccatctttactttctccacaaaagcccatcctctattcctatttccgaagctcctgctcatggagagttcgaattgctctggccttgaaaggcatcgactacgagacggtgcccatcaatctcataaaggatgggggccaacagttttctaaggacttccaggcactgaatcctatgaagcaggtgccaaccctgaagattgatggaatcaccattcaccagtcactggccatcattgagtatctagaggagatgcgtcccactccgcgacttctgcctcaggacccaaagaagagggccagcgtgcgtatgatttctgacctcatcgctggtggcatccagcccctgcag

SEQ ID NO: 12489 - DNA, 564 bp, Homo sapiens
  source 1..564: mol_type = unassigned DNA
acatttcctgggaggctgagggtcaccacgataccatgacagagtctggcaaggtatggaaggcactctcaggctagctgcccctttgggggcctcttggacctcaggagctcaaaccagcataattttggagccaagggacctcatgagcctctcagagagcttggagtctgccctgatttgcacagatgcaggcctgagagaggaggcctggcaggacaggaagaaatggttgactcctcccaagctggagcccacccagcatgggttaacacgcgccttcatcctctctctcctcagcccatcctctattcctatttccgaagctcctgctcatggagagttcgaattgctctggccttgaaaggcatcgactacgagacggtgcccatcaatctcataaaggatgggggccaacagttttctaaggacttccaggcactgaatcctatgaagcaggtgccaaccctgaagattgatggaatcaccattcaccagtcactggccatcattgagtatctagaggagatgcgtcccactccgcgacttctgcctcaggaccca

SEQ ID NO: 12490 - DNA, 873 bp, Homo sapiens
  source 1..873: mol_type = unassigned DNA
gaccggaaggatctttctagtccagcccctcgctttacccggacgaaagacacgggcctgattcgtcgagtctcactgagccttagtcgtcggcaggtcccaggcgcgaagtttctcggcctggaggagggggtcgcgcgaagtgccagatgcaggcggggaagctctggccttgaaaggcatcgactacgagacggtgcccatcaatctcataaaggatgggggccaacagttttctaaggacttccaggcactgaatcctatgaagcaggtgccaaccctgaagattgatggaatcaccattcaccagtcactggccatcattgagtatctagaggagatgcgtcccactccgcgacttctgcctcaggacccaaagaagagggccagcgtgcgtatgatttctgacctcatcgctggtggcatccagcccctgcagaacctgtctgtcctgaagcaagtgggagaggagatgcagctgacctgggcccagaacgccatcacttgtggctttaacgccctggagcagatcctacagagcacagcgggcatatactgtgtaggagacgaggtgaccatggctgatctgtgcttggtgcctcaggtggcaaatgctgaaagattcaaggtggatctcaccccctaccctaccatcagctccatcaacaagaggctgctggtcttggaggccttccaggtgtctcacccctgccggcagccagatacacccactgagctgagggcctagctcccaaatcctgccccgttggcacagggccacaggagcagaagctgggtgggctgaagaggcctggaaacgagagtcttaattgaggagatgggagactcgaactctagccctggatctgcctt

SEQ ID NO: 12491 - DNA, 1875 bp, Homo sapiens
  source 1..1875: mol_type = unassigned DNA
gggggaagtgggggctgggaaggaaccacgggcccccgcccgaggcccatgggcccctcctaggcctttgcctgagcagtccggtgtcactaccgcagagcctcgaggagaagttccccaactttcccgcctctcagcctttgaaagaaagaaaggggagggggcaggccgcgtgcagccgcgagcggtgctgggctccggctccaattccccatctcagtcgttcccaaagtcctcctgtttcatccaagcgtgtaagggtccccgtccttgactccctagtgtcctgctgcccacagtccagtcctgggaaccagcaccgatcacctcccatcgggccaatctcagtcccttcccccctacgtcggggcccacacgctcggtgcgtgcccagttgaaccaggcggctgcggaaaaaaaaaagcggggagaaagtagggcccggctactagcggttttacgggcgcacgtagctcaggcctcaagaccttgggctgggactggctgagcctggcgggaggcggggtccgagtcaccgcctgccgccgcgcccccggtttctataaattgagcccgcagcctcccgcttcgctctctgctcctcctgttcgacagtcagccgcatcttcttttgcgtcgccagccgagccacatcgctcagacaccatggggaaggtgaaggtcggagtcaacggatttggtcgtattgggcgcctggtcaccagggctgcttttaactctggtaaagtggatattgttgccatcaatgaccccttcattgacctcaactacatggtttacatgttccaatatgattccacccatggcaaattccatggcaccgtcaaggctgagaacgggaagcttgtcatcaatggaaatcccatcaccatcttccaggagcgagatccctccaaaatcaagtggggcgatgctggcgctgagtacgtcgtggagtccactggcgtcttcaccaccatggagaaggctggggctcatttgcaggggggagccaaaagggtcatcatctctgccccctctgctgatgcccccatgttcgtcatgggtgtgaaccatgagaagtatgacaacagcctcaagatcatcagcaatgcctcctgcaccaccaactgcttagcacccctggccaaggtcatccatgacaactttggtatcgtggaaggactcatgaccacagtccatgccatcactgccacccagaagactgtggatggcccctccgggaaactgtggcgtgatggccgcggggctctccagaacatcatccctgcctctactggcgctgccaaggctgtgggcaaggtcatccctgagctgaacgggaagctcactggcatggccttccgtgtccccactgccaacgtgtcagtggtggacctgacctgccgtctagaaaaacctgccaaatatgatgacatcaagaaggtggtgaagcaggcgtcggagggccccctcaagggcatcctgggctacactgagcaccaggtggtctcctctgacttcaacagcgacacccactcctccacctttgacgctggggctggcattgccctcaacgaccactttgtcaagctcatttcctggtatgacaacgaatttggctacagcaacagggtggtggacctcatggcccacatggcctccaaggagtaagacccctggaccaccagccccagcaagagcacaagaggaagagagagaccctcactgctggggagtccctgccacactcagtcccccaccacactgaatctcccctcctcacagttgccatgtagaccccttgaagaggggaggggcctagggagccgcaccttgtcatgtaccatcaataaagtaccctgtgctcaacca

SEQ ID NO: 12492 - DNA, 1266 bp, Homo sapiens
  source 1..1266: mol_type = unassigned DNA
tgttcgacagtcagccgcatcttcttttgcgtcgccagccgagccacatcgctcagacaccatggggaaggtgaaggtcggagtcaacggatttggtcgtattgggcgcctggtcaccagggctgcttttaactctggtaaagtggatattgttgccatcaatgaccccttcattgacctcaactacatggtttacatgttccaatatgattccacccatggcaaattccatggcaccgtcaaggctgagaacgggaagcttgtcatcaatggaaatcccatcaccatcttccaggagtgagtggaagacagaatggaagaaatgcgagatccctccaaaatcaagtggggcgatgctggcgctgagtacgtcgtggagtccactggcgtcttcaccaccatggagaaggctggggctcatttgcaggggggagccaaaagggtcatcatctctgccccctctgctgatgcccccatgttcgtcatgggtgtgaaccatgagaagtatgacaacagcctcaagatcatcagcaatgcctcctgcaccaccaactgcttagcacccctggccaaggtcatccatgacaactttggtatcgtggaaggactcatgaccacagtccatgccatcactgccacccagaagactgtggatggcccctccgggaaactgtggcgtgatggccgcggggctctccagaacatcatccctgcctctactggcgctgccaaggctgtgggcaaggtcatccctgagctgaacgggaagctcactggcatggccttccgtgtccccactgccaacgtgtcagtggtggacctgacctgccgtctagaaaaacctgccaaatatgatgacatcaagaaggtggtgaagcaggcgtcggagggccccctcaagggcatcctgggctacactgagcaccaggtggtctcctctgacttcaacagcgacacccactcctccacctttgacgctggggctggcattgccctcaacgaccactttgtcaagctcatttcctggtatgacaacgaatttggctacagcaacagggtggtggacctcatggcccacatggcctccaaggagtaagacccctggaccaccagccccagcaagagcacaagaggaagagagagaccctcactgctggggagtccctgccacactcagtcccccaccacactgaatctcccctcctcacagttgccatgtagaccccttgaagaggggaggggcctagggagccgcaccttgtcatg

SEQ ID NO: 12493 - DNA, 1292 bp, Homo sapiens
  source 1..1292: mol_type = unassigned DNA
tgcaaccgggaaggaaatgaatgggcagccgttaggaaagcctgccggtgactaaccctgcgctcctgcctcgatgggtggagtcgcgtgtggcggggaagtcaggtggagcgaggctagctggcccgatttctcctccgggtgatgcttttcctagattattctctgatttggtcgtattgggcgcctggtcaccagggctgcttttaactctggtaaagtggatattgttgccatcaatgaccccttcattgacctcaactacatggtttacatgttccaatatgattccacccatggcaaattccatggcaccgtcaaggctgagaacgggaagcttgtcatcaatggaaatcccatcaccatcttccaggagcgagatccctccaaaatcaagtggggcgatgctggcgctgagtacgtcgtggagtccactggcgtcttcaccaccatggagaaggctggggctcatttgcaggggggagccaaaagggtcatcatctctgccccctctgctgatgcccccatgttcgtcatgggtgtgaaccatgagaagtatgacaacagcctcaagatcatcagcaatgcctcctgcaccaccaactgcttagcacccctggccaaggtcatccatgacaactttggtatcgtggaaggactcatgaccacagtccatgccatcactgccacccagaagactgtggatggcccctccgggaaactgtggcgtgatggccgcggggctctccagaacatcatccctgcctctactggcgctgccaaggctgtgggcaaggtcatccctgagctgaacgggaagctcactggcatggccttccgtgtccccactgccaacgtgtcagtggtggacctgacctgccgtctagaaaaacctgccaaatatgatgacatcaagaaggtggtgaagcaggcgtcggagggccccctcaagggcatcctgggctacactgagcaccaggtggtctcctctgacttcaacagcgacacccactcctccacctttgacgctggggctggcattgccctcaacgaccactttgtcaagctcatttcctggtatgacaacgaatttggctacagcaacagggtggtggacctcatggcccacatggcctccaaggagtaagacccctggaccaccagccccagcaagagcacaagaggaagagagagaccctcactgctggggagtccctgccacactcagtcccccaccacactgaatctcccctcctcacagttgccatgtagaccccttgaagaggggaggg

SEQ ID NO: 12494 - DNA, 1256 bp, Homo sapiens
  source 1..1256: mol_type = unassigned DNA
aggcgtgtgtgtcggccggggccactaggcgctcactgttctctccctccgcgcagccgagccacatcgctcagacaccatggggaaggtgaaggtcggagtcaacggatttggtcgtattgggcgcctggtcaccagggctgcttttaactctggtaaagtggatattgttgccatcaatgaccccttcattgacctcaactacatggtttacatgttccaatatgattccacccatggcaaattccatggcaccgtcaaggctgagaacgggaagcttgtcatcaatggaaatcccatcaccatcttccaggagcgagatccctccaaaatcaagtggggcgatgctggcgctgagtacgtcgtggagtccactggcgtcttcaccaccatggagaaggctggggctcatttgcaggggggagccaaaagggtcatcatctctgccccctctgctgatgcccccatgttcgtcatgggtgtgaaccatgagaagtatgacaacagcctcaagatcatcagcaatgcctcctgcaccaccaactgcttagcacccctggccaaggtcatccatgacaactttggtatcgtggaaggactcatgaccacagtccatgccatcactgccacccagaagactgtggatggcccctccgggaaactgtggcgtgatggccgcggggctctccagaacatcatccctgcctctactggcgctgccaaggctgtgggcaaggtcatccctgagctgaacgggaagctcactggcatggccttccgtgtccccactgccaacgtgtcagtggtggacctgacctgccgtctagaaaaacctgccaaatatgatgacatcaagaaggtggtgaagcaggcgtcggagggccccctcaagggcatcctgggctacactgagcaccaggtggtctcctctgacttcaacagcgacacccactcctccacctttgacgctggggctggcattgccctcaacgaccactttgtcaagctcatttcctggtatgacaacgaatttggctacagcaacagggtggtggacctcatggcccacatggcctccaaggagtaagacccctggaccaccagccccagcaagagcacaagaggaagagagagaccctcactgctggggagtccctgccacactcagtcccccaccacactgaatctcccctcctcacagttgccatgtagaccccttgaagaggggaggggcctagggagccgcaccttgtcat

SEQ ID NO: 12495 - DNA, 1348 bp, Homo sapiens
  source 1..1348: mol_type = unassigned DNA
ttcgacagtcagccgcatcttcttttgcgtcgccaggtgaagacgggcggagagaaacccgggaggctagggacggcctgaaggcggcaggggcgggcgcaggccggatgtgttcgcgccgctgcgggccgagccacatcgctcagacaccatggggaaggtgaaggtcggagtcaacggatttggtcgtattgggcgcctggtcaccagggctgcttttaactctggtaaagtggatattgttgccatcaatgaccccttcattgacctcaactacatggtttacatgttccaatatgattccacccatggcaaattccatggcaccgtcaaggctgagaacgggaagcttgtcatcaatggaaatcccatcaccatcttccaggagcgagatccctccaaaatcaagtggggcgatgctggcgctgagtacgtcgtggagtccactggcgtcttcaccaccatggagaaggctggggctcatttgcaggggggagccaaaagggtcatcatctctgccccctctgctgatgcccccatgttcgtcatgggtgtgaaccatgagaagtatgacaacagcctcaagatcatcagcaatgcctcctgcaccaccaactgcttagcacccctggccaaggtcatccatgacaactttggtatcgtggaaggactcatgaccacagtccatgccatcactgccacccagaagactgtggatggcccctccgggaaactgtggcgtgatggccgcggggctctccagaacatcatccctgcctctactggcgctgccaaggctgtgggcaaggtcatccctgagctgaacgggaagctcactggcatggccttccgtgtccccactgccaacgtgtcagtggtggacctgacctgccgtctagaaaaacctgccaaatatgatgacatcaagaaggtggtgaagcaggcgtcggagggccccctcaagggcatcctgggctacactgagcaccaggtggtctcctctgacttcaacagcgacacccactcctccacctttgacgctggggctggcattgccctcaacgaccactttgtcaagctcatttcctggtatgacaacgaatttggctacagcaacagggtggtggacctcatggcccacatggcctccaaggagtaagacccctggaccaccagccccagcaagagcacaagaggaagagagagaccctcactgctggggagtccctgccacactcagtcccccaccacactgaatctcccctcctcacagttgccatgtagaccccttgaagaggggaggggcctagggagccgcaccttgtcatgtaccatcaataaagtaccc

SEQ ID NO: 12496 - DNA, 926 bp, Homo sapiens
  source 1..926: mol_type = unassigned DNA
ctctgctcctcctgttcgacagtcagccgcatcttcttttgcgtcgccagccgagccacatcgctcagacaccatggggaaggtgaaggtcggagtcaacggatttggtcgtattgggcgcctggtcaccagggctgcttttaactctggtaaagtggatattgttgccatcaatgaccccttcattgacctcaactacatggtttacatgttccaatatgattccacccatggcaaattccatggcaccgtcaaggctgagaacgggaagcttgtcatcaatggaaatcccatcaccatcttccaggagcgagatccctccaaaatcaagtggggcgatgctggcgctgagtacgtcgtggagtccactggcgtcttcaccaccatggagaaggctggggctcatttgcaggggggagccaaaagggtcatcatctctgccccctctgctgatgcccccatgttcgtcatgggtgtgaaccatgagaagtatgacaacagcctcaagatcatcagcaatgcctcctgcaccaccaactgcttagcacccctggccaaggtcatccatgacaactttggtatcgtggaaggactcatgaccacagtccatgccatcactgccacccaacgggaagctcactggcatggccttccgtgtccccactgccaacgtgtcagtggtggacctgacctgccgtctagaaaaacctgccaaatatgatgacatcaagaaggtggtgaagcaggcgtcggagggccccctcaagggcatcctgggctacactggggagtccctgccacactcagtcccccaccacactgaatctcccctcctcacagttgccatgtagaccccttgaagaggggaggggcctagggagccgcaccttgtcatgtaccatcaataaagtaccctgtgctcaacc

SEQ ID NO: 12497 - DNA, 1492 bp, Homo sapiens
  source 1..1492: mol_type = unassigned DNA
gtcactgggtgctgtgacatcagggcaattagcccaggacccacagccctggcgctccgcacgcacctcggtaacatcacagcaggtccaggccaatgataaccttataagaggccatgtcgaagcgcgacatcgtcctcaccaatgtcaccgttgtccagttgctgcgacagccgtgcccggtgaccagagcaccgcccccacctgagcctaaggctgaagtagagccccagccacaaccagagcccacaccagtcagggaggaaataaagccaccaccgccaccactgcctcctcaccccgctactcctcctcctaagatggtgtctgtggcccgggagctgactgtgggcatcaatggatttggacgcatcggtcgcctggtcctgcgcgcctgcatggagaagggtgttaaggtggtggctgtgaatgatccattcattgacccggaatacatggtgtacatgtttaagtatgactccacccacggccgatacaagggaagtgtggaattcaggaatggacaactggtcgtggacaaccatgagatctctgtctaccagtgcaaagagcccaaacagatcccctggagggctgtcgggagcccctacgtggtggagtccacaggcgtgtacctctccatacaggcagcttcggaccacatctctgcaggtgctcaacgtgtggtcatctccgcgccctcaccggatgcaccaatgttcgtcatgggtgtcaatgaaaatgactataaccctggctccatgaacattgtgagcaacgcgtcctgcaccaccaactgtttggctcccctcgccaaagtcatccacgagcgatttgggatcgtggaagggttgatgaccacagtccattcctacacggccacccagaagacagtggacgggccatcaaggaaggcctggcgagatgggcggggtgcccaccagaacatcatcccagcctccactggggctgcgaaagctgtgaccaaagtcatcccagagctcaaagggaagctgacagggatggcgttccgggtaccaaccccggatgtgtctgtcgtggacctgacctgccgcctcgcccagcctgccccctactcagccatcaaggaggctgtaaaagcagcagccaaggggcccatggctggcatccttgcctacaccgaggatgaggtcgtctctacggacttcctcggtgatacccactcgtccatcttcgatgctaaggccggcattgcgctcaatgacaatttcgtgaagctcatttcatggtacgacaacgaatatggctacagtcaccgggtggtcgacctcctccgctacatgttcagccgagacaagtgaaacgggaaggtcctttctttccttcccaggggccggggccggaacatgtgcctcccgttccagcatctggctgcccgggggaggaaggacacccggggcgggcgccccacgccgatgggtccatggtgaaataaaaaacagtgctcacg

SEQ ID NO: 12498 - DNA, 1200 bp, Homo sapiens
  source 1..1200: mol_type = unassigned DNA
caccccctagtacttccgttctccagcgctgggcaccgcggccggagctgtgggctggcagccatgggtgccaggcagtgctgagagcagtggggcatggctgcagccctgcaggtcctgccccgcttggcccgagcccccttgcatccactcctctggcggggctcagtggcccgtctggccagcagcatggccttggcagagcaggccaggcagctgtttgagagtgctgtaggtgcagtgctgccgggccccatgctgcaccgggcactatccttggaccctggtggcagacagctgaaggtgcgggaccggaactttcagctgaggcaaaacctctacctggtgggctttggcaaggctgtgctgggtatggcagctgcagctgaggaactactgggccagcatcttgtgcagggcgtgatcagcgttcccaaggggatccgtgctgccatggagcgtgccggcaagcaggagatgctgctgaagccacatagccgtgtccaggtattcgagggtgcggaggacaacctcccggaccgcgatgcgctgcgggctgcactggccatccagcaactggctgagggactcacagctgatgacctgctgctcgtgctgatctcaggtgggggttcagctctgctgcctgcccccatcccacctgtcacactggaggagaagcagacactcactagactgctggcagcccgtggagccaccatccaggagttgaacaccattcggaaggccctgtcccagctcaagggtggggggctggctcaggccgcctaccctgcccaggtggtgagcctcatcctgtcagatgtggtgggggaccctgtggaggtgattgccagtggccccaccgtggccagttcccacaatgtgcaagattgcctgcatatcctcaatcgctacggcctccgtgcagccctgccacgttctgtgaagactgtgctgtctcgggccgactctgacccccatgggccacacacctgtggccatgtcctgaatgtgatcattggctctaatgtgctggcgctagctgaggcccagcggcaggccgaggcactgggctaccaggctgtggtgctgagtgcagccatgcaagggtggggcacacctgctgcacacagggatgacaggtaccaatgtcatggacacccacctcttgttcctgcggcctcggtgatggcatag

SEQ ID NO: 12499 - DNA, 3622 bp, Homo sapiens
  source 1..3622: mol_type = unassigned DNA
caccccctagtacttccgttctccagcgctgggcaccgcggccggagctgtgggctggcagccatgggtgccaggcagtgctgagagcagtggggcatggctgcagccctgcaggtcctgccccgcttggcccgagcccccttgcatccactcctctggcggggctcagtggcccgtctggccagcagcatggccttggcagagcaggccaggcagctgtttgagagtgctgtaggtgcagtgctgccgggccccatgctgcaccgggcactatccttggaccctggtggcagacagctgaaggtgcgggaccggaactttcagctgaggcaaaacctctacctggtgggctttggcaaggctgtgctgggtatggcagctgcagctgaggaactactgggccagcatcttgtgcagggcgtgatcagcgttcccaaggggatccgtgctgccatggagcgtgccggcaagcaggagatgctgctgaagccacatagccgtgtccaggtattcgagggtgcggaggacaacctcccggaccgcgatgcgctgcgggctgcactggccatccagcaactggctgagggactcacagctgatgacctgctgctcgtgctgatctcaggtggtgagcctcatcctgtcagatgtggtgggggaccctgtggaggtgattgccagtggccccaccgtggccagttcccacaatgtgcaagattgcctgcatatcctcaatcgctacggcctccgtgcagccctgccacgttctgtgaagactgtgctgtctcgggccgactctgacccccatgggccacacacctgtggccatgtcctgaatgtgatcattggctctaatgtgctggcgctagctgaggcccagcggcaggccgaggcactgggctaccaggctgtggtgctgagtgcagccatgcaaggtgatgtaaaaagtatggcccagttctacgggctgctggcccatgtggctagaacccgcctcaccccatccatggctggggcttctgtggaggaagatgcacagctccatgagctggcagctgagcttcagatcccagacctgcagctggaggaggctctggagaccatggcatggggaaggggcccagtctgcctgctggctggtggcgagcccacagtacagctgcagggctcgggcaggggtggccggaaccaggaactggccctgcgtgttggagcagagttgagaaggtggccgctggggccgatagatgtgctgtttttgagcggtggcaccgatgggcaggatgggcccacagaggctgctggggcctgggtcacacctgagcttgccagccaggctgcagctgagggcctggacatagccaccttcctagcccacaatgactcacataccttcttctgctgcctccagggtggggcacacctgctgcacacagggatgacaggtaccaatgtcatggacacccacctcttgttcctgcggcctcggtgatggcataggtcacattttgggagttcagaggaggcctacaagggcaaggtcagatggcagagcaaggttggtcctcagggcctctctaagccttagggcccctcctctccttggccttggctgtttggttaactgtcaccttccactcagggcctctgctctatatctattcccttccagccagactggcagatgggggcttccccctacccctgaggatgaggacaagcccctcggccagttcagcgttcccgtgcttctcccttgggcagcctctctcttgagcccctcaccctgtttctttctgtgaagcgagaatgtctgaaaataaataggaccatgccatgggttctcagtgcgccttccctcagagtgaggcctcacgggggagccgctgggaggggagcgtggtacggctgcagccacagtaccagggcctggcaggactcttaacacccctctactgggctgggtacgtgcaggatgtgcctcgcataacgggagcctgtgcccatccctctggagtgtgtgagggttgagcttggctcctgacagctttgatgtgcgtgagcagagaccccagggaggacaggcctaaagactgcagtctggggtgaccagccacccacccacccaaccatgactccaccatggcactgtcaccatggcttctccagcctcagcttgtaggcctcgttggatggatgtcctttctgtctttggacagcccttagccacatactgcacttctggttgagctgaagtttgtcccaccccccagtgctgtttccttgtgacagcccttgtcctaggctgaacatccctagttccttcagccactcctctggggaccaagtccagaccctgaagtcagcccttcagtgggggtcccagcactgggatggtgggtccagccagtgatgaggtccagtgacccacacctcttcctgtgaccactggcgggagaagaggcaagtgggaatagaggaacggctgtgttggcctggccagcagcctgggttgagagagggaggtgccactgtcctgcctccttttgagcccccttgctcagtgtcagaaccctccgctggctgtccccgccgtgcgccacggctccaatccctatatgagtgagcagtagaatcacataggaataaaaagccatagagaacagcgaggcctggggctgctcttgcaggcacttcttccaccccaaccctcccctcctccctgagggtgtggaggggccctgggccagggctggcaggactttcccctgggaagggtttcccttccccacctgggctctgggcagcctagcttgcagacagttcatgacctgggggcctggctcacacagggcaggctggagattgggagggaggtaaacgtggtaagcgggctctggggaccagggaggtttaggaaaaggggagcttgcaccccactgggatgcgcaggcaccgcttcctttccttctgtgctggcatggagttcctgctgactagggtcacagtctctggggttatggtgatcctcgcatgatcctgtgccgtggtgctcctctggcagcgtctacatgtagcctgttcctgcctcagtccttgctcttgggagcatgagtattggcactgggttccaagttccaggcaaaagcaggataggagagctggggcaggggctgcaggagctgagggcctggcagccatgtccccagtgtgtgtgtgggtggtaggtgtgtgagtatacagacgttggtgttggcgtactcagagtgggaatgcatctctgagtgtacacatagatacttagtacagggcacatgactccctgcatccctgctgagggctttgggtatggataggatcttgcaggaggttccccctgctctacattgaccccttccctatacttctgtttgtaggggctgggaggccagggcccggattggaccccatagggccaaatggtctgtgagcctaacccgttagatttgctcactggataccccagagataagaaaggatgtatttggccacagtctaaatgctgagatgagaaaaccctgcacagtgaatgttttgataggattcattacttgctccataaatgtcaattttggatcattga

SEQ ID NO: 12500 - DNA, 3504 bp, Homo sapiens
  source 1..3504: mol_type = unassigned DNA
atggctgcagccctgcaggtcctgccccgcttggcccgagcccccttgcatccactcctctggcggggctcagtggcccgtctggccagcagcatggccttggcagagcaggccaggcagctgtttgagagtgctgtaggtgcagtgctgccgggccccatgctgcaccgggcactatccttggaccctggtggcagacagctgaaggtgcgggaccggaactttcagctgaggcaaaacctctacctggtgggctttggcaaggctgtgctgggtatggcagctgcagctgaggaactactgggccagcatcttgtgcagggcgtgatcagcgttcccaaggggatccgtgctgcccccatcccacctgtcacactggaggagaagcagacactcactagactgctggcagcccgtggagccaccatccaggagttgaacaccattcggaaggccctgtcccagctcaagggtggggggctggctcaggccgcctaccctgcccaggtggtgagcctcatcctgtcagatgtggtgggggaccctgtggaggtgattgccagtggccccaccgtggccagttcccacaatgtgcaagattgcctgcatatcctcaatcgctacggcctccgtgcagccctgccacgttctgtgaagactgtgctgtctcgggccgactctgacccccatgggccacacacctgtggccatgtcctgaatgtgatcattggctctaatgtgctggcgctagctgaggcccagcggcaggccgaggcactgggctaccaggctgtggtgctgagtgcagccatgcaaggtgatgtaaaaagtatggcccagttctacgggctgctggcccatgtggctagaacccgcctcaccccatccatggctggggcttctgtggaggaagatgcacagctccatgagctggcagctgagcttcagatcccagacctgcagctggaggaggctctggagaccatggcatggggaaggggcccagtctgcctgctggctggtggcgagcccacagtacagctgcagggctcgggcaggggtggccggaaccaggaactggccctgcgtgttggagcagagttgagaaggtggccgctggggccgatagatgtgctgtttttgagcggtggcaccgatgggcaggatgggcccacagaggctgctggggcctgggtcacacctgagcttgccagccaggctgcagctgagggcctggacatagccaccttcctagcccacaatgactcacataccttcttctgctgcctccagggtggggcacacctgctgcacacagggatgacaggtaccaatgtcatggacacccacctcttgttcctgcggcctcggtgatggcataggtcacattttgggagttcagaggaggcctacaagggcaaggtcagatggcagagcaaggttggtcctcagggcctctctaagccttagggcccctcctctccttggccttggctgtttggttaactgtcaccttccactcagggcctctgctctatatctattcccttccagccagactggcagatgggggcttccccctacccctgaggatgaggacaagcccctcggccagttcagcgttcccgtgcttctcccttgggcagcctctctcttgagcccctcaccctgtttctttctgtgaagcgagaatgtctgaaaataaataggaccatgccatgggttctcagtgcgccttccctcagagtgaggcctcacgggggagccgctgggaggggagcgtggtacggctgcagccacagtaccagggcctggcaggactcttaacacccctctactgggctgggtacgtgcaggatgtgcctcgcataacgggagcctgtgcccatccctctggagtgtgtgagggttgagcttggctcctgacagctttgatgtgcgtgagcagagaccccagggaggacaggcctaaagactgcagtctggggtgaccagccacccacccacccaaccatgactccaccatggcactgtcaccatggcttctccagcctcagcttgtaggcctcgttggatggatgtcctttctgtctttggacagcccttagccacatactgcacttctggttgagctgaagtttgtcccaccccccagtgctgtttccttgtgacagcccttgtcctaggctgaacatccctagttccttcagccactcctctggggaccaagtccagaccctgaagtcagcccttcagtgggggtcccagcactgggatggtgggtccagccagtgatgaggtccagtgacccacacctcttcctgtgaccactggcgggagaagaggcaagtgggaatagaggaacggctgtgttggcctggccagcagcctgggttgagagagggaggtgccactgtcctgcctccttttgagcccccttgctcagtgtcagaaccctccgctggctgtccccgccgtgcgccacggctccaatccctatatgagtgagcagtagaatcacataggaataaaaagccatagagaacagcgaggcctggggctgctcttgcaggcacttcttccaccccaaccctcccctcctccctgagggtgtggaggggccctgggccagggctggcaggactttcccctgggaagggtttcccttccccacctgggctctgggcagcctagcttgcagacagttcatgacctgggggcctggctcacacagggcaggctggagattgggagggaggtaaacgtggtaagcgggctctggggaccagggaggtttaggaaaaggggagcttgcaccccactgggatgcgcaggcaccgcttcctttccttctgtgctggcatggagttcctgctgactagggtcacagtctctggggttatggtgatcctcgcatgatcctgtgccgtggtgctcctctggcagcgtctacatgtagcctgttcctgcctcagtccttgctcttgggagcatgagtattggcactgggttccaagttccaggcaaaagcaggataggagagctggggcaggggctgcaggagctgagggcctggcagccatgtccccagtgtgtgtgtgggtggtaggtgtgtgagtatacagacgttggtgttggcgtactcagagtgggaatgcatctctgagtgtacacatagatacttagtacagggcacatgactccctgcatccctgctgagggctttgggtatggataggatcttgcaggaggttccccctgctctacattgaccccttccctatacttctgtttgtaggggctgggaggccagggcccggattggaccccatagggccaaatggtctgtgagcctaacccgttagatttgctcactggataccccagagataagaaaggatgtatttggccacagtctaaatgctgagatgagaaaaccctgcacagtgaatgttttgataggattcattacttgctccataaatgtcaattttggatcattga

SEQ ID NO: 12501 - DNA, 1982 bp, Homo sapiens
  source 1..1982: mol_type = unassigned DNA
cgcggccggagctgtgggctggcagccatgggtgccaggcagtgctgagagcagtggggcatggctgcagccctgcaggtcctgccccgcttggcccgagcccccttgcatccactcctctggcggggctcagtggcccgtctggccagcagcatggccttggcagagcaggccaggcagctgtttgagagtgctgtaggtgcagtgctgccgggccccatgctgcaccgggcactatccttggaccctggtggcagacagctgaaggtgcgggaccggaactttcagctgaggcaaaacctctacctggtgggctttggcaaggctgtgctgggtatggcagctgcagctgaggaactactgggccagcatcttgtgcagggcgtgatcagcgttcccaaggggatccgtgctgccatggagcgtgccggcaagcaggagatgctgctgaagccacatagccgtgtccaggtattcgagggtgcggaggacaacctcccggaccgcgatgcgctgcgggctgcactggccatccagcaactggctgagggactcacagctgatgacctgctgctcgtgctgatctcaggtgggggttcagctctgctgcctgcccccatcccacctgtcacactggaggagaagcagacactcactagactgctggcagcccgtggagccaccatccaggagttgaacaccattcggaaggccctgtcccagctcaagggtggggggctggctcaggccgcctaccctgcccaggtggtgagcctcatcctgtcagatgtggtgggggaccctgtggaggtgattgccagtggccccaccgtggccagttcccacaatgtgcaagattgcctgcatatcctcaatcgctacggcctccgtgcagccctgccacgttctgtgaagactgtgctgtctcgggccgactctgacccccatgggccacacacctgtggccatgtcctgaatgtgatcattggctctaatgtgctggcgctagctgaggcccagcggcaggccgaggcactgggctaccaggctgtggtgctgagtgcagccatgcaaggtgatgtaaaaagtatggcccagttctacgggctgctggcccatgtggctagaacccgcctcaccccatccatggctggggcttctgtggaggaagatgcacagctccatgagctggcagctgagcttcagatcccagacctgcagctggaggaggctctggagaccatggcatggggaaggggcccagtctgcctgctggctggtggcgagcccacagtacagctgcagggctcgggcaggggtggccggaaccaggaactggccctgcgtgttggagcagagttgagaaggtggccgctggggccgatagatgtgctgtttttgagcggtggcaccgatgggcaggatgggcccacagaggctgctggggcctgggtcacacctgagcttgccagccaggctgcagctgagggcctggacatagccaccttcctagcccacaatgactcacataccttcttctgctgcctccagggtggggcacacctgctgcacacagggatgacaggtaccaatgtcatggacacccacctcttgttcctgcggcctcggtgatggcataggtcacattttgggagttcagaggaggcctacaagggcaaggtcagatggcagagcaaggttggtcctcagggcctctctaagccttagggcccctcctctccttggccttggctgtttggttaactgtcaccttccactcagggcctctgctctatatctattcccttccagccagactggcagatgggggcttccccctacccctgaggatgaggacaagcccctcggccagttcagcgttcccgtgcttctcccttgggcagcctctctcttgagcccctcaccctgtttctttctgtgaagcgagaatgtctgaaaataaataggaccatgccatgggt

SEQ ID NO: 12502 - DNA, 889 bp, Homo sapiens
  source 1..889: mol_type = unassigned DNA
gcagaatggaactcttgctaagccagagctgtatttggtggcccatggtgggagagggaagaacaataataagttgtggaataaaagccatggagaggagcgggaattacttaatctggctccagaagggggagatgctgctgaagccacatagccgtgtccaggtattcgagggtgcggaggacaacctcccggaccgcgatgcgctgcgggctgcactggccatccagcaactggctgagggactcacagctgatgacctgctgctcgtgctgatctcaggtgggggttcagctctgctgcctgcccccatcccacctgtcacactggaggagaagcagacactcactagactgctggcagcccgtggagccaccatccaggagttgaacaccattcggaaggccctgtcccagctcaagggtggggggctggctcaggccgcctaccctgcccaggtggtgagcctcatcctgtcagatgtggtgggggaccctgtggaggtgattgccagtggccccaccgtggccagttcccacaatgtgcaagattgcctgcatatcctcaatcgctacggcctccgtgcagccctgccacgttctgtgaagactgtgctgtctcgggccgactctgacccccatgggccacacacctgtggccatgtcctgaatgtgatcattggctctaatgtgctggcgctagctgaggcccagcggcaggccgaggcactgggctaccaggctgtggtgctgagtgcagccatgcaagggtggggcacacctgctgcacacagggatgacaggtaccaatgtcatggacacccacctcttgttcctgcggcctcggtgatggcataggtcacattttgggagttcagaggaggcctaca

SEQ ID NO: 12503 - DNA, 992 bp, Homo sapiens
  source 1..992: mol_type = unassigned DNA
ccgttctccagcgctgggcaccgcggccggagctgtgggctgggagatgctgctgaagccacatagccgtgtccaggtattcgagggtgcggaggacaacctcccggaccgcgatgcgctgcgggctgcactggccatccagcaactggctgagggactcacagctgatgacctgctgctcgtgctgatctcaggtgggggttcagctctgctgcctgcccccatcccacctgtcacactggaggagaagcagacactcactagactgctggcagcccgtggagccaccatccaggagttgaacaccattcggaaggccctgtcccagctcaagggtggggggctggctcaggccgcctaccctgcccaggtggtgagcctcatcctgtcagatgtggtgggggaccctgtggaggtgattgccagtggccccaccgtggccagttcccacaatgtgcaagattgcctgcatatcctcaatcgctacggcctccgtgcagccctgccacgttctgtgaagactgtgctgtctcgggccgactctgacccccatgggccacacacctgtggccatgtcctgaatgtgatcattggctctaatgtgctggcgctagctgaggcccagcggcaggccgaggcactgggctaccaggctgtggtgctgagtgcagccatgcaagggtggggcacacctgctgcacacagggatgacaggtaccaatgtcatggacacccacctcttgttcctgcggcctcggtgatggcataggtcacattttgggagttcagaggaggcctacaagggcaaggtcagatggcagagcaagccagactggcagatgggggcttccccctacccctgaggatgaggacaagcccctcggccagttcagcgttcccgtgcttctcccttgggcagcctctctcttgagcccctcaccctgtttctttctgtgaagcgagaatgtctgaaaataaataggaccatgcca

SEQ ID NO: 12504 - DNA, 935 bp, Homo sapiens
  source 1..935: mol_type = unassigned DNA
caccccctagtacttccgttctccagcgctgggcaccgcggccggagctgtgggctggcagccatgggtgccaggcagtgctgagagcagtggggcatggctgcagccctgcaggtcctgccccgcttggcccgagcccccttgcatccactcctctggcggggctcagtggcccgtctggccagcagcatggccttggcagagcaggccaggcagctgtttgagagtgctgtaggtgcagtgctgccgggccccatgctgcaccgggcactatccttggaccctggtggcagacagctgaaggtgcgggaccggaactttcagctgaggcaaaacctctacctggtgggctttggcaaggctgtgctgggtatggcagctgcagctgaggaactactgggccagcatcttgtgcagggcgtgatcagcgttcccaaggggatccgtgctgccatggagcgtgccggcaagcaggagatgctgctgaagccacatagccgtgtccaggtattcgagggtgcggaggacaacctcccggaccgcgatgcgctgcgggctgcactggccatccagcaactggctgagggactcacagctgatgacctgctgctcgtgctgatctcagggtggggcacacctgctgcacacagggatgacaggtaccaatgtcatggacacccacctcttgttcctgcggcctcggtgatggcataggtcacattttgggagttcagaggaggcctacaagggcaaggtcagatggcagagcaagccagactggcagatgggggcttccccctacccctgaggatgaggacaagcccctcggccagttcagcgttcccgtgcttctcccttgggcagcctctctcttgagcccctcaccctgtttctttctgtgaagcgagaatgtctgaaaataaataggaccatgc

SEQ ID NO: 12505 - DNA, 1304 bp, Homo sapiens
  source 1..1304: mol_type = unassigned DNA
gtgccaggcagtgctgagagcagtggggcatggctgcagccctgcaggtcctgccccgcttggcccgagcccccttgcatccactcctctggcggggctcagtggcccgtctggccagcagcatggccttggcagagcaggccaggcagctgtttgagagtgctgtaggtgcagtgctgccgggccccatgctgcaccgggcactatccttggaccctggtggcagacagctgaaggtgcgggaccggaactttcagctgaggcaaaacctctacctggtgggctttggcaaggctgtgctgggtatggcagctgcagctgaggaactactgggccagcatcttgtgcagggcgtgatcagcgttcccaaggggatccgtgctgccatggagcgtgccggcaagcaggagatgctgctgaagccacatagccgtgtccaggtattcgagggtgcggaggacaacctcccggaccgcgatgcgctgcgggctgcactggccatccagcaactggctgagggactcacagctgatgacctgctgctcgtgctgatctcaggtggtgagcctcatcctgtcagatgtggtgggggaccctgtggaggtgattgccagtggccccaccgtggccagttcccacaatgtgcaagattgcctgcatatcctcaatcgctacggcctccgtgcagccctgccacgttctgtgaagactgtgctgtctcgggccgactctgacccccatgggccacacacctgtggccatgtcctgaatgtgatcattggctctaatgtgctggcgctagctgaggcccagcggcaggccgaggcactgggctaccaggctgtggtgctgagtgcagccatgcaaggtgatgtaaaaagtatggcccagttctacgggctgctggcccatgtggctagaacccgcctcaccccatccatggctggggcttctgtggaggaagatgcacagctccatgagctggcagctgagcttcagatcccagacctgcagctggaggaggctctggagaccatggcatggggaaggggcccagtctgcctgctggctggtggcgagcccacagtacagctgcagggctcgggcaggggtggccggaaccaggaactggccctgcgtgttggagcagagttgagaaggtggccgctggggccgatagatgtgctgtttttgagcggtggcaccgatgggcaggatgggcccacagaggctgctggggcctgggtcacacctgagcttgccagccaggctgcagctgagggcctggacatagccaccttcct

SEQ ID NO: 12506 - DNA, 464 bp, Homo sapiens
  source 1..464: mol_type = unassigned DNA
aagattttggatgccatgaatcgagactgtggaattccactcagtcatttgcaggtagatggaggaatgaccagcaacaaaattcttatgcagctacaagcagacattctgtatataccagtagtgaagccctcaatgcccgaaaccactgcactgggtgcggctatggcggcaggggctgcagaaggagtcggcgtatggagtctcgaacccgaggatttgtctgccgtcacgatggagcggtttgaacctcagattaatgcggagggtacatttaaagaatgaaatgttcagtgatatactgtgaaaacgaccttagtgcacgggagttttgtttttctgtttagttaaaagttaaggaaccaagtaaaatagtaaatgttatcattgcagattcggctgccaagcatattgggctttactgaataaatgtgaatgagagaaatcgttgcttatcaaaagaa

SEQ ID NO: 12507 - DNA, 3707 bp, Homo sapiens
  source 1..3707: mol_type = unassigned DNA
gggccggaggggcggggtgagaaggctgcgcgcgggtaaaggggccgcctcgagcgcggtccgagcgttcagcggacgcgcgcggcctcgatctctggactcgtcacctgcccctccccctcccgccgccgtcacccaggaaaccggccgcaatcgccggccgacctgaagctggtttcatggcagcctcaaagaaggcagttttggggccattggtgggggcggtggaccagggcaccagttcgacgcgctttttggttttcaattcaaaaacagctgaactacttagtcatcatcaagtagaaataaaacaagagttcccaagagaaggatgggtggaacaggaccctaaggaaattctacattctgtctatgagtgtatagagaaaacatgtgagaaacttggacagctcaatattgatatttccaacataaaagctattggtgtcagcaaccagagggaaaccactgtagtctgggacaagataactggagagcctctctacaatgctgtggtgtggcttgatctaagaacccagtctaccgttgagagtcttagtaaaagaattccaggaaataataactttgtcaagtccaagacaggccttccacttagcacttacttcagtgcagtgaaacttcgttggctccttgacaatgtgagaaaagttcaaaaggccgttgaagaaaaacgagctctttttgggactattgattcatggcttatttggagtttgacaggaggagtcaatggaggtgtccactgtacagatgtaacaaatgcaagtaggactatgcttttcaacattcattctttggaatgggataaacaactctgcgaattttttggaattccaatggaaattcttccaaatgtccggagttcttctgagatctatggcctaatgaaagctggggccttggaaggtgtgccaatatctgggtgtttaggggaccagtctgctgcattggtgggacaaatgtgcttccagattggacaagccaaaaatacgtatggaacaggatgtttcttactatgtaatacaggccataagtgtgtattttctgatcatggccttctcaccacagtggcttacaaacttggcagagacaaaccagtatattatgctttggaaggttctgtagctatagctggtgctgttattcgctggctaagagacaatcttggaattataaagacctcagaagaaattgaaaaacttgctaaagaagtaggtacttcttatggctgctacttcgtcccagcattttcggggttatatgcaccttattgggagcccagcgcaagagggataatctgtggactcactcagttcaccaataaatgccatattgcttttgctgcattagaagctgtttgtttccaaactcgagagattttggatgccatgaatcgagactgtggaattccactcagtcatttgcaggtagatggaggaatgaccagcaacaaaattcttatgcagctacaagcagacattctgtatataccagtagtgaagccctcaatgcccgaaaccactgcactgggtgcggctatggcggcaggggctgcagaaggagtcggcgtatggagtctcgaacccgaggatttgtctgccgtcacgatggagcggtttgaacctcagattaatgcggaggaaagtgaaattcgttattctacatggaagaaagctgtgatgaagtcaatgggttgggttacaactcaatctccagaaagtggtgaccctagtatcttctgtagtctgcccttgggcttttttatagtgagtagcatggtaatgttaatcggagcaaggtacatctcaggtattccataaaacctaccaactcatggattcccaagatgtgagctttttacataatgaaagaacccagcaattctgtctcttaatgcaatgacactattcatagactttgattttatttataagccacttgctgcatgaccctccaagtagacctgtggcttaaaataaagaaaatgcagcaaaaagaatgctatagaaatatttggtggttttttttttttttaaacatccacagttaaggttgggccagctacctttggggctgaccccctccattgccataacatcctgctccattccctctaagatgtaggaagaattcggatccttaccattggaatcttccatcgaacatactcaaacacttttggaccaggatttgagtctctgcatgacatatacttgattaaaaggttattactaacctgttaaaaatcagcagctctttgcttttaacagacaccctaaaagtcttcttttctacatagttgaagacagcaacatcttcactgaatgtttgaatagaaacctctactaaattattaaaatagacatttagtgttctcacagcttggatatttttctgaaaagttatttgccaaaactgaaatccttcagatgttttccatggtcccactaattataatgactttctgtctggatcttataggaaaagatactttcttttttcttccatctttcctttttatattttttactttgtatgtataacatacatgcctatatattttatacactgagggtagcccatttataaattaagagcacattatattcagaaggttctaacagggctggtcttaagtgaaccactgtgtatataaatatgttggaaaacagctgtatacatttttgggcaacggttatgcataatatttaccaggagaatttttttcttaacaagccaacatttaaaatttatgttttatgtcaataaaagaaaatatactttattgtgacttcaactatatttcttatcccttacatttttatttaattgtcttagcttaaaaaaagaagaaactgtggaatactacagtaaatattgttttcaaacacaagcaataattcaaatagttatttttcttttgaattaattttagacatattttggatcctattgaggggataagaggatgtcaaaaaagttaaatacctaagtagaaaaaaatatagaaataaagccaagaatctctttcagttcaaatgttatcaattgttaataagaaattgctatctgggatgacagaattacctctgcttagtatctcattataactgaaagaaggtttatcattacaaataccttccaatgaaaccaagaatttctcaaaatatttaatgtcacatattataagaagttacctaatcctgcttcttaacatcaatttttaaaaatatcttaaaattactttgttttgtagtaaacagtgaagaaaagattgcctcctaattatttttttcaatgagtgctgaatgggaaaacatttatatcttactataaaaggttctgttttgtttggaatcaatggtagctttattgactgttctgattgtgctgtttctaatttattgaatctgctaggttttattgatgcagccaccacttaagtgacataaatattatagaaaggtactgtgaaatgatcactttgtggcaggggtacttttaaacataaatgtttctacaaaagtaggttgagttcattgtaaataattgtgaaagccactgttcaaataattttaagattacattaatttttctataaattggaagatttataaatgtttgaaattgtacacattgatatttaatgacaaatttacttaaaataaattgaccccttgttctta

SEQ ID NO: 12508 - DNA, 2063 bp, Homo sapiens
  source 1..2063: mol_type = unassigned DNA
ctcccgccgccgtcacccaggaaaccggccgcaatcgccggccgacctgaagctggtttcatggcagcctcaaagaaggcagttttggggccattggtgggggcggtggaccagggcaccagttcgacgcgctttttggttttcaattcaaaaacagctgaactacttagtcatcatcaagtagaaataaaacaagagttcccaagagaaggatgggtggaacaggaccctaaggaaattctacattctgtctatgagtgtatagagaaaacatgtgagaaacttggacagctcaatattgatatttccaacataaaagctattggtgtcagcaaccagagggaaaccactgtagtctgggacaagataactggagagcctctctacaatgctgtggtgtggcttgatctaagaacccagtctaccgttgagagtcttagtaaaagaattccaggaaataataactttgtcaagtccaagacaggccttccacttagcacttacttcagtgcagtgaaacttcgttggctccttgacaatgtgagaaaagttcaaaaggccgttgaagaaaaacgagctctttttgggactattgattcatggcttatttggagtttgacaggaggagtcaatggaggtgtccactgtacagatgtaacaaatgcaagtaggactatgcttttcaacattcattctttggaatgggataaacaactctgcgaattttttggaattccaatggaaattcttccaaatgtccggagttcttctgagatctatggcctaatgaaagctggggccttggaaggtgtgccaatatctgggtgtttaggggaccagtctgctgcattggtgggacaaatgtgcttccagattggacaagccaaaaatacgtatggaacaggatgtttcttactatgtaatacaggccataagtgtgtattttctgatcatggccttctcaccacagtggcttacaaacttggcagagacaaaccagtatattatgctttggaaggttctgtagctatagctggtgctgttattcgctggctaagagacaatcttggaattataaagacctcagaagaaattgaaaaacttgctaaagaagtaggtacttcttatggctgctacttcgtcccagcattttcggggttatatgcaccttattgggagcccagcgcaagagggataatctgtggactcactcagttcaccaataaatgccatattgcttttgctgcattagaagctgtttgtttccaaactcgagagattttggatgccatgaatcgagactgtggaattccactcagtcatttgcaggtagatggaggaatgaccagcaacaaaattcttatgcagctacaagcagacattctgtatataccagtagtgaagccctcaatgcccgaaaccactgcactgggtgcggctatggcggcaggggctgcagaaggagtcggcgtatggagtctcgaacccgaggatttgtctgccgtcacgatggagcggtttgaacctcagattaatgcggaggaaagtgaaattcgttattctacatggaagaaagctgtgatgaagtcaatgggttgggttacaactcaatctccagaaagtggtattccataaaacctaccaactcatggattcccaagatgtgagctttttacataatgaaagaacccagcaattctgtctcttaatgcaatgacactattcatagactttgattttatttataagccacttgctgcatgaccctccaagtagacctgtggcttaaaataaagaaaatgcagcaaaaagaatgctatagaaatatttggtggttttttttttttttaaacatccacagttaaggttgggccagctacctttggggctgaccccctccattgccataacatcctgctccattccctctaagatgtaggaagaattcggatccttaccattggaatcttccatcgaacatactcaaacacttttggaccaggatttgagtctctgcatgacatatacttgattaaaaggttattactaacctgttaaaaatc

SEQ ID NO: 12509 - DNA, 3638 bp, Homo sapiens
  source 1..3638: mol_type = unassigned DNA
gggccggaggggcggggtgagaaggctgcgcgcgggtaaaggggccgcctcgagcgcggtccgagcgttcagcggacgcgcgcggcctcgatctctggactcgtcacctgcccctccccctcccgccgccgtcacccaggaaaccggccgcaatcgccggccgacctgaagctggtttcatggcagcctcaaagaaggcagttttggggccattggtgggggcggtggaccagggcaccagttcgacgcgctttttggttttcaattcaaaaacagctgaactacttagtcatcatcaagtagaaataaaacaagagttcccaagagaaggatgggtggaacaggaccctaaggaaattctacattctgtctatgagtgtatagagaaaacatgtgagaaacttggacagctcaatattgatatttccaacataaaagctattggtgtcagcaaccagagggaaaccactgtagtctgggacaagataactggagagcctctctacaatgctgtggtgtggcttgatctaagaacccagtctaccgttgagagtcttagtaaaagaattccaggaaataataactttgtcaagtccaagacaggccttccacttagcacttacttcagtgcagtgaaacttcgttggctccttgacaatgtgagaaaagttcaaaaggccgttgaagaaaaacgagctctttttgggactattgattcatggcttatttggagtttgacaggaggagtcaatggaggtgtccactgtacagatgtaacaaatgcaagtaggactatgcttttcaacattcattctttggaatgggataaacaactctgcgaattttttggaattccaatggaaattcttccaaatgtccggagttcttctgagatctatggcctaatgaaaatctctcatagcgtgaaagctggggccttggaaggtgtgccaatatctgggtgtttaggggaccagtctgctgcattggtgggacaaatgtgcttccagattggacaagccaaaaatacgtatggaacaggatgtttcttactatgtaatacaggccataagtgtgtattttctgatcatggccttctcaccacagtggcttacaaacttggcagagacaaaccagtatattatgctttggaaggttctgtagctatagctggtgctgttattcgctggctaagagacaatcttggaattataaagacctcagaagaaattgaaaaacttgctaaagaagtaggtacttcttatggctgctacttcgtcccagcattttcggggttatatgcaccttattgggagcccagcgcaagagggataatctgtggactcactcagttcaccaataaatgccatattgcttttgctgcattagaagctgtttgtttccaaactcgagagattttggatgccatgaatcgagactgtggaattccactcagtcatttgcaggtagatggaggaatgaccagcaacaaaattcttatgcagctacaagcagacattctgtatataccagtagtgaagccctcaatgcccgaaaccactgcactgggtgcggctatggcggcaggggctgcagaaggagtcggcgtatggagtctcgaacccgaggatttgtctgccgtcacgatggagcggtttgaacctcagattaatgcggaggaaagtgaaattcgttattctacatggaagaaagctgtgatgaagtcaatgggttgggttacaactcaatctccagaaagtggtattccataaaacctaccaactcatggattcccaagatgtgagctttttacataatgaaagaacccagcaattctgtctcttaatgcaatgacactattcatagactttgattttatttataagccacttgctgcatgaccctccaagtagacctgtggcttaaaataaagaaaatgcagcaaaaagaatgctatagaaatatttggtggttttttttttttttaaacatccacagttaaggttgggccagctacctttggggctgaccccctccattgccataacatcctgctccattccctctaagatgtaggaagaattcggatccttaccattggaatcttccatcgaacatactcaaacacttttggaccaggatttgagtctctgcatgacatatacttgattaaaaggttattactaacctgttaaaaatcagcagctctttgcttttaacagacaccctaaaagtcttcttttctacatagttgaagacagcaacatcttcactgaatgtttgaatagaaacctctactaaattattaaaatagacatttagtgttctcacagcttggatatttttctgaaaagttatttgccaaaactgaaatccttcagatgttttccatggtcccactaattataatgactttctgtctggatcttataggaaaagatactttcttttttcttccatctttcctttttatattttttactttgtatgtataacatacatgcctatatattttatacactgagggtagcccatttataaattaagagcacattatattcagaaggttctaacagggctggtcttaagtgaaccactgtgtatataaatatgttggaaaacagctgtatacatttttgggcaacggttatgcataatatttaccaggagaatttttttcttaacaagccaacatttaaaatttatgttttatgtcaataaaagaaaatatactttattgtgacttcaactatatttcttatcccttacatttttatttaattgtcttagcttaaaaaaagaagaaactgtggaatactacagtaaatattgttttcaaacacaagcaataattcaaatagttatttttcttttgaattaattttagacatattttggatcctattgaggggataagaggatgtcaaaaaagttaaatacctaagtagaaaaaaatatagaaataaagccaagaatctctttcagttcaaatgttatcaattgttaataagaaattgctatctgggatgacagaattacctctgcttagtatctcattataactgaaagaaggtttatcattacaaataccttccaatgaaaccaagaatttctcaaaatatttaatgtcacatattataagaagttacctaatcctgcttcttaacatcaatttttaaaaatatcttaaaattactttgttttgtagtaaacagtgaagaaaagattgcctcctaattatttttttcaatgagtgctgaatgggaaaacatttatatcttactataaaaggttctgttttgtttggaatcaatggtagctttattgactgttctgattgtgctgtttctaatttattgaatctgctaggttttattgatgcagccaccacttaagtgacataaatattatagaaaggtactgtgaaatgatcactttgtggcaggggtacttttaaacataaatgtttctacaaaagtaggttgagttcattgtaaataattgtgaaagccactgttcaaataattttaagattacattaatttttctataaattggaagatttataaatgtttgaaattgtacacattgatatttaatgacaaatttacttaaaataaattgaccccttgttctta

SEQ ID NO: 12510 - DNA, 2401 bp, Homo sapiens
  source 1..2401: mol_type = unassigned DNA
gtcacccaggaaaccggccgcaatcgccggccgacctgaagctggtttcatggcagcctcaaagaaggcagttttggggccattggtgggggcggtggaccagggcaccagttcgacgcgctttttggttttcaattcaaaaacagctgaactacttagtcatcatcaagtagaaataaaacaagagttcccaagagaaggatgggtggaacaggaccctaaggaaattctacattctgtctatgagtgtatagagaaaacatgtgagaaacttggacagctcaatattgatatttccaacataaaagataaccctacctcctgcttcatggagaaagttgagggtctgcggccttaaatcctcaccttcctgttgctgtgcttaatatctggatctcctgccaactttccttcatcacaagggcagcaatagccttctgccccacttggagctcctccctccacttgtgctgctattggtgtcagcaaccagagggaaaccactgtagtctgggacaagataactggagagcctctctacaatgctgtggtgtggcttgatctaagaacccagtctaccgttgagagtcttagtaaaagaattccaggaaataataactttgtcaagtccaagacaggccttccacttagcacttacttcagtgcagtgaaacttcgttggctccttgacaatgtgagaaaagttcaaaaggccgttgaagaaaaacgagctctttttgggactattgattcatggcttatttggagtttgacaggaggagtcaatggaggtgtccactgtacagatgtaacaaatgcaagtaggactatgcttttcaacattcattctttggaatgggataaacaactctgcgaattttttggaattccaatggaaattcttccaaatgtccggagttcttctgagatctatggcctaatgaaaatctctcatagcgtgaaagctggggccttggaaggtgtgccaatatctgggtgtttaggggaccagtctgctgcattggtgggacaaatgtgcttccagattggacaagccaaaaatacgtatggaacaggatgtttcttactatgtaatacaggccataagtgtgtattttctgatcatggccttctcaccacagtggcttacaaacttggcagagacaaaccagtatattatgctttggaaggttctgtagctatagctggtgctgttattcgctggctaagagacaatcttggaattataaagacctcagaagaaattgaaaaacttgctaaagaagtaggtacttcttatggctgctacttcgtcccagcattttcggggttatatgcaccttattgggagcccagcgcaagagggataatctgtggactcactcagttcaccaataaatgccatattgcttttgctgcattagaagctgtttgtttccaaactcgagagattttggatgccatgaatcgagactgtggaattccactcagtcatttgcaggtagatggaggaatgaccagcaacaaaattcttatgcagctacaagcagacattctgtatataccagtagtgaagccctcaatgcccgaaaccactgcactgggtgcggctatggcggcaggggctgcagaaggagtcggcgtatggagtctcgaacccgaggatttgtctgccgtcacgatggagcggtttgaacctcagattaatgcggaggaaagtgaaattcgttattctacatggaagaaagctgtgatgaagtcaatgggttgggttacaactcaatctccagaaagtggtgaccctagtatcttctgtagtctgcccttgggcttttttatagtgagtagcatggtaatgttaatcggagcaaggtacatctcaggtattccataaaacctaccaactcatggattcccaagatgtgagctttttacataatgaaagaacccagcaattctgtctcttaatgcaatgacactattcatagactttgattttatttataagccacttgctgcatgaccctccaagtagacctgtggcttaaaataaagaaaatgcagcaaaaagaatgctatagaaatatttggtggttttttttttttttaaacatccacagttaaggttgggccagctacctttggggctgaccccctccattgccataacatcctgctccattccctctaagatgtaggaagaattcggatccttaccattggaatcttccatcgaacatactcaaacacttttggaccaggatttgagtctctgcatgacatatacttgattaaaaggttattactaacctgttaaaaatcagcagctctttgcttttaacagacaccctaaaagtcttcttttctacatagttgaagacagcaacatcttcactgaatg

SEQ ID NO: 12511 - DNA, 2172 bp, Homo sapiens
  source 1..2172: mol_type = unassigned DNA
aggaaaccggccgcaatcgccggccgacctgaagctggtttcatggcagcctcaaagaaggcagttttggggccattggtgggggcggtggaccagggcaccagttcgacgcgctttttggttttcaattcaaaaacagctgaactacttagtcatcatcaagtagaaataaaacaagagttcccaagagaaggctattggtgtcagcaaccagagggaaaccactgtagtctgggacaagataactggagagcctctctacaatgctgtggtgtggcttgatctaagaacccagtctaccgttgagagtcttagtaaaagaattccaggaaataataactttgtcaagtccaagacaggccttccacttagcacttacttcagtgcagtgaaacttcgttggctccttgacaatgtgagaaaagttcaaaaggccgttgaagaaaaacgagctctttttgggactattgattcatggcttatttggataattttaaaacaaatgccagacatttcattttatttgtaaatatttcaagtttgacaggaggagtcaatggaggtgtccactgtacagatgtaacaaatgcaagtaggactatgcttttcaacattcattctttggaatgggataaacaactctgcgaattttttggaattccaatggaaattcttccaaatgtccggagttcttctgagatctatggcctaatgaaaatctctcatagcgtgaaagctggggccttggaaggtgtgccaatatctgggtgtttaggggaccagtctgctgcattggtgggacaaatgtgcttccagattggacaagccaaaaatacgtatggaacaggatgtttcttactatgtaatacaggccataagtgtgtattttctgatcatggccttctcaccacagtggcttacaaacttggcagagacaaaccagtatattatgctttggaaggttctgtagctatagctggtgctgttattcgctggctaagagacaatcttggaattataaagacctcagaagaaattgaaaaacttgctaaagaagtaggtacttcttatggctgctacttcgtcccagcattttcggggttatatgcaccttattgggagcccagcgcaagagggataatctgtggactcactcagttcaccaataaatgccatattgcttttgctgcattagaagctgtttgtttccaaactcgagagattttggatgccatgaatcgagactgtggaattccactcagtcatttgcaggtagatggaggaatgaccagcaacaaaattcttatgcagctacaagcagacattctgtatataccagtagtgaagccctcaatgcccgaaaccactgcactgggtgcggctatggcggcaggggctgcagaaggagtcggcgtatggagtctcgaacccgaggatttgtctgccgtcacgatggagcggtttgaacctcagattaatgcggaggaaagtgaaattcgttattctacatggaagaaagctgtgatgaagtcaatgggttgggttacaactcaatctccagaaagtggtattccataaaacctaccaactcatggattcccaagatgtgagctttttacataatgaaagaacccagcaattctgtctcttaatgcaatgacactattcatagactttgattttatttataagccacttgctgcatgaccctccaagtagacctgtggcttaaaataaagaaaatgcagcaaaaagaatgctatagaaatatttggtggttttttttttttttaaacatccacagttaaggttgggccagctacctttggggctgaccccctccattgccataacatcctgctccattccctctaagatgtaggaagaattcggatccttaccattggaatcttccatcgaacatactcaaacacttttggaccaggatttgagtctctgcatgacatatacttgattaaaaggttattactaacctgttaaaaatcagcagctctttgcttttaacagacaccctaaaagtcttcttttctacatagttgaagacagcaacatcttcactgaatgtttgaatagaaacctctactaattataatgactttctgtctggatcttataggaaaagatactttcttttttcttccatctttcctt

SEQ ID NO: 12512 - DNA, 3725 bp, Homo sapiens
  source 1..3725: mol_type = unassigned DNA
gggccggaggggcggggtgagaaggctgcgcgcgggtaaaggggccgcctcgagcgcggtccgagcgttcagcggacgcgcgcggcctcgatctctggactcgtcacctgcccctccccctcccgccgccgtcacccaggaaaccggccgcaatcgccggccgacctgaagctggtttcatggcagcctcaaagaaggcagttttggggccattggtgggggcggtggaccagggcaccagttcgacgcgctttttggttttcaattcaaaaacagctgaactacttagtcatcatcaagtagaaataaaacaagagttcccaagagaaggatgggtggaacaggaccctaaggaaattctacattctgtctatgagtgtatagagaaaacatgtgagaaacttggacagctcaatattgatatttccaacataaaagctattggtgtcagcaaccagagggaaaccactgtagtctgggacaagataactggagagcctctctacaatgctgtggtgtggcttgatctaagaacccagtctaccgttgagagtcttagtaaaagaattccaggaaataataactttgtcaagtccaagacaggccttccacttagcacttacttcagtgcagtgaaacttcgttggctccttgacaatgtgagaaaagttcaaaaggccgttgaagaaaaacgagctctttttgggactattgattcatggcttatttggagtttgacaggaggagtcaatggaggtgtccactgtacagatgtaacaaatgcaagtaggactatgcttttcaacattcattctttggaatgggataaacaactctgcgaattttttggaattccaatggaaattcttccaaatgtccggagttcttctgagatctatggcctaatgactattcataattcaaaaaaagctggggccttggaaggtgtgccaatatctgggtgtttaggggaccagtctgctgcattggtgggacaaatgtgcttccagattggacaagccaaaaatacgtatggaacaggatgtttcttactatgtaatacaggccataagtgtgtattttctgatcatggccttctcaccacagtggcttacaaacttggcagagacaaaccagtatattatgctttggaaggttctgtagctatagctggtgctgttattcgctggctaagagacaatcttggaattataaagacctcagaagaaattgaaaaacttgctaaagaagtaggtacttcttatggctgctacttcgtcccagcattttcggggttatatgcaccttattgggagcccagcgcaagagggataatctgtggactcactcagttcaccaataaatgccatattgcttttgctgcattagaagctgtttgtttccaaactcgagagattttggatgccatgaatcgagactgtggaattccactcagtcatttgcaggtagatggaggaatgaccagcaacaaaattcttatgcagctacaagcagacattctgtatataccagtagtgaagccctcaatgcccgaaaccactgcactgggtgcggctatggcggcaggggctgcagaaggagtcggcgtatggagtctcgaacccgaggatttgtctgccgtcacgatggagcggtttgaacctcagattaatgcggaggaaagtgaaattcgttattctacatggaagaaagctgtgatgaagtcaatgggttgggttacaactcaatctccagaaagtggtgaccctagtatcttctgtagtctgcccttgggcttttttatagtgagtagcatggtaatgttaatcggagcaaggtacatctcaggtattccataaaacctaccaactcatggattcccaagatgtgagctttttacataatgaaagaacccagcaattctgtctcttaatgcaatgacactattcatagactttgattttatttataagccacttgctgcatgaccctccaagtagacctgtggcttaaaataaagaaaatgcagcaaaaagaatgctatagaaatatttggtggttttttttttttttaaacatccacagttaaggttgggccagctacctttggggctgaccccctccattgccataacatcctgctccattccctctaagatgtaggaagaattcggatccttaccattggaatcttccatcgaacatactcaaacacttttggaccaggatttgagtctctgcatgacatatacttgattaaaaggttattactaacctgttaaaaatcagcagctctttgcttttaacagacaccctaaaagtcttcttttctacatagttgaagacagcaacatcttcactgaatgtttgaatagaaacctctactaaattattaaaatagacatttagtgttctcacagcttggatatttttctgaaaagttatttgccaaaactgaaatccttcagatgttttccatggtcccactaattataatgactttctgtctggatcttataggaaaagatactttcttttttcttccatctttcctttttatattttttactttgtatgtataacatacatgcctatatattttatacactgagggtagcccatttataaattaagagcacattatattcagaaggttctaacagggctggtcttaagtgaaccactgtgtatataaatatgttggaaaacagctgtatacatttttgggcaacggttatgcataatatttaccaggagaatttttttcttaacaagccaacatttaaaatttatgttttatgtcaataaaagaaaatatactttattgtgacttcaactatatttcttatcccttacatttttatttaattgtcttagcttaaaaaaagaagaaactgtggaatactacagtaaatattgttttcaaacacaagcaataattcaaatagttatttttcttttgaattaattttagacatattttggatcctattgaggggataagaggatgtcaaaaaagttaaatacctaagtagaaaaaaatatagaaataaagccaagaatctctttcagttcaaatgttatcaattgttaataagaaattgctatctgggatgacagaattacctctgcttagtatctcattataactgaaagaaggtttatcattacaaataccttccaatgaaaccaagaatttctcaaaatatttaatgtcacatattataagaagttacctaatcctgcttcttaacatcaatttttaaaaatatcttaaaattactttgttttgtagtaaacagtgaagaaaagattgcctcctaattatttttttcaatgagtgctgaatgggaaaacatttatatcttactataaaaggttctgttttgtttggaatcaatggtagctttattgactgttctgattgtgctgtttctaatttattgaatctgctaggttttattgatgcagccaccacttaagtgacataaatattatagaaaggtactgtgaaatgatcactttgtggcaggggtacttttaaacataaatgtttctacaaaagtaggttgagttcattgtaaataattgtgaaagccactgttcaaataattttaagattacattaatttttctataaattggaagatttataaatgtttgaaattgtacacattgatatttaatgacaaatttacttaaaataaattgaccccttgttctta

SEQ ID NO: 12513 - DNA, 1865 bp, Homo sapiens
  source 1..1865: mol_type = unassigned DNA
agccgacctactggtgtcatggcagccccaaagacagcagctgtggggccgttggtgggagcggtggtccagggcaccaactccactcgctttctggttttcaattcaaaaacagcggaactacttagtcatcacaaagtggaattaacacaagagttcccaaaagaaggatgggtggaacaagaccctaaagaaattcttcagtctgtctacgagtgtatagcgagaacgtgtgagaaacttgacgaactgaatattgatatatccaacataaaagctgttggtgtcagcaatcagagggaaaccactgtaatctgggacaagttaacaggagagcctctctacaatgctgtggtgtggcttgatctaagaacccagactactgttgaggatcttagtaaaaaaattccaggaaatagtaacttcgtcaagtctaagacaggccttccactcagcacttacttcagtgcagtaaaacttcgttggatgcttgacaatgtgagaaacgtccaaaaggctgttgaagaaggtagagctctttttggtaccattgattcatggcttatctggagtttgacaggaggagttaatggaggcgtgcattgtacagatgtaacaaatgcaagtaggacaatgctttttaatatccattctttggaatgggataaagagctctgtgacttttttgaaattccaatggaccttcttccaaatgtcttcagttcttctgagatctatggcctaattaaaactggagccctggaaggtgtgccaatatctgggtgtttgggggaccaatgtgctgcattagtaggacaaatgtgcttccaggagggacaagccaaaaacacctatggaacaggttgcttcttactgtgtaatacgggtcgtaaatgtgtgttttctgaacatggccttttgaccacagtagcttacaaactaggcagagagaagccagcatattatgcactggaaggttctgttgctatagcaggtgctgttattcgttggctaagagacaatcttggaattatagagacctcaggagacattgaaagacttgctaaagaagtaggaacttcttatggctgttactttgtcccagccttttcagggttatatgcaccttattgggagcccagtgcaagagggatactctgtggcctcactcagtttaccaataaatgtcatattgcttttgctgcattagaagctgtttgtttccaaacccgagagattttggaagccatgaaccgtgactgtggaattccacttcgtcatttgcaggtagatggaggaatgaccaacaacaaagttcttatgcagctacaagcagatattcttcatattccagtaataaaaccctttatgcctgaaacaactgcactaggagctgccatggcagcaggggctgcagagggagtaagcgtttggagccttgaaccccaggctttgtcagttctcaggatggaacgatttgaaccacagatccaggccacagaaagtgaaattcgttatgccacatggaagaaagccgtaatgaagtcaatgggttgggttaccagtcagtctcctgaaggtggtgatccttctatcttctctagtctgcctttgggattttttatagtgagtagcatggtaatgctaattggagcaagatatatctcgggtgtgccataataataccagctatggagtcccaagatgtaaacattttacataatgaaagcatatagcagttctgcctcttaatataatgacactattatagactctgattttgtttataaaccacttgctacatgacccatgaaaaccctagacttgtgacctgaaataaagaaaatacgttagaagagcactgt

SEQ ID NO: 12514 - DNA, 3082 bp, Homo sapiens
  source 1..3082: mol_type = unassigned DNA
agaaaaagctgggcctagtctctgccccattcctgttccacacctgtctgtacccctgtctctcctttccctggctctgccagactctctatctccctgggcgccagcctccccacccacccctggagggcggggcttggctgcacccacgtgtggtggagttaaatgctcctagccggcagaggagctagggagtgtggcactgagccggctcaggcagagacgcggcaccatggctagcaagaaagtctgcattgtaggctccgggaactggggctcagccatcgccaagatcgtgggtggcaatgcagcccagctggcacagtttgacccacgggtgaccatgtgggtatttgaggaagacattggaggcaaaaagctgactgagatcatcaacacgcagcatgagaatgtcaaatacctgccagggcacaagttgcccccaaatgtggtggctgtcccagatgtggtccaggctgcagaggatgctgacatcctgatctttgtggtgccccatcagttcatcggcaagatctgtgaccagctcaagggccatctgaaggcaaacgccactggcatatctcttattaagggggtagacgagggccccaatgggctgaagctcatctcggaagtgattggggagcgcctcggcatccccatgagtgtgctgatgggggccaacattgccagcgaggtggctgatgagaagttctgtgagacaaccattggctgcaaggacccggcccagggacaactcctgaaagagctgatgcagacaccaaacttccgtatcacagtggtgcaagaggtggacacagtagagatctgtggagccttaaagaatgtagtggccgtgggggctggcttctgtgatggcctgggctttggcgacaacaccaaggcggcagtgatccggctgggactcatggagatgatagccttcgccaagctcttctgcagtggccctgtgtcctctgccaccttcttggagagctgtggtgttgctgacctgatcactacctgctatggagggcggaaccggaaagtggctgaggcctttgcgcgtacaggaaagtccattgagcagctggagaaagagttgctgaatgggcagaaactgcaggggcccgagacagcccgggagctatacagcatcctccagcacaagggcctggtagacaagtttcccttgttcatggctgtgtacaaggtgtgctacgagggccagccagtgggtgaattcatccactgcctgcagaatcatccagaacatatgtgagtggggccagggcccaggccaggccgcttttttaccccagtggagaccagcagaagcctggggtacctagtcaccaggatctccaggactcccagggagcagagtcttctcatcttttcactggaggacaggaggctatggggcccagctacgcacctggagatcctgaactgtcaagccactggcagcctcatgccaccacatttgccagaaatgcagttgccctgtccctctccagatgtggggctttctccatatcctctgggaggggtggaatcaagccccagtgctgcctgcttggtggcgggggtgatgtatgtggagaagggttgggggagaggccggtagggcaggggctgctagtggctgtctcacatacaccagtaatcctgttaaagggctgaagaagtatcttagccacaggagcgatgaggcaaggattgtcagggaggggtctgggcttctgagctgatgcaggccccaaggacccctttgctgacctctgccaggacccacacagcttcgatggatctcagtgtttgttaacaaaatacaaagatctcaaacaaaccccttttagcttctcctagcaacatctgtgtcctcagaaacctctggttctcccccttccccctcccccaggctgccctggcacccaaattgctgccatgctggcatctgtagctcggtggcttgacattctccccagggacttcccggttcctagttctttgccagctcctccccactctgtgcgacctttccaagccttccctcaccctccccgccagcaccctctttggggagcaggaacttaatctgctgacagagctacacctttcataacaggctcagatcactcagctccctgtgacctttgtattcacccaggcttccttctcagtagctctagctgggggaggtgtcagctgggcccctcctgtgctatctccccagaggacatccctgactccacccctttcttcctcccaaactctgcacctcttcctcagctgctccagaccggccagggtaaccagctaaccatgcctggcatctggaagccagcaggccagagggtggcccaaaggctgatgaacggtagggaagggtgagcagattcctatgttggtgggcaccaatattccaagggcagctctctttgctgaatgagggccttctcgtgaggtactgacaacaccagcaactcgagagctgggaaactcaaggaggaggaagaaaatcaaaaccaccctactccctggggtgaggaaagaacaggaggggaggaggaggagtgtgctctgcacttgccttgctccaggatggggtggcagcagaggaatgtcacaggtcagcagcctaggcctccagctataaatagtccggagggcccgagaggctcccgcccgtccagcagggctgtcagcttcctgtgtggcagcacctggcacactggctctggccagcattatgctaaaaccctgttactctccaatgaaccagggaggcgggctcctctctgcgcctatcccttgagaattctgtcttaccagtgaagggtggggctgcccagatcaggcagcaggagtgaggggcacagtcaccccaggccttgctgagcccaggtctgggtactgagtgtccagagctgcctccccaggaggttaaggtgggggcaaaggggaagcttcaagcactttgcctacttttgttcactccccagtgcactgtgactcaggccttcccatcaggcctatttgtctacccaataaagcgtgttttttccagaaacaagaa

SEQ ID NO: 12515 - DNA, 981 bp, Homo sapiens
  source 1..981: mol_type = unassigned DNA
atgcagacaccaaacttccgtatcacagtggtgcaagaggtggacacagtagagatctgtggagccttaaaggtgagaggggcacagaggcagctatggggtgaggagaaggccccaaaggaggtctggctgagctctgcaaggctgcaggtactccaggctctcactattgagcagtggttcccctttcctaccatgtcccatgcatataggaggagctgcagaagcaaggccagggccattcaggctgattattcatcatcagaccgtggacccccttgctcctgtcccattttagccccgtgtgggactccccaccctctggctccaggaggtcagggggacaaggagatgcccaggctaatgggagacaaaacatccttgacacccagacagactaatggccagaactatggatcctggacagctgttgacgggctgtacaatggaatggtcagatgggaagatcaactagagagaagagtggttttcagaaaatgtcctcgaggagggagtatggggcagggcttaagaaagggggtgcagcaaggggggaaaccaagaggcggaagtaggcttctaaaaggccacacactatacctctcttctgcagtgggtgtcacggctgatgaaatgagtatgagggggctccacatggggcctataggagggggtcttttcacctatgacctccactccttcaagaatgtagtggccgtgggggctggcttctgtgatggcctgggctttggcgacaacaccaaggcggcagtgatccggctgggactcatggagatgatagccttcgccaagctcttctgcagtggccctgtgtcctctgccaccttcttggagagctgtggtgttgctgacctgatcactacctgctatggagggcggaaccggaaagtggctgaggcctttgcgcgtacaggaaaggtgggccccgggagaagggagaacagaggggcggctctgtag

SEQ ID NO: 12516 - DNA, 4060 bp, Homo sapiens
  source 1..4060: mol_type = unassigned DNA
gcagtggttcttgggagtggcgaagcgggtcctgccccgctgtcagctgcggcccccggcgccgggcgggggtggccgcgaccattggcggagaggcgaaaggggcggggccgccgccagccgctgcgggcaaggctgaacaggcggaggtgggcagccggccagggaagcacggtccaggcggctacattcggcccggccatggcagcggcgcccctgaaagtgtgcatcgtgggctcggggaactggggttcagctgttgcaaaaataattggtaataatgtcaagaaacttcagaaatttgcctccacagtcaagatgtgggtctttgaagaaacagtgaatggcagaaaactgacagacatcataaataatgaccatgaaaatgtaaaatatcttcctggacacaagctgccagaaaatgtggttgccatgtcaaatcttagcgaggctgtgcaggatgcagacctgctggtgtttgtcattccccaccagttcattcacagaatctgtgatgagatcactgggagagtgcccaagaaagcgctgggaatcaccctcatcaagggcatagacgagggccccgaggggctgaagctcatttctgacatcatccgtgagaagatgggtattgacatcagtgtgctgatgggagccaacattgccaatgaggtggctgcagagaagttctgtgagaccaccatcggcagcaaagtaatggagaacggccttctcttcaaagaacttctgcagactccaaattttcgaattaccgtggttgatgatgcagacactgttgaactctgtggtgcgcttaagaacatcgtagctgtgggagctgggttctgcgacggcctccgctgtggagacaacaccaaagcggccgtcatccgcctgggactcatggaaatgattgcttttgccaggatcttctgcaaaggccaagtgtctacagccaccttcctagagagctgcggggtggccgacctgatcaccacctgttacggagggcggaaccgcagggtggccgaggccttcgccagaactgggaagaccattgaagagttggagaaggagatgctgaatgggcaaaagctccaaggaccgcagacttctgctgaagtgtaccgcatcctcaaacagaagggactactggacaagtttccattgtttactgcagtgtatcagatctgctacgaaagcagaccagttcaagagatgttgtcttgtcttcagagccatccagagcatacataaagtgaatcatgcaacgtgttgggggaagttctgcctttctgatcaatcttttgggttcacgtggaaaccaggacttggcaacatgatgtttgactgtaatctcatcacggatatgtatgaatttttacaggttcgtttttgaattgtgagaggcagttcattagcaaagatgtactgggcagtaactaaacacacatgcaaacatgtgaatggtggtttattcctcattctgtggatgtttctatgagccaaaatttgatgtctttttttcaaaattgcttatgaaatttccacacaatcgtagcttataagattggaacgatctcagccaaatattttaggtgtaattcatatgtatttgagtggaggattttttttctcatttttctagtgttaaattttaaccagcattaacatggtagagtggaggagtgagtgtgttcaaagatcaacatatttaacttttaaacactatctcaaagccagcataattaactactttgattgtgggctgacctttgtttttttaacaatcaggcatttttaattagataatccactcatgtatttccccctcactgcagttgtctgcatttttagcctcttttctcttcgttagttgtcagaatatgccttcgtcaaggctcagaggtaacaagacagaaaattcatctgggattttcctgctgtggctggcacattcttctgattaacagacacttgtatgatgctttaggctagttagtgcattttttagcaaacatttatcttaaacatcacagatccactggggggtgcaaggggctactgttagtcctcttgttagatgcagtcactcctcctggtcacctagtgagcagggacagagccaggagtcaagtgcagtgccaaggtgcatgaccctctgagaagtcactgggctgatttgacctccgactcattggttgtgcaaatgccatgtgcagcctttcctgaggccataggagggcttcctgcagctgagatctatgcaggccatcctctcaacaagtgccactccaagggcggtcctcggtgcagcagcatcagcttcacttgtgggggggtgggggaaggggcggtctcagaaatgcaggttcccaggtcccaccctggacttctgaaggggtgtggcatctgtgtttctgatgcttactacaatatgtgaaccactactttagaaaatctgctttaacttggtattcctctaattgtgttccctaggaaatgactgtcccaagagccagtgattattccaggtgttccctggaaaggtcaagtgagtctgggaaacactatgtctgtacacctcttgaaggtgtcgaatgtatgtttatacatcagtggaacccatttttctagcctagcaagtcccaaacacattacactgaagagattttggtgaggaaacttgctggagttttcagggaacactgttctaggcttaggtgaccttaggatcactcaagtagacccttcactccctgcgagaaattaggatgaataactacctgtggcattgttggttctgaacttttacagttcaggcctgctgtgaatctttgatgaagctttaaggtgacactgttgtacaagatgtcagctttgctgaaacgcacattacctggaataagtgctttaattgtagaattagaatgggatttactgtactgttttaaatgagattggcttcagaatccattacagttaccttacatagcacttgatacgtgttaaatgaacatatgaatgtaatttatatattcctagaatttaagttactttgtgagatttgggcctgtccctcaatgccagtttaggatttctttttttctataccttgaaatgattataaaatagattttcatgggaattttaaaaactctatccaaaacatttttggagcattttaaagccccatacacagaagtatacgaaagcacacaaaacactccaagtttcagcagttttagcgccaccattaacccactttgcttgtctcatgaaaaatctttgttaaagtttgtacacaggtaacaaaaagttactttaaaagatatataaagggctgtaagctaattgtggtgtctagtaagtagcataatgagatgtgaggagttggaactttgcgtgttttgcgtattttcatctgcattcagcttcttactctgggtttgtactcgagtgttatttctttacaaatgcccttgtaattaccactctgaagtctgctgactgtgtctcttgaacatacttaggatattctgcacattatggaaaaaggtaaattttagaagtttctgctctactaactgtagatatttatgactctgcgagttatctatttttataaccacctgtggtccattgttcattttaattcacatttcttatgaagtatggtaacagggagggagacacctagattagcagctcaatttgtactacttcagccaatctgtgaatgtaaaaactacactgttgccttgctaggatccaccctcctataatatggaacaaatatctgaatgaaatccaccctaggagacggagtcaaactaaacttgtggtttttcatttaacttttgactacagcatggccccatggcatccacaccaagagggtgttgtgatgaggtgccggtgtgcaaagggaactttagtttttccactggttcttatctgctagccttttacatacatgtgtactatatttgtttatagactgtaggtggatatataatttaaaagcttgatttaataaacatttaaccccctaaacttg

SEQ ID NO: 12517 - DNA, 2076 bp, Homo sapiens
  source 1..2076: mol_type = unassigned DNA
ccgtcctggctgagatggcggcgcccgggatcctgtgtagcggctgcagagggtgccgccgccctaggcgaagtagggccgtcctgagcgaaagaaccgcccccagcaggagcaccaccacggcttagcaaagaatcccagaccccgcccgggaaggcagccgcaccatggagtcttccagttcatctaactcttatttctccgttggcccaaccagtcccagcgctgtcgtgctcctctactcgctttccaaggaatcccttcaatctgtggatgtcctccgagaggaagtgagtgagatcttagatgaaatgagtcacaaactgcgtcttggagccattcggttttgtgccttcaccctgagcaaagtatttaaacaaattttctcgaaggtgtgtgtaaatgaagaaggtattcagaaactacaaagagccatccaggagcatcctgttgttctgctgcctagtcatcgaagttacattgacttcctcatgttgtcttttcttctatacaattatgatttgcctgtgccagttatagcagcaggaatggacttcctgggaatgaaaatggttggtgagctgctacgaatgtcgggtgcctttttcatgcggcgtacctttggtggcaataaactctactgggctgtattctctgaatatgtaaaaactatgttacggaatggttatgctcctgttgaatttttcctcgaagggacaagaagccgctctgccaagacattgactcctaaatttggtcttctgaatattgtgatggagccattttttaaaagagaagtttttgatacctaccttgtcccaattagtatcagttatgataagatcttggaagaaactctttatgtgtatgagcttctaggggttcctaaaccaaaagagtctacaactgggttgctgaaagccagaaagattctctctgaaaattttggaagcatccatgtgtactttggagatcctgtgtcacttcgatctttggcagctgggaggatgagtcggagctcatataacttggttccaagatacattcctcagaaacagtctgaggacatgcatgcctttgtcactgaagttgcctacaaaatggagcttctgcaaattgaaaacatggttttgagcccctggaccctaatagttgctgttctgcttcagaaccggccatccatggactttgatgctctggtggaaaagactttatggctaaaaggcttaacccaggcatttggagggtttctcatttggcctgataataaacctgctgaagaagttgtcccggccagcattcttctgcattccaacattgccagccttgtcaaagaccaggtgattctgaaagtggactccggagactcggaagtggtcgatgggcttatgctccagcacatcactctcctcatgtgctcagcttataggaaccagctgctcaacatttttgtgcgcccatccttagtagcagtagcattgcagatgacaccagggttcaggaaagaggatgtctacagttgctttcgcttcctacgtgatgtttttgcagatgagttcatcttccttccaggaaacacactaaaggactttgaagaaggctgttacctgctttgtaaaagtgaagccatacaagtgactacgaaagacatcctagttacagagaaaggaaatactgtgttagaatttttagtaggactctttaaaccttttgtggaaagctatcagataatttgcaagtaccttttgagtgaagaagaggaccacttcagtgaggaacagtacttggctgcagtcagaaaattcacaagtcagcttctcgatcaaggtacctctcaatgttatgatgtattatcttctgatgtgcagaaaaacgccttagcagcctgtgtgaggctcggagtagtggagaagaagaagataaataataactgtatatttaatgtgaatgaacctgccacaaccaaattagaagaaatgcttggttgtaagacaccaataggaaaaccagccactgcaaaactttaataatcaacaaatagttatggaaaattcggtcacgtaattactctcatcg

SEQ ID NO: 12518 - DNA, 2643 bp, Homo sapiens
  source 1..2643: mol_type = unassigned DNA
ttccgtcctggctgagatggcggcgcccgggatcctgtgtagcggctgcagagggtgccgccgccctaggcgaagtagggccgtcctgagcgaaagaaccgcccccagcaggagcaccaccacggcttagcaaagaatcccagaccccgcccgggaaggcagccgcaccatggagtcttccagttcatctaactcttatttctccgttggcccaaccagtcccagcgctgtcgtgctcctctactcgaaggagctcaaaaagtgggatgagtttgaagatattttagaagagaggaggcatgtcagtgacttgaaatttgcaatgaaatgctacacacctcttgtctataagggaattactccatgtaaaccaattgatattaaatgtagtgttctcaattctgaggagattcattatgtcattaaacagctttccaaggaatcccttcaatctgtggatgtcctccgagaggaagtgagtgagatcttagatgaaatgagtcacaaactgcgtcttggagccattcggttttgtgccttcaccctgagcaaagtatttaaacaaattttctcgaaggtgtgtgtaaatgaagaaggtattcagaaactacaaagagccatccaggagcatcctgttgttctgctgcctagtcatcgaagttacattgacttcctcatgttgtcttttcttctatacaattatgatttgcctgtgccagttatagcagcaggaatggacttcctgggaatgaaaatggttggtgagctgctacgaatgtcgggtgcctttttcatgcggcgtacctttggtggcaataaactctactgggctgtattctctgaatatgtaaaaactatgttacggaatggttatgctcctgttgaatttttcctcgaagggacaagaagccgctctgccaagacattgactcctaaatttggtcttctgaatattgtgatggagccattttttaaaagagaagtttttgatacctaccttgtcccaattagtatcagttatgataagatcttggaagaaactctttatgtgtatgagcttctaggggttcctaaaccaaaagagtctacaactgggttgctgaaagccagaaagattctctctgaaaattttggaagcatccatgtgtactttggagatcctgtgtcacttcgatctttggcagctgggaggatgagtcggagctcatataacttggttccaagatacattcctcagaaacagtctgaggacatgcatgcctttgtcactgaagttgcctacaaaatggagcttctgcaaattgaaaacatggttttgagcccctggaccctaatagttgctgttctgcttcagaaccggccatccatggactttgatgctctggtggaaaagactttatggctaaaaggcttaacccaggcatttggagggtttctcatttggcctgataataaacctgctgaagaagttgtcccggccagcattcttctgcattccaacattgccagccttgtcaaagaccaggtgattctgaaagtggactccggagactcggaagtggtcgatgggcttatgctccagcacatcactctcctcatgtgctcagcttataggaaccagctgctcaacatttttgtgcgcccatccttagtagcagtagcattgcagatgacaccagggttcaggaaagaggatgtctacagttgctttcgcttcctacgtgatgtttttgcagatgagttcatcttccttccaggaaacacactaaaggactttgaagaaggctgttacctgctttgtaaaagtgaagccatacaagtgactacgaaagacatcctagttacagagaaaggaaatactgtgttagaatttttagtaggactctttaaaccttttgtggaaagctatcagataatttgcaagtaccttttgagtgaagaagaggaccacttcagtgaggaacagtacttggctgcagtcagaaaattcacaagtcagcttctcgatcaaggtacctctcaatgttatgatgtattatcttctgatgtgcagaaaaacgccttagcagcctgtgtgaggctcggagtagtggagaagaagaagataaataataactgtatatttaatgtgaatgaacctgccacaaccaaattagaagaaatgcttggttgtaagacaccaataggaaaaccagccactgcaaaactttaataatcaacaaatagttatggaaaattcggtcacgtaattactctcatcgaaggactcattacaacaaacagggaagtaaaggaagagacacatcctctcatactccctgagactctgagaacagtggacgcagagggaagagatgatcattggaagcaatcagtttactcttccccaccacagtggttaaaaggcgtttgtatctgacactatgtgtgtgttttaaaataaacttttggaaacatgtttggaaaagcaaagctcagctcatttcactaacacttttcagcttactatatgtattaaacttttatgttgacttttgaattaaagtatgacaacactgaaagctctggatattaaaagaaaatgaaaagggcatatctacgttacttgtagcttgctttaattaaagttgcctcaaacaagta

SEQ ID NO: 12519 - DNA, 1924 bp, Homo sapiens
  source 1..1924: mol_type = unassigned DNA
cctggctgagatggcggcgcccgggatcctgtgtagcggctgcagagggtgccgccgccctaggcgaagtagggccgtcctgagcgaaagaaccgcccccagcaggagcaccaccacggcttagcaaagaatcccagaccccgcccgggaaggcagccgcaccatggagtcttccagttcatctaactcttatttctccgttggcccaaccagtcccagcgctgtcgtgctcctctactcgaaggagctcaaaaagtgggatgagtttgaagatattttagaagagaggaggcatgtcagtgacttgaaatttgcaatgaaatgctacacacctcttgtctataagggaattactccatgtaaaccaattgatattaaatgtagtgttctcaattctgaggagattcattatgtcattaaacagctttccaaggaatcccttcaatctgtggatgtcctccgagaggaagtgagtgagatcttagatgaaatgagtcacaaactgcgtcttggagccattcggttttgtgccttcaccctgagcaaagtatttaaacaaattttctcgaagctacaaagagccatccaggagcatcctgttgttctgctgcctagtcatcgaagttacattgacttcctcatgttgtcttttcttctatacaattatgatttgcctgtgccagttatagcagcaggaatggacttcctgggaatgaaaatggttggtgagctgctacgaatgtcgggtgcctttttcatgcggcgtacctttggtggcaataaactctactgggctgtattctctgaatatgtaaaaactatgttacggaatggttatgctcctgttgaatttttcctcgaagggacaagaagccgctctgccaagacattgactcctaaatttggtcttctgaatattgtgatggagccattttttaaaagagaagtttttgatacctaccttgtcccaattagtatcagttatgataagatcttggaagaaactctttatgtgtatgagcttctaggggttcctaaaccaaaagagtctacaactgggttgctgaaagccagaaagattctctctgaaaattttggaagcatccatgtgtactttggagatcctgtgtcacttcgatctttggcagctgggaggatgagtcggagctcatataacttggttccaagatacattcctcagaaacagtctgaggacatgcatgcctttgtcactgaagttgcctacaaaatggagcttctgcaaattgaaaacatggttttgagcccctggaccctaatagttgctgttctgcttcagaaccggccatccatggactttgatgctctggtggaaaagactttatggctaaaaggcttaacccaggcatttggagggtttctcatttggcctgataataaacctgctgaagaagttgtcccggccagcattcttctgcattccaacattgccagccttgtcaaagaccaggtgattctgaaagtggactccggagactcggaagtggtcgatgggcttatgctccagcacatcactctcctcatgtgctcagcttataggaaccagctgctcaacatttttgtgcgcccatccttagtagcagtagcattgcagatgacaccagggttcaggaaagaggatgtctacagttgctttcgcttcctacgtgatgtttttgcagatgagttcatcttccttccaggaaacacactaaaggactttgaagaaggctgttacctgctttgtaaaagtgaagccatacaagtgactacgaaagacatcctagttacagagaaaggaaatactgtgttagaatttttagtaggactctttaaaccttttgtggaaagctatcagataatttgcaagtaccttttgagtgaagaagaggaccacttcagtgag

SEQ ID NO: 12520 - DNA, 839 bp, Homo sapiens
  source 1..839: mol_type = unassigned DNA
ggcttccgtcctggctgagatggcggcgcccgggatcctgtgtagcggctgcagagggtgccgccgccctaggcgaagtagggccgtcctgagcgaaagaaccgcccccagcaggagcaccaccacggcttagcaaagaatcccagaccccgcccgggaaggcagccgcaccatggagtcttccagttcatctaactcttatttctccgttggcccaaccagtcccagcgctgtcgtgctcctctactcgctttccaaggaatcccttcaatctgtggatgtcctccgagaggaagtgagtgagatcttagatgaaatgagtcacaaactgcgtcttggagccattcggttttgtgccttcaccctgagcaaagtatttaaacaaattttctcgaaggtgtgtgtaaatgaagaaggtattcagaaactacaaagagccatccaggagcatcctgttgttctgctgcctagtcatcgaagttacattgacttcctcatgttgtcttttcttctatacaattatgatttgcctgtgccagttatagcagcaggaatggacttcctgggaatgaaaatggttggtgagctgctacgaatgtcgggtgcctttttcatgcggcgtacctttggtggcaataaactctactgggctgtattctctgaatatgtaaaaactatgttacggaatggttatgctcctgttgaatttttcctcgaagggacaagaagccgctctgccaagacattgactcctaaatttggtcttctgaatattgtgatggagccattttttaaaagagaagtttttgatacctaccttgtcccaattagtatcagtt

SEQ ID NO: 12521 - DNA, 5137 bp, Homo sapiens
  source 1..5137: mol_type = unassigned DNA
agtttggtctggagcagctgaaaccggtttgagcgtggctgcttcctgccgctcgacgccgcggcaggccgcctggggggagcgctggcgaggcacggacggcgggcgcccggtacctctgcccgcggtcctcgctctcgggcggggcggcggcgacgcggacctgcggactagcgaacccggagcacgacatcataaaataaatccatcagaatgacaccttctcaggttgcctttgaaataagaggaactcttttaccaggagaagtttttgcgatatgtggaagctgtgatgctttgggaaactggaatcctcaaaatgctgtggctcttcttccagagaatgacacaggtgaaagcatgctatggaaagcaaccattgtactcagtagaggagtatcagttcagtatcgctacttcaaagggtactttttagaaccaaagactatcggtggtccatgtcaagtgatagttcacaagtgggagactcatctacaaccacgatcaataacccctttagaaagcgaaattattattgacgatggacaatttggaatccacaatggtgttgaaactctggattctggatggctgacatgtcagactgaaataagattacgtttgcattattctgaaaaacctcctgtgtcaataaccaagaaaaaattaaaaaaatctagatttagggtgaagctgacactagaaggcctggaggaagatgacgatgatagggtatctcccactgtactccacaaaatgtccaatagcttggagatatccttaataagcgacaatgagttcaagtgcaggcattcacagccggagtgtggttatggcttgcagcctgatcgttggacagagtacagcatacagacgatggaaccagataacctggaactaatctttgattttttcgaagaagatctcagtgagcacgtagttcagggtgatgcccttcctggacatgtgggtacagcttgtctcttatcatccaccattgctgagagtggaaagagtgctggaattcttactcttcccatcatgagcagaaattcccggaaaacaataggcaaagtgagagttgactatataattattaagccattaccaggatacagttgtgacatgaaatcttcattttccaagtattggaagccaagaataccattggatgttggccatcgaggtgcaggaaactctacaacaactgcccagctggctaaagttcaagaaaatactattgcttctttaagaaatgctgctagtcatggtgcagcctttgtagaatttgacgtacacctttcaaaggactttgtgcccgtggtatatcatgatcttacctgttgtttgactatgaaaaagaatctgtggttcaggaggaaaattccttttcagaaaatcagccatttccttctcttaagatgggttcggcaaaagcagaacaaatatccgatactatttttaactcaaggaaaatctgagatttatcctgaactcatggacctcagatctcggacaacccccattgcaatgagctttgcacagtttgaaaatctactggggataaatgtacatactgaagacttgctcagaaacccatcctatattcaagaggcaaaagctaagggactagtcatattctgctggggtgatgataccaatgatcctgaaaacagaaggaaattgaaggaacttggagttaatggtctaatttatgataggatatatgattggatgcctgaacaaccaaatatattccaagtggagcaattggaacgcctgaagcaggaattgccagagcttaagagctgtttgtgtcccactgttagccgctttgttccctcatctttgtgtggggagtctgatatccatgtggatgccaacggcattgataacgtggagaatgcttagtttttattgcacagaggtcattttgggggcgtgcaccgctgttctgggtattcatttttcatcactgagcattgttgatctatgccttttgggcttctcagttcaatgaagcaataatgaagtatttaactctttcactacagttcttgcaagtatgctatttaaattacttggccaggtataattgccagtcagtctctttatagtgagaaaatttattggttagtaatataaatattttaaactaaatatataaatctataatgttaaacatatgttcattaaaagcatagcactttgaaattaactatataaatagctcatatttacacttacagcttttcatttgatcaggtctgaaatctttagcacttaaggaaaatgactatgcataattatacctgaccatgaaaaaaataagtacctcaaatgcatgcatttgcactggtgattccaactgcacaaatctttgtgccatcttgtatataggtattttttacatgggttgacatgcacacaacaccattttcattcagtatgaaccttgaggctgctgccatttttccacttaaccaaaccagcctgaaggtgaacctcgaaacttgtttcataaatctttcaaaagttgttttacatcaatgttaaaatttcaaaatgctgcagggtaatttaatgtataaaatattagtaagaaaaagtatgtattgcatacttagtagaatagatcacaacatacaaattcaattcagtgcatgctttaggtgttaagcatgagattgtacatgtttactgttaggtccttgcatctgtggtgctaggtgagtatgagaagatgtcaaggactggacgtattttgttgcctaaaaaaaaaaggctgtttgtaggcgttttaaatatgcttattttgtgtgtctctcactacctattacacactgttgctttgtgggtttgttttgtatgtgcgtgtgttatacagtagttaaatttccatgcagaaaaataaatgtcctgaattttcatattagtattctttattgtatatcatgcatgtaatttatttagaaatgtaggtcttactaaatgtatatgcatgtatttcagattatactaggatttcttggattagaagcagattgtgttaactgtaacttaaagaatgaatgttaaataaaatgatacagatttattttcttcattacaaaatgaaatttcaagaaggtgttacttttgtagaatggttttataatatgacaagaaattttaatatagtgtctaccctaaagggatggcttatttgcatctaccttttactgcatgtttttcacaaggcagtttattcatatattgacatattttggtagtagctgagaacctaagacttgaaattatacattgtgtagtattttttaagctaagcaatgcaattttggtcagatcttatttgtgtgaagataggctctgaaatcctatggtattgcgtttgtaacgttgatattaatgcaaaatagtttaggaaatggagtcttctgcaagggttctgtatacttttcccacattgtatgagattttccaaaattttggtgtgaattgggcacttttggaaaactcctgaaaaagaattagtttccttcatctgcagacctttgtccaatacggttaccatttctttatagtaactcgattagccatatatgtttgtttctagtcctgctcctttgctcctctcctatgccttcccagtgctggctccattttgaagactcaaggacagaggggaagcagatcataaagagaaaaaggagacagaagaaaggatgaaggaaggaggtcatggggagtgtggcttctgagcagtttagttgctggggagagcagacagtcactgcctacaatacagacagaaccttcctgctcactttctgtcctatctcttcctgaccttatgaaccagtgttagtagatgattaaaacatgacaagcaatggctccttattttcacaggactaagtccgggccttcgtatcactagctgttgccttttacaccctgcttcagccaccctgtccctgtcattggccctggacttcctctctgtgcccgtgtgtcctctgcctgggagccctctcctcccatagtcactttctctctgccaaactcatttcttcttgtgcccaagacctctctcctgagcccttgtggaaacttcaggaaggatgaatccgtctttgtgctccacggctcgtaccttgatcaggctgtgcatcacagtaattctgttctaggtaggcagagttgatctttgtctcatctgccaggctgcaggctcttcaagggcagggaccttgtcatagtcatttttattttcacagtgcttggaacatggtggaaaatgaatgttggaattattggagtaatataatttgtatcaaatgtccttttgaattaagagatttagttatgtttactaagaatgtaaactttgaattggtttgcattttaacaattaggatggtttattgatgtgaattttgaaatgtagaggtataatgttaaattattttatactttatggaaatcaagtgaaatgtttgaaaaaatgccgccattatcctctggtattttctactctctggaattatgtgctgtaaatgatcggctgtaaatgtgaggcacaccacccacccctgtgtggaaagtgttgtggcgcttcctgccacccacccacctctctgccgttgctccttgtgacacttgtctgtcgtctcccatccaaactccaagcttacagctacctcagtactgctttgcttgtctgaaacacctcctttgccttccttcagtgtcccgctcaggtgcagcctcctccctaaagctcatctcagcttttgatctgaatgatgatggaaacatgcagacagcctctcagtcttactatttaatgttgtagctgggaaaaaacccagagaggttaactgatatactgggttgggactaggatgtgggttttgtgactctgaatcccatgttctcaaactacgctgccttccgaagtctggcatttgttagctcatgcttccttgtagtccagcttcttatgtgcctgttatattctccagtaagattgtaagccccttaagggcagggacgtctttgcatctctagcactgctatagtgttctatccttagttatgaactagataaataaatggtggtggcaacaatcct

SEQ ID NO: 12522 - DNA, 5454 bp, Homo sapiens
  source 1..5454: mol_type = unassigned DNA
agtttggtctggagcagctgaaaccggtttgagcgtggctgcttcctgccgctcgacgccgcggcaggccgcctggggggagcgctggcgaggcacggacggcgggcgcccggtacctctgcccgcggtcctcgctctcgggcggggcggcggcgacgcggacctgcggactagcgaacccggagcacgacatcataaaataaatccatcagaatgacaccttctcaggttgcctttgaaataagaggaactcttttaccaggagaagtttttgcgatatgtggaagctgtgatgctttgggaaactggaatcctcaaaatgctgtggctcttcttccagagaatgacacaggtgaaagcatgctatggaaagcaaccattgtactcagtagaggagtatcagttcagtatcgctacttcaaagggtactttttagaaccaaagactatcggtggtccatgtcaagtgatagttcacaagtgggagactcatctacaaccacgatcaataacccctttagaaagcgaaattattattgacgatggacaatttggaatccacaatggtgttgaaactctggattctggatggctgacatgtcagactgaaataagattacgtttgcattattctgaaaaacctcctgtgtcaataaccaagaaaaaattaaaaaaatctagatttagggtgaagctgacactagaaggcctggaggaagatgacgatgatagggtatctcccactgtactccacaaaatgtccaatagcttggagatatccttaataagcgacaatgagttcaagtgcaggcattcacagccggagtgtggttatggcttgcagcctgatcgttggacagagtacagcatacagacgatggaaccagataacctggaactaatctttgattttttcgaagaagatctcagtgagcacgtagttcagggtgatgcccttcctggacatgtgggtacagcttgtctcttatcatccaccattgctgagagtggaaagagtgctggaattcttactcttcccatcatgagcagaaattcccggaaaacaataggcaaagtgagagttgactatataattattaagccattaccaggatacagttgtgacatgaaatcttcattttccaagtattggaagccaagaataccattggatgttggccatcgaggtgcaggaaactctacaacaactgcccagctggctaaagttcaagaaaatactattgcttctttaagaaatgctgctagtcatggtgcagcctttgtagaatttgacgtacacctttcaaaggactttgtgcccgtggtatatcatgatcttacctgttgtttgactatgaaaaagaaatttgatgctgatccagttgaattatttgaaattccagtaaaagaattaacatttgaccaactccagttgttaaagctcactcatgtgactgcactgaaatctaaggatcggaaagaatctgtggttcaggaggaaaattccttttcagaaaatcagccatttccttctcttaagatggttttagagtctttgccagaagatgtagggtttaacattgaaataaaatggatctgccagcaaagggatggaatgtgggatggtaacttatcaacatattttgacatgaatctgtttttggatataattttaaaaactgttttagaaaattctgggaagaggagaatagtgttttcttcatttgatgcagatatttgcacaatggttcggcaaaagcagaacaaatatccgatactatttttaactcaaggaaaatctgagatttatcctgaactcatggacctcagatctcggacaacccccattgcaatgagctttgcacagtttgaaaatctactggggataaatgtacatactgaagacttgctcagaaacccatcctatattcaagaggcaaaagctaagggactagtcatattctgctggggtgatgataccaatgatcctgaaaacagaaggaaattgaaggaacttggagttaatggtctaatttatgataggatatatgattggatgcctgaacaaccaaatatattccaagtggagcaattggaacgcctgaagcaggaattgccagagcttaagagctgtttgtgtcccactgttagccgctttgttccctcatctttgtgtggggagtctgatatccatgtggatgccaacggcattgataacgtggagaatgcttagtttttattgcacagaggtcattttgggggcgtgcaccgctgttctgggtattcatttttcatcactgagcattgttgatctatgccttttgggcttctcagttcaatgaagcaataatgaagtatttaactctttcactacagttcttgcaagtatgctatttaaattacttggccaggtataattgccagtcagtctctttatagtgagaaaatttattggttagtaatataaatattttaaactaaatatataaatctataatgttaaacatatgttcattaaaagcatagcactttgaaattaactatataaatagctcatatttacacttacagcttttcatttgatcaggtctgaaatctttagcacttaaggaaaatgactatgcataattatacctgaccatgaaaaaaataagtacctcaaatgcatgcatttgcactggtgattccaactgcacaaatctttgtgccatcttgtatataggtattttttacatgggttgacatgcacacaacaccattttcattcagtatgaaccttgaggctgctgccatttttccacttaaccaaaccagcctgaaggtgaacctcgaaacttgtttcataaatctttcaaaagttgttttacatcaatgttaaaatttcaaaatgctgcagggtaatttaatgtataaaatattagtaagaaaaagtatgtattgcatacttagtagaatagatcacaacatacaaattcaattcagtgcatgctttaggtgttaagcatgagattgtacatgtttactgttaggtccttgcatctgtggtgctaggtgagtatgagaagatgtcaaggactggacgtattttgttgcctaaaaaaaaaaggctgtttgtaggcgttttaaatatgcttattttgtgtgtctctcactacctattacacactgttgctttgtgggtttgttttgtatgtgcgtgtgttatacagtagttaaatttccatgcagaaaaataaatgtcctgaattttcatattagtattctttattgtatatcatgcatgtaatttatttagaaatgtaggtcttactaaatgtatatgcatgtatttcagattatactaggatttcttggattagaagcagattgtgttaactgtaacttaaagaatgaatgttaaataaaatgatacagatttattttcttcattacaaaatgaaatttcaagaaggtgttacttttgtagaatggttttataatatgacaagaaattttaatatagtgtctaccctaaagggatggcttatttgcatctaccttttactgcatgtttttcacaaggcagtttattcatatattgacatattttggtagtagctgagaacctaagacttgaaattatacattgtgtagtattttttaagctaagcaatgcaattttggtcagatcttatttgtgtgaagataggctctgaaatcctatggtattgcgtttgtaacgttgatattaatgcaaaatagtttaggaaatggagtcttctgcaagggttctgtatacttttcccacattgtatgagattttccaaaattttggtgtgaattgggcacttttggaaaactcctgaaaaagaattagtttccttcatctgcagacctttgtccaatacggttaccatttctttatagtaactcgattagccatatatgtttgtttctagtcctgctcctttgctcctctcctatgccttcccagtgctggctccattttgaagactcaaggacagaggggaagcagatcataaagagaaaaaggagacagaagaaaggatgaaggaaggaggtcatggggagtgtggcttctgagcagtttagttgctggggagagcagacagtcactgcctacaatacagacagaaccttcctgctcactttctgtcctatctcttcctgaccttatgaaccagtgttagtagatgattaaaacatgacaagcaatggctccttattttcacaggactaagtccgggccttcgtatcactagctgttgccttttacaccctgcttcagccaccctgtccctgtcattggccctggacttcctctctgtgcccgtgtgtcctctgcctgggagccctctcctcccatagtcactttctctctgccaaactcatttcttcttgtgcccaagacctctctcctgagcccttgtggaaacttcaggaaggatgaatccgtctttgtgctccacggctcgtaccttgatcaggctgtgcatcacagtaattctgttctaggtaggcagagttgatctttgtctcatctgccaggctgcaggctcttcaagggcagggaccttgtcatagtcatttttattttcacagtgcttggaacatggtggaaaatgaatgttggaattattggagtaatataatttgtatcaaatgtccttttgaattaagagatttagttatgtttactaagaatgtaaactttgaattggtttgcattttaacaattaggatggtttattgatgtgaattttgaaatgtagaggtataatgttaaattattttatactttatggaaatcaagtgaaatgtttgaaaaaatgccgccattatcctctggtattttctactctctggaattatgtgctgtaaatgatcggctgtaaatgtgaggcacaccacccacccctgtgtggaaagtgttgtggcgcttcctgccacccacccacctctctgccgttgctccttgtgacacttgtctgtcgtctcccatccaaactccaagcttacagctacctcagtactgctttgcttgtctgaaacacctcctttgccttccttcagtgtcccgctcaggtgcagcctcctccctaaagctcatctcagcttttgatctgaatgatgatggaaacatgcagacagcctctcagtcttactatttaatgttgtagctgggaaaaaacccagagaggttaactgatatactgggttgggactaggatgtgggttttgtgactctgaatcccatgttctcaaactacgctgccttccgaagtctggcatttgttagctcatgcttccttgtagtccagcttcttatgtgcctgttatattctccagtaagattgtaagccccttaagggcagggacgtctttgcatctctagcactgctatagtgttctatccttagttatgaactagataaataaatggtggtggcaacaa

SEQ ID NO: 12523 - DNA, 4015 bp, Homo sapiens
  source 1..4015: mol_type = unassigned DNA
ttgtgacatgaaatcttcattttccaagtattggaagccaagaataccattggatgttggccatcgaggtgcaggaaactctacaacaactgcccagctggctaaagttcaagaaaatactattgcttctttaagaaatgctgctagtcatggtgcagcctttgtagaatttgacgtacacctttcaaaggactttgtgcccgtggtatatcatgatcttacctgttgtttgactatgaaaaagaatctgtggttcaggaggaaaattccttttcagaaaatcagccatttccttctcttaagatgggttcggcaaaagcagaacaaatatccgatactatttttaactcaaggaaaatctgagatttatcctgaactcatggacctcagatctcggacaacccccattgcaatgagctttgcacagtttgaaaatctactggggataaatgtacatactgaagacttgctcagaaacccatcctatattcaagaggcaaaagctaagggactagtcatattctgctggggtgatgataccaatgatcctgaaaacagaaggaaattgaaggaacttggagttaatggtctaatttatgataggatatatgattggatgcctgaacaaccaaatatattccaagtggagcaattggaacgcctgaagcaggaattgccagagcttaagagctgtttgtgtcccactgttagccgctttgttccctcatctttgtgtggggagtctgatatccatgtggatgccaacggcattgataacgtggagaatgcttagtttttattgcacagaggtcattttgggggcgtgcaccgctgttctgggtattcatttttcatcactgagcattgttgatctatgccttttgggcttctcagttcaatgaagcaataatgaagtatttaactctttcactacagttcttgcaagtatgctatttaaattacttggccaggtataattgccagtcagtctctttatagtgagaaaatttattggttagtaatataaatattttaaactaaatatataaatctataatgttaaacatatgttcattaaaagcatagcactttgaaattaactatataaatagctcatatttacacttacagcttttcatttgatcaggtctgaaatctttagcacttaaggaaaatgactatgcataattatacctgaccatgaaaaaaataagtacctcaaatgcatgcatttgcactggtgattccaactgcacaaatctttgtgccatcttgtatataggtattttttacatgggttgacatgcacacaacaccattttcattcagtatgaaccttgaggctgctgccatttttccacttaaccaaaccagcctgaaggtgaacctcgaaacttgtttcataaatctttcaaaagttgttttacatcaatgttaaaatttcaaaatgctgcagggtaatttaatgtataaaatattagtaagaaaaagtatgtattgcatacttagtagaatagatcacaacatacaaattcaattcagtgcatgctttaggtgttaagcatgagattgtacatgtttactgttaggtccttgcatctgtggtgctaggtgagtatgagaagatgtcaaggactggacgtattttgttgcctaaaaaaaaaaggctgtttgtaggcgttttaaatatgcttattttgtgtgtctctcactacctattacacactgttgctttgtgggtttgttttgtatgtgcgtgtgttatacagtagttaaatttccatgcagaaaaataaatgtcctgaattttcatattagtattctttattgtatatcatgcatgtaatttatttagaaatgtaggtcttactaaatgtatatgcatgtatttcagattatactaggatttcttggattagaagcagattgtgttaactgtaacttaaagaatgaatgttaaataaaatgatacagatttattttcttcattacaaaatgaaatttcaagaaggtgttacttttgtagaatggttttataatatgacaagaaattttaatatagtgtctaccctaaagggatggcttatttgcatctaccttttactgcatgtttttcacaaggcagtttattcatatattgacatattttggtagtagctgagaacctaagacttgaaattatacattgtgtagtattttttaagctaagcaatgcaattttggtcagatcttatttgtgtgaagataggctctgaaatcctatggtattgcgtttgtaacgttgatattaatgcaaaatagtttaggaaatggagtcttctgcaagggttctgtatacttttcccacattgtatgagattttccaaaattttggtgtgaattgggcacttttggaaaactcctgaaaaagaattagtttccttcatctgcagacctttgtccaatacggttaccatttctttatagtaactcgattagccatatatgtttgtttctagtcctgctcctttgctcctctcctatgccttcccagtgctggctccattttgaagactcaaggacagaggggaagcagatcataaagagaaaaaggagacagaagaaaggatgaaggaaggaggtcatggggagtgtggcttctgagcagtttagttgctggggagagcagacagtcactgcctacaatacagacagaaccttcctgctcactttctgtcctatctcttcctgaccttatgaaccagtgttagtagatgattaaaacatgacaagcaatggctccttattttcacaggactaagtccgggccttcgtatcactagctgttgccttttacaccctgcttcagccaccctgtccctgtcattggccctggacttcctctctgtgcccgtgtgtcctctgcctgggagccctctcctcccatagtcactttctctctgccaaactcatttcttcttgtgcccaagacctctctcctgagcccttgtggaaacttcaggaaggatgaatccgtctttgtgctccacggctcgtaccttgatcaggctgtgcatcacagtaattctgttctaggtaggcagagttgatctttgtctcatctgccaggctgcaggctcttcaagggcagggaccttgtcatagtcatttttattttcacagtgcttggaacatggtggaaaatgaatgttggaattattggagtaatataatttgtatcaaatgtccttttgaattaagagatttagttatgtttactaagaatgtaaactttgaattggtttgcattttaacaattaggatggtttattgatgtgaattttgaaatgtagaggtataatgttaaattattttatactttatggaaatcaagtgaaatgtttgaaaaaatgccgccattatcctctggtattttctactctctggaattatgtgctgtaaatgatcggctgtaaatgtgaggcacaccacccacccctgtgtggaaagtgttgtggcgcttcctgccacccacccacctctctgccgttgctccttgtgacacttgtctgtcgtctcccatccaaactccaagcttacagctacctcagtactgctttgcttgtctgaaacacctcctttgccttccttcagtgtcccgctcaggtgcagcctcctccctaaagctcatctcagcttttgatctgaatgatgatggaaacatgcagacagcctctcagtcttactatttaatgttgtagctgggaaaaaacccagagaggttaactgatatactgggttgggactaggatgtgggttttgtgactctgaatcccatgttctcaaactacgctgccttccgaagtctggcatttgttagctcatgcttccttgtagtccagcttcttatgtgcctgttatattctccagtaagattgtaagccccttaagggcagggacgtctttgcatctctagcactgctatagtgttctatccttagttatgaactagataaataaatggtggtggcaacaa

SEQ ID NO: 12524 - DNA, 2937 bp, Homo sapiens
  source 1..2937: mol_type = unassigned DNA
actccctctctggatgtgtctgctgccgccattgtgcggcgctggtcccctcagagggttcctgctgctgccggtgccttggaccctccccctcgcttctcgttctactgccccaggagcccggcgggtccgggactcccgtccgtgccggtgcgggcgccggcatgtggctgtgggaggaccagggcggcctcctgggccctttctccttcctgctgctagtgctgctgctggtgacgcggagcccggtcaatgcctgcctcctcaccggcagcctcttcgttctactgcgcgtcttcagctttgagccggtgccctcttgcagggccctgcaggtgctcaagccccgggaccgcatttctgccatcgcccaccgtggcggcagccacgacgcgcccgagaacacgctggcggccattcggcaggcagctaagaatggagcaacaggcgtggagttggacattgagtttacttctgacgggattcctgtcttaatgcacgataacacagtagataggacgactgatgggactgggcgattgtgtgatttgacatttgaacaaattaggaagctgaatcctgcagcaaaccacagactcaggaatgatttccctgatgaaaagatccctaccctaagggaagctgttgcagagtgcctaaaccataacctcacaatcttctttgatgtcaaaggccatgcacacaaggctactgaggctctaaagaaaatgtatatggaatttcctcaactgtataataatagtgtggtctgttctttcttgccagaagttatctacaagatgagacaaacagatcgggatgtaataacagcattaactcacagaccttggagcctaagccatacaggagatgggaaaccacgctatgatactttctggaaacattttatatttgttatgatggacattttgctcgattggagcatgcataatatcttgtggtacctgtgtggaatttcagctttcctcatgcaaaaggattttgtatccccggcctacttgaagaagtggtcagctaaaggaatccaggttgttggttggactgttaatacctttgatgaaaagagttactacgaatcccatcttggttccagctatatcactgacagcatggtagaagactgcgaacctcacttctagactttcacggtgggacgaaacgggttcagaaactgccaggggcctcatacagggatatcaaaataccctttgtgctagcccaggccctggggaatcaggtgactcacacaaatgcaatagttggtcactgcatttttacctgaaccaaagctaaacccggtgttgccaccatgcaccatggcatgccagagttcaacactgttgctcttgaaaatctgggtctgaaaaaacgcacaagagcccctgccctgccctagctgaggcacacagggagacccagtgaggataagcacagattgaattgtacagtttgcagatgcagatgtaaatgcatgggacatgcatgataactcagagttgacattttaaaacttgccacacttatttcaaatatttgtactcagctatgttaacatgtactgtagacatcaaacttgtggccatactaataaaattattaaaaggagcactaaaggaaaactgtgtgccaagcatcatatcctaaggcatacggaatttggggaagccaccatgcaatccagtgaggcttcagtgtacagcaaccaaaatggtagggaggtcttgaagccaatgagggatttatagcatcttgaatagagagctgcaaaccaccagggggcagagttgcatttttccaggctttttaggaagctctgcaacagatgtgatctgatcataggcaattagaactggaagaaacttccaaaaatatctaggtttgtcctcattttacaaatgaggaaactaaactctgtggaagggaaggggttgcctcaaaagtcacagcttagctgggcacagtggctcatgccgataatcccagcaattcagaaagctgaggcaggaggattacttgaggccagactgggcaatatagcaagaccccatctctaaaaaattaggcatggtggtgcatgcctgtattcccagctactcaggaggttgaggtgggaggatcacttgagcccagaagttcaaggctgcaatgagccatgattacaccacggcactacaaccttggtggcacagtgagaacctgactcttaaaaaaaaaaaaaaaaaaaaaaaaaaaaagataactagaacttctagaacatcttgtttacagttagccagaaactatacaagtggtttaacatgcattatcttactcaatccatacaaaagtcttatggaggtgttagcactctttctactgatgaagaactgaggtacttcataaaaccacttacccaaggtgtcttgagtctggtacaactggcattcaaatctaggtcagtctgcccccagagccactacccttacccctcactgaatctgcctttatattgttgagcccatgaccccaaactgctctttccaatttgaacttccagggattttattgtgaacttacatagcaacattaaaatgaagttgaattgtttttaatggcaacgccgtctgtctcctctagcttaccgcttctcacctttcaaccccatctgtggcctttgtccaggcccacagcttagccatggcttccctcctgcatccctgccgtgggttgctggcctcacacttgcagcagctggacagtgattttagaaggccaccagtccccatagctatgtgacaatgagaagcaaacttttttgtgacagattgtattggcataggcatgatagatggggattggtacgttttgaatcagcatttgcaaaaaaattgtcttgaattttaaaataaacaacaaagatttgttcattgagtgcaa

SEQ ID NO: 12525 - DNA, 3523 bp, Homo sapiens
  source 1..3523: mol_type = unassigned DNA
cggggatgacagcggaggtggcagcggcgcggcgctgagcgagcggcgagggagcaggggaagaggaggaagtggagccgcggccgggagctcgggagtcggccgccgcgccgaggttcgccccgttttgcagagagagccgagtcgggacctggaaagacttccccgcggggctccggccgccgcgcctccccgccggcgcctgccctgccctgcccgtcccagccccgcggttcggggcgtgcggccgggacgcgcggagccccggccctgacccgctgcgccgggacgggacgctcctaacgccgccgtaccggtccgtggttgcagggtcgctccgcgcctttccgtcagtgagggtcggaaccccagctccagggctagcgcagtgtggccccaggccctcgcctccggtgcacgggaccccggacccccccagcctctggcttcacgagaccccaaccttcagttggaacagcttggaacagcgcgagcgcccgggaagccctggccgggtcgtgcgctcggtgaggggtcctaggcgggcaggacagtcggaccgaaccgccgggctggtgccgcgagcccaggctgtcaccttcgtcccgcctcaggtgaggggttcagcgcctgccccgaagataacacaggggtccccttctgtcccggcggcctgcgagagccaaggctgcagctctcccagtgaagtgatatcactgcctctgtggacaagacacctccaggagcccagctcacagccaccggtaccttcttccaggacaagctgggggcctccatgggcgcctgagggccaggcgccagggccgtgggcacgagtatggtgagacaccagcccctgcagtactacgagccacagctgtgcctctcctgcctcacgggcatctacggctgccgttggaagcgctaccagcgctcccatgatgataccacaccgtgggagcgcctctggttcctgctcctcaccttcacctttggcctcacgctcacctggctttacttctggtgggaagtccacaatgactatgatgaattcaactggtacctctacaaccgcatgggctactggagcgactggcccgtacccatccttgtgaccacagctgctgccttcgcatacatcgctggcctcctggtcctggcactatgtcacattgccgtggggcagcagatgaacctgcactggctgcacaagatcgggctggtggtcatcctggcttccacggtggtggccatgtcggccgtggcccagctgtgggaggacgagtgggaggtgctgctgatctccctgcagggcacagcgccattcctgcatgtgggggctgtggcagcagtcaccatgctctcctggatcgtggcaggacagttcgcccgcgcagagcggacctcctcccaggtgaccattctctgtaccttcttcaccgtggtgtttgccctctacctggcccctctcaccatctcctctccctgcatcatggagaagaaagacctcggccccaagcctgctctcattggccaccgcggggcccccatgctggctccagagcacacgctcatgtccttccggaaggccctcgagcagaagctgtacgggctccaggctgacattaccatcagcctggacggcgtgcccttcctcatgcatgacaccaccctgcggcgcaccaccaacgtggaggaggagttcccggagctggcccgcaggcctgcctccatgcttaactggaccaccctgcagagactcaacgctggccagtggttcctgaagactgaccccttctggacagccagctccctgtcaccctccgaccacagagaggcccagaaccagtccatctgcagcctggcagagctcctggagctggccaagggcaatgccacactgctgctcaacctgcgtgacccgccccgggagcacccctaccgcagcagttttatcaacgtgactctggaggccgtgctgcactccggcttcccccagcaccaggtcatgtggctgcctagcaggcagaggcccctggtgcggaaggtggctcccggcttccaacagacatcaggctccaaggaggcagtcgccagcctgcggagaggccacatccagcggctgaacctgcgctacactcaggtgtcccgccaggagctcagggactacgcgtcctggaacctgagtgtgaacctctacacagtcaacgcaccgtggctcttctccctgctgtggtgtgcgggggtcccatccgtcacctctgacaactcccacgccctgtcccaggtgccttcccccctctggatcatgcccccggacgagtactgtctcatgtgggtcactgccgacctggtctccttcaccctcatcgtgggcatcttcgtgctccagaagtggcgcctgggtggcatacggagctacaaccctgagcagatcatgctgagtgctgcggtgcgccggaccagccgggacgtcagcatcatgaaggagaagcttattttctcagagatcagcgatggtgtagaggtctccgatgtgctctccgtatgttcagacaacagttatgacacatatgccaacagcaccgccacccctgtgggcccccgagggggtggcagccacaccaagaccctcatagagcggagtgggcgttagctgaagacatgtctgtcccacctgtacctgacacagaagctggggagcctaggagagctggtggaagtgtgtctgaactcggagtgctctgggagcgggctccacagcctccttgtgggctccagccccttgtcagccgcagcctctcttgagggggactccctgtctcctgaggcccagctgggccaggactccatcctttcagatgcccctgcaggcctggggctccttctgggaagtatggggcctagggcttggtccccctcttctgaggccctctcctgtatcccgacctggaagctttgatgggtcatgggccatgccataccccctgtggcaatggagtgtgtggatgctcacctgtgccatctgtcctcctgtctgtgccaggaggcacctgagttctctgctgttatcctgccccaagggcctgggccgagcctctacctgaagcaactctgctcttcctgtcagtctcaaagcacaaggaggttcagcccaggaggaagccagctgcaatgtggagacacgtcctcctccccaacccacctcatgccaccgccaaccccctgccccaggagcgggcctgagccacgtcctctaggagcagctggagatggccaaaagagtgagctcaggactactggatcccatgcccaggtgtccagcagacctcaaggcagaagggtcacctaacccaggagtccacagactgatgtgacctcaggttcccacatcagtggccacagggcagggcccacctggtagaagtgttctggatatggccagggtgggtgtgtggctaagtgggcctgaacagagggaacctagggcccttggccaatgtgattaaagctgccatcttga

SEQ ID NO: 12526 - DNA, 3084 bp, Homo sapiens
  source 1..3084: mol_type = unassigned DNA
ggccgggagctcgggagtcggccgccgcgccgaggttcgccccgttttgcagagagagccgagtcgggacctggaaagacttccccgcggggctccggccgccgcgcctccccgccggcgcctgccctgccctgcccgtcccagccccgcggttcggggcgtgcggccgggacgcgcggagccccggccctgacccgctgcgccgggacgggacgctcctaacgccgccgtaccggtccgtggttgcagggtcgctccgcgcctttccgtcagtgagggtcggaaccccagctccagggctagcgcagtgtggccccaggccctcgcctccggtgcacgggaccccggacccccccagcctctggcttcacgagaccccaaccttcagttggaacagcttggaacagcgcgagcgcccgggaagccctggccgggtcgtgcgctcggtgaggggtcctaggcgggcaggacagtcggaccgaaccgccgggctggtgccgcgagcccaggctgtcaccttcgtcccgcctcaggtgaggggttcagcgcctgccccgaagataacacaggggtccccttctgtcccggcggcctgcgagagccaaggctgcagctctcccagtgaagtgatatcactgcctctgtggacaagacacctccaggagcccagctcacagccaccggtaccttcttccaggacaagctgggggcctccatgggcgcctgagggccaggcgccagggccgtgggcacgagtatggtgagacaccagcccctgcagtactacgagccacagctgtgcctctcctgcctcacgggcatctacggctgccgttggaagcgctaccagcgctcccatgatgataccacaccgggcacagcgccattcctgcatgtgggggctgtggcagcagtcaccatgctctcctggatcgtggcaggacagttcgcccgcgcagagcggacctcctcccaggtgaccattctctgtaccttcttcaccgtggtgtttgccctctacctggcccctctcaccatctcctctccctgcatcatggagaagaaagacctcggccccaagcctgctctcattggccaccgcggggcccccatgctggctccagagcacacgctcatgtccttccggaaggccctcgagcagaagctgtacgggctccaggctgacattaccatcagcctggacggcgtgcccttcctcatgcatgacaccaccctgcggcgcaccaccaacgtggaggaggagttcccggagctggcccgcaggcctgcctccatgcttaactggaccaccctgcagagactcaacgctggccagtggttcctgaagactgaccccttctggacagccagctccctgtcaccctccgaccacagagaggcccagaaccagtccatctgcagcctggcagagctcctggagctggccaagggcaatgccacactgctgctcaacctgcgtgacccgccccgggagcacccctaccgcagcagttttatcaacgtgactctggaggccgtgctgcactccggcttcccccagcaccaggtcatgtggctgcctagcaggcagaggcccctggtgcggaaggtggctcccggcttccaacagacatcaggctccaaggaggcagtcgccagcctgcggagaggccacatccagcggctgaacctgcgctacactcaggtgtcccgccaggagctcagggactacgcgtcctggaacctgagtgtgaacctctacacagtcaacgcaccgtggctcttctccctgctgtggtgtgcgggggtcccatccgtcacctctgacaactcccacgccctgtcccaggtgccttcccccctctggatcatgcccccggacgagtactgtctcatgtgggtcactgccgacctggtctccttcaccctcatcgtgggcatcttcgtgctccagaagtggcgcctgggtggcatacggagctacaaccctgagcagatcatgctgagtgctgcggtgcgccggaccagccgggacgtcagcatcatgaaggagaagcttattttctcagagatcagcgatggtgtagaggtctccgatgtgctctccgtatgttcagacaacagttatgacacatatgccaacagcaccgccacccctgtgggcccccgagggggtggcagccacaccaagaccctcatagagcggagtgggcgttagctgaagacatgtctgtcccacctgtacctgacacagaagctggggagcctaggagagctggtggaagtgtgtctgaactcggagtgctctgggagcgggctccacagcctccttgtgggctccagccccttgtcagccgcagcctctcttgagggggactccctgtctcctgaggcccagctgggccaggactccatcctttcagatgcccctgcaggcctggggctccttctgggaagtatggggcctagggcttggtccccctcttctgaggccctctcctgtatcccgacctggaagctttgatgggtcatgggccatgccataccccctgtggcaatggagtgtgtggatgctcacctgtgccatctgtcctcctgtctgtgccaggaggcacctgagttctctgctgttatcctgccccaagggcctgggccgagcctctacctgaagcaactctgctcttcctgtcagtctcaaagcacaaggaggttcagcccaggaggaagccagctgcaatgtggagacacgtcctcctccccaacccacctcatgccaccgccaaccccctgccccaggagcgggcctgagccacgtcctctaggagcagctggagatggccaaaagagtgagctcaggactactggatcccatgcccaggtgtccagcagacctcaaggcagaagggtcacctaacccaggagtccacagactgatgtgacctcaggttcccacatcagtggccacagggcagggcccacctggtagaagtgttctggatatggccagggtgggtgtgtggctaagtgggcctgaacagagggaacctagggcccttggccaatgtgattaaagctgccatcttg

SEQ ID NO: 12527 - DNA, 3106 bp, Homo sapiens
  source 1..3106: mol_type = unassigned DNA
tggtgcctgactcctcacccttcccctgcctcactgccctgtgcttcctcctgcaggacaagctgggggcctccatgggcgcctgagggccaggcgccagggccgtgggcacgagtatggtgagacaccagcccctgcagtactacgagccacagctgtgcctctcctgcctcacgggcatctacggctgccgttggaagcgctaccagcgctcccatgatgataccacaccgtgggagcgcctctggttcctgctcctcaccttcacctttggcctcacgctcacctggctttacttctggtgggaagtccacaatgactatgatgaattcaactggtacctctacaaccgcatgggctactggagcgactggcccgtacccatccttgtgaccacagctgctgccttcgcatacatcgctggcctcctggtcctggcactatgtcacattgccgtggggcagcagatgaacctgcactggctgcacaaggcctcctctgggcttccactatcccctctgtgagggagtttcttctcctggctgcaaagctggcatttgaaagaactgcaccagctggcaccccgggtggggctggcacatgctgtggtcaccttctggggccatgcctggctctcagcaggctgccctgagcacactgcactgctcttctgtcctcgcctgactcccctgcctcagtggcagcagcccccagcccaggacctgcacagaggaggcgtctgtcagcgacccaacctgagccccagagaggagcactgggtaccacacagccccaagatcgggctggtggtcatcctggcttccacggtggtggccatgtcggccgtggcccagctgtgggaggacgagtgggaggtgctgctgatctccctgcagggcacagcgccattcctgcatgtgggggctgtggcagcagtcaccatgctctcctggatcgtggcaggacagttcgcccgcgcagagcggacctcctcccaggtgaccattctctgtaccttcttcaccgtggtgtttgccctctacctggcccctctcaccatctcctctccctgcatcatggagaagaaagacctcggccccaagcctgctctcattggccaccgcggggcccccatgctggctccagagcacacgctcatgtccttccggaaggccctcgagcagaagctgtacgggctccaggctgacattaccatcagcctggacggcgtgcccttcctcatgcatgacaccaccctgcggcgcaccaccaacgtggaggaggagttcccggagctggcccgcaggcctgcctccatgcttaactggaccaccctgcagagactcaacgctggccagtggttcctgaagactgaccccttctggacagccagctccctgtcaccctccgaccacagagaggcccagaaccagtccatctgcagcctggcagagctcctggagctggccaagggcaatgccacactgctgctcaacctgcgtgacccgccccgggagcacccctaccgcagcagttttatcaacgtgactctggaggccgtgctgcactccggcttcccccagcaccaggtcatgtggctgcctagcaggcagaggcccctggtgcggaaggtggctcccggcttccaacagacatcaggctccaaggaggcagtcgccagcctgcggagaggccacatccagcggctgaacctgcgctacactcaggtgtcccgccaggagctcagggactacgcgtcctggaacctgagtgtgaacctctacacagtcaacgcaccgtggctcttctccctgctgtggtgtgcgggggtcccatccgtcacctctgacaactcccacgccctgtcccaggtgccttcccccctctggatcatgcccccggacgagtactgtctcatgtgggtcactgccgacctggtctccttcaccctcatcgtgggcatcttcgtgctccagaagtggcgcctgggtggcatacggagctacaaccctgagcagatcatgctgagtgctgcggtgcgccggaccagccgggacgtcagcatcatgaaggagaagcttattttctcagagatcagcgatggtgtagaggtctccgatgtgctctccgtatgttcagacaacagttatgacacatatgccaacagcaccgccacccctgtgggcccccgagggggtggcagccacaccaagaccctcatagagcggagtgggcgttagctgaagacatgtctgtcccacctgtacctgacacagaagctggggagcctaggagagctggtggaagtgtgtctgaactcggagtgctctgggagcgggctccacagcctccttgtgggctccagccccttgtcagccgcagcctctcttgagggggactccctgtctcctgaggcccagctgggccaggactccatcctttcagatgcccctgcaggcctggggctccttctgggaagtatggggcctagggcttggtccccctcttctgaggccctctcctgtatcccgacctggaagctttgatgggtcatgggccatgccataccccctgtggcaatggagtgtgtggatgctcacctgtgccatctgtcctcctgtctgtgccaggaggcacctgagttctctgctgttatcctgccccaagggcctgggccgagcctctacctgaagcaactctgctcttcctgtcagtctcaaagcacaaggaggttcagcccaggaggaagccagctgcaatgtggagacacgtcctcctccccaacccacctcatgccaccgccaaccccctgccccaggagcgggcctgagccacgtcctctaggagcagctggagatggccaaaagagtgagctcaggactactggatcccatgcccaggtgtccagcagacctcaaggcagaagggtcacctaacccaggagtccacagactgatgtgacctcaggttcccacatcagtggccacagggcagggcccacctggtagaagtgttctggatatggccagggtgggtgtgtggctaagtgggcctgaacagagggaacctagggcccttggccaatgtgattaaagctgccatcttg

SEQ ID NO: 12528 - DNA, 4150 bp, Homo sapiens
  source 1..4150: mol_type = unassigned DNA
tcacagctctggaaaggtccctggagaggatgtggaaagatccccagtaggtagcagagccaggattcgactgaagaccgtgattcaagtgaggctcttaaccctgggccagctgtctgccatttggactgcaaaacccagaggccagatacccctaagaggccagctgttgcacctctgcaaggcggggttccacctcctctcgggtcccggcacctaggccagactcatcgaatgaatgaaagactctgttgtatcccctgtacccaccatggctatcacaagccacagtcccatgaagacagagaacccaaggccactttctcagaggaggacggtgatctgtctctgggcctctagggtgggattcatccttctcagtcagatttcaggagcgatggtggttgcgtttttgggtgtcagtgctattgctataacttaatgatgcaaggtagggaagtcccacagacactgaacatgcagtgatgctgctgagtgtgttgattagcaccaaagcaactgtggaactcagagataataacatttttaattgtattagggtttggggaatcagttttattgcaagtcgtttccattaataggtattgtgatgagatgctcctggaaaccatccttaactcactgtgtgcagggccacctcccacgatggccacaagggggagctgcgcgccgggggcagccgggagaaggggcctgagtgccgagggcggggttctcaggggttcggaggcgcagctgggcctcccagagactgcgcagcctctctgacaccagcgtgctgtctgtccgagaaagcgcacacccccttaccccctgagatgggcagaaggtgttcgtttctggttctgccccttcaaagctccgtgacccagccagctgttcctctccccgaacctcgcttcccgtgtgtgagatgaggatgctcgtgcctccgcggaaccaacctggggaccacgcgaagcgcccccacaggcccaggctgatgggctggaatgaaaagcctccaaagggaaacttcatcccaggcgagactcagcattccccgccggcgagtgaaggtccctgggtagggagcggagatgctggccaccgccccaccctcatcgtctagaaatgccactgtccctgctcggcatcagagggccctggccgctgctgcctctgggaaaggttgcctcgggagaaagggggtgaaggccctgccagcagctagaacggctccagggaggcagggcggccggcagtgctgtgggagaaggacaggcctttggagggagatgggagacgagtctggagaaactagggggacggaggtggcggctttgactgacccttccagagactgggatctgcgggaggctttggaggagagccacaacctgggcttcggggaggcacgcctgggggtgtggaggggggtgggtggagtgagatccacggctaggggcgaggggctgggggccgaggagccgaaaacctctgccgagcttcacgtggttaaagatttcaggtcttacctgtcaccagagatctctgtcccgtagaggtgccacctcatcctccatgagagctgtgctttgctttcttctggaggctgcaaggaggatggcccccatcacggcggacctagatgctgggagtccgggagagggcaggccgtggagatggggcaggtggcgatgtgtttcaccacccactcccgcctgaagtgccactgtgagcccagcccagggtgccaggctgggctgcactccaggctcctgcagcagacccagttcctcagcctccttcccctgaggcctgggcatggcctggacaaatcgggctggtggtcatcctggcttccacggtggtggccatgtcggccgtggcccagctgtgggaggacgagtgggaggtgctgctgatctccctgcagggcacagcgccattcctgcatgtgggggctgtggcagcagtcaccatgctctcctggatcgtggcaggacagttcgcccgcgcagagcggacctcctcccaggtgaccattctctgtaccttcttcaccgtggtgtttgccctctacctggcccctctcaccatctcctctccctgcatcatggagaagaaagacctcggccccaagcctgctctcattggccaccgcggggcccccatgctggctccagagcacacgctcatgtccttccggaaggccctcgagcagaagctgtacgggctccaggctgacattaccatcagcctggacggcgtgcccttcctcatgcatgacaccaccctgcggcgcaccaccaacgtggaggaggagttcccggagctggcccgcaggcctgcctccatgcttaactggaccaccctgcagagactcaacgctggccagtggttcctgaagactgaccccttctggacagccagctccctgtcaccctccgaccacagagaggcccagaaccagtccatctgcagcctggcagagctcctggagctggccaagggcaatgccacactgctgctcaacctgcgtgacccgccccgggagcacccctaccgcagcagttttatcaacgtgactctggaggccgtgctgcactccggcttcccccagcaccaggtcatgtggctgcctagcaggcagaggcccctggtgcggaaggtggctcccggcttccaacagacatcaggctccaaggaggcagtcgccagcctgcggagaggccacatccagcggctgaacctgcgctacactcaggtgtcccgccaggagctcagggactacgcgtcctggaacctgagtgtgaacctctacacagtcaacgcaccgtggctcttctccctgctgtggtgtgcgggggtcccatccgtcacctctgacaactcccacgccctgtcccaggtgccttcccccctctggatcatgcccccggacgagtactgtctcatgtgggtcactgccgacctggtctccttcaccctcatcgtgggcatcttcgtgctccagaagtggcgcctgggtggcatacggagctacaaccctgagcagatcatgctgagtgctgcggtgcgccggaccagccgggacgtcagcatcatgaaggagaagcttattttctcagagatcagcgatggtgtagaggtctccgatgtgctctccgtatgttcagacaacagttatgacacatatgccaacagcaccgccacccctgtgggcccccgagggggtggcagccacaccaagaccctcatagagcggagtgggcgttagctgaagacatgtctgtcccacctgtacctgacacagaagctggggagcctaggagagctggtggaagtgtgtctgaactcggagtgctctgggagcgggctccacagcctccttgtgggctccagccccttgtcagccgcagcctctcttgagggggactccctgtctcctgaggcccagctgggccaggactccatcctttcagatgcccctgcaggcctggggctccttctgggaagtatggggcctagggcttggtccccctcttctgaggccctctcctgtatcccgacctggaagctttgatgggtcatgggccatgccataccccctgtggcaatggagtgtgtggatgctcacctgtgccatctgtcctcctgtctgtgccaggaggcacctgagttctctgctgttatcctgccccaagggcctgggccgagcctctacctgaagcaactctgctcttcctgtcagtctcaaagcacaaggaggttcagcccaggaggaagccagctgcaatgtggagacacgtcctcctccccaacccacctcatgccaccgccaaccccctgccccaggagcgggcctgagccacgtcctctaggagcagctggagatggccaaaagagtgagctcaggactactggatcccatgcccaggtgtccagcagacctcaaggcagaagggtcacctaacccaggagtccacagactgatgtgacctcaggttcccacatcagtggccacagggcagggcccacctggtagaagtgttctggatatggccagggtgggtgtgtggctaagtgggcctgaacagagggaacctagggcccttggccaatgtgattaaagctgccatcttga

SEQ ID NO: 12529 - DNA, 3222 bp, Homo sapiens
  source 1..3222: mol_type = unassigned DNA
ggctgctttagaagaacaagctggtttggcagctacctcagagaagcaggaccctgggcagcgtgaaagggcctctgcccccagggtggctgggctttggatcctggatccgtgggtcctggaggggcaggagtggttcaggaaacagctctcccagtgaagtgatatcactgcctctgtggacaagacacctccaggagcccagctcacagccaccggtaccttcttccagggctgctgttatagtttctgcatggaaagcacttggaacaatgcctggctgttcccctctttggccctctcagggccctaggagcctttgtgtgtcctgctcacattgtctccagggcctcggacagggcctggtacagaacatatgactgagtttctggagtcccacaggccagcgttggagtcctgacacctcagtatagctgtgcacctctgggcaaatagtttctctgctctgagccccaggacaagctgggggcctccatgggcgcctgagggccaggcgccagggccgtgggcacgagtatggtgagacaccagcccctgcagtactacgagccacagctgtgcctctcctgcctcacgggcatctacggctgccgttggaagcgctaccagcgctcccatgatgataccacaccgtgggagcgcctctggttcctgctcctcaccttcacctttggcctcacgctcacctggctttacttctggtgggaagtccacaatgactatgatgaattcaactggtacctctacaaccgcatgggctactggagcgactggcccgtacccatccttgtgaccacagctgctgccttcgcatacatcgctggcctcctggtcctggcactatgtcacattgccgtggggcagcagatgaacctgcactggctgcacaagatcgggctggtggtcatcctggcttccacggtggtggccatgtcggccgtggcccagctgtgggaggacgagtgggaggtgctgctgatctccctgcagggcacagcgccattcctgcatgtgggggctgtggcagcagtcaccatgctctcctggatcgtggcaggacagttcgcccgcgcagagcggacctcctcccaggtgaccattctctgtaccttcttcaccgtggtgtttgccctctacctggcccctctcaccatctcctctccctgcatcatggagaagaaagacctcggccccaagcctgctctcattggccaccgcggggcccccatgctggctccagagcacacgctcatgtccttccggaaggccctcgagcagaagctgtacgggctccaggctgacattaccatcagcctggacggcgtgcccttcctcatgcatgacaccaccctgcggcgcaccaccaacgtggaggaggagttcccggagctggcccgcaggcctgcctccatgcttaactggaccaccctgcagagactcaacgctggccagtggttcctgaagactgaccccttctggacagccagctccctgtcaccctccgaccacagagaggcccagaaccagtccatctgcagcctggcagagctcctggagctggccaagggcaatgccacactgctgctcaacctgcgtgacccgccccgggagcacccctaccgcagcagttttatcaacgtgactctggaggccgtgctgcactccggcttcccccagcaccaggtcatgtggctgcctagcaggcagaggcccctggtgcggaaggtggctcccggcttccaacagacatcaggctccaaggaggcagtcgccagcctgcggagaggccacatccagcggctgaacctgcgctacactcaggtgtcccgccaggagctcagggactacgcgtcctggaacctgagtgtgaacctctacacagtcaacgcaccgtggctcttctccctgctgtggtgtgcgggggtcccatccgtcacctctgacaactcccacgccctgtcccaggtgccttcccccctctggatcatgcccccggacgagtactgtctcatgtgggtcactgccgacctggtctccttcaccctcatcgtgggcatcttcgtgctccagaagtggcgcctgggtggcatacggagctacaaccctgagcagatcatgctgagtgctgcggtgcgccggaccagccgggacgtcagcatcatgaaggagaagcttattttctcagagatcagcgatggtgtagaggtctccgatgtgctctccgtatgttcagacaacagttatgacacatatgccaacagcaccgccacccctgtgggcccccgagggggtggcagccacaccaagaccctcatagagcggagtgggcgttagctgaagacatgtctgtcccacctgtacctgacacagaagctggggagcctaggagagctggtggaagtgtgtctgaactcggagtgctctgggagcgggctccacagcctccttgtgggctccagccccttgtcagccgcagcctctcttgagggggactccctgtctcctgaggcccagctgggccaggactccatcctttcagatgcccctgcaggcctggggctccttctgggaagtatggggcctagggcttggtccccctcttctgaggccctctcctgtatcccgacctggaagctttgatgggtcatgggccatgccataccccctgtggcaatggagtgtgtggatgctcacctgtgccatctgtcctcctgtctgtgccaggaggcacctgagttctctgctgttatcctgccccaagggcctgggccgagcctctacctgaagcaactctgctcttcctgtcagtctcaaagcacaaggaggttcagcccaggaggaagccagctgcaatgtggagacacgtcctcctccccaacccacctcatgccaccgccaaccccctgccccaggagcgggcctgagccacgtcctctaggagcagctggagatggccaaaagagtgagctcaggactactggatcccatgcccaggtgtccagcagacctcaaggcagaagggtcacctaacccaggagtccacagactgatgtgacctcaggttcccacatcagtggccacagggcagggcccacctggtagaagtgttctggatatggccagggtgggtgtgtggctaagtgggcctgaacagagggaacctagggcccttggccaatgtgattaaagctgccatcttga

SEQ ID NO: 12530 - DNA, 825 bp, Homo sapiens
  source 1..825: mol_type = unassigned DNA
ttggaacagcgcgagcgcccgggaagccctggccgggtcgtgcgctcggtgaggggtcctaggcgggcaggacagtcggaccgaaccgccgggctggtgccgcgagcccaggctgtcaccttcgtcccgcctcaggtgaggggttcagcgcctgccccgaagataacacaggggtccccttctgtcccggcggcctgcgagagccaaggctgcagctctcccagtgaagtgatatcactgcctctgtggacaagacacctccaggagcccagctcacagccaccggtaccttcttccagggctgctgttatagtttctgcatggaaagcacttggaacaatgcctggctgttcccctctttggccctctcagggccctaggagcctttgtgtgtcctgctcacattgtctccagggcctcggacagggcctggtacagaacatatgactgagtttctggagtcccacaggccagcgttggagtcctgacacctcagtatagctgtgcacctctgggcaaatagtttctctgctctgagccccaggacaagctgggggcctccatgggcgcctgagggccaggcgccagggccgtgggcacgagtatggtgagacaccagcccctgcagtactacgagccacagctgtgcctctcctgcctcacgggcatctacggctgccgttggaagcgctaccagcgctcccatgatgataccacaccgtgggagcgcctctggttcctgctcctcaccttcacctttggcctcacgctcacctggctttacttctggtgggaagtccacaatgactatgatgaattcaactg

SEQ ID NO: 12531 - DNA, 2441 bp, Homo sapiens
  source 1..2441: mol_type = unassigned DNA
tggacaagacacctccaggagcccagctcacagccaccggtaccttcttccaggacaagctgggggcctccatgggcgcctgagggccaggcgccagggccgtgggcacgagtatggtgagacaccagcccctgcagtactacgagccacagctgtgcctctcctgcctcacgggcatctacggctgccgttggaagcgctaccagcgctcccatgatgataccacaccgggcacagcgccattcctgcatgtgggggctgtggcagcagtcaccatgctctcctggatcgtggcaggacagttcgcccgcgcagagcggacctcctcccaggtgaccattctctgtaccttcttcaccgtggtgtttgccctctacctggcccctctcaccatctcctctccctgcatcatggagaagaaagacctcggccccaagcctgctctcattggccaccgcggggcccccatgctggctccagagcacacgctcatgtccttccggaaggccctcgagcagaagctgtacgggctccaggctgacattaccatcagcctggacggcgtgcccttcctcatgcatgacaccaccctgcggcgcaccaccaacgtggaggaggagttcccggagctggcccgcaggcctgcctccatgcttaactggaccaccctgcagagactcaacgctggccagtggttcctgaagactgaccccttctggacagccagctccctgtcaccctccgaccacagagaggcccagaaccagtccatctgcagcctggcagagctcctggagctggccaagggcaatgccacactgctgctcaacctgcgtgacccgccccgggagcacccctaccgcagcagttttatcaacgtgactctggaggccgtgctgcactccggcttcccccagcaccaggtcatgtggctgcctagcaggcagaggcccctggtgcggaaggtggctcccggcttccaacagacatcaggctccaaggaggcagtcgccagcctgcggagaggccacatccagcggctgaacctgcgctacactcaggtgtcccgccaggagctcagggactacgcgtcctggaacctgagtgtgaacctctacacagtcaacgcaccgtggctcttctccctgctgtggtgtgcgggggtcccatccgtcacctctgacaactcccacgccctgtcccaggtgccttcccccctctggatcatgcccccggacgagtactgtctcatgtgggtcactgccgacctggtctccttcaccctcatcgtgggcatcttcgtgctccagaagtggcgcctgggtggcatacggagctacaaccctgagcagatcatgctgagtgctgcggtgcgccggaccagccgggacgtcagcatcatgaaggagaagcttattttctcagagatcagcgatggtgtagaggtctccgatgtgctctccgtatgttcagacaacagttatgacacatatgccaacagcaccgccacccctgtgggcccccgagggggtggcagccacaccaagaccctcatagagcggagtgggcgttagctgaagacatgtctgtcccacctgtacctgacacagaagctggggagcctaggagagctggtggaagtgtgtctgaactcggagtgctctgggagcgggctccacagcctccttgtgggctccagccccttgtcagccgcagcctctcttgagggggactccctgtctcctgaggcccagctgggccaggactccatcctttcagatgcccctgcaggcctggggctccttctgggaagtatggggcctagggcttggtccccctcttctgaggccctctcctgtatcccgacctggaagctttgatgggtcatgggccatgccataccccctgtggcaatggagtgtgtggatgctcacctgtgccatctgtcctcctgtctgtgccaggaggcacctgagttctctgctgttatcctgccccaagggcctgggccgagcctctacctgaagcaactctgctcttcctgtcagtctcaaagcacaaggaggttcagcccaggaggaagccagctgcaatgtggagacacgtcctcctccccaacccacctcatgccaccgccaaccccctgccccaggagcgggcctgagccacgtcctctaggagcagctggagatggccaaaagagtgagctcaggactactggatcccatgcccaggtgtccagcagacctcaaggcagaagggtcacctaacccaggagtccacagactgatgtgacctcaggttcccacatcagtggccacagggcagggcccacctggtagaagtgttctggatatggccagggtgggtgtgtggctaagtgggcctgaacagagggaacctagggcccttggccaatgtgattaaagctgccatcttga

SEQ ID NO: 12532 - DNA, 2424 bp, Homo sapiens
  source 1..2424: mol_type = unassigned DNA
cggccgtggcccagctgtgggaggacgagtgggaggtgctgctgatctccctgcagggcacagcgccattcctgcatgtgggggctgtggcagcagtcaccatgctctcctggatcgtggcaggacagttcgcccgcgcagagcggacctcctcccaggtgaccattctctgtaccttcttcaccgtggtgtttgccctctacctggcccctctcaccatctcctctccctgcatcatggagaagaaagacctcggccccaagcctgctctcattggccaccgcggggcccccatggcatcaggagaaccctccaggagagctgggaggcagctcagagcccactgtgacagtgagtacggctgaaccgacgtgagttggagaaagacgaagggatcaaagtcagcgccgcattctgccaccagtgcactccatagccctgcaggagagcttcgctggctccagagcacacgctcatgtccttccggaaggccctcgagcagaagctgtacgggctccaggctgacattaccatcagcctggacggcgtgcccttcctcatgcatgacaccaccctgcggcgcaccaccaacgtggaggaggagttcccggagctggcccgcaggcctgcctccatgcttaactggaccaccctgcagagactcaacgctggccagtggttcctgaagactgaccccttctggacagccagctccctgtcaccctccgaccacagagaggcccagaaccagtccatctgcagcctggcagagctcctggagctggccaagggcaatgccacactgctgctcaacctgcgtgacccgccccgggagcacccctaccgcagcagttttatcaacgtgactctggaggccgtgctgcactccggcttcccccagcaccaggtcatgtggctgcctagcaggcagaggcccctggtgcggaaggtggctcccggcttccaacagacatcaggctccaaggaggcagtcgccagcctgcggagaggccacatccagcggctgaacctgcgctacactcaggtgtcccgccaggagctcagggactacgcgtcctggaacctgagtgtgaacctctacacagtcaacgcaccgtggctcttctccctgctgtggtgtgcgggggtcccatccgtcacctctgacaactcccacgccctgtcccaggtgccttcccccctctggatcatgcccccggacgagtactgtctcatgtgggtcactgccgacctggtctccttcaccctcatcgtgggcatcttcgtgctccagaagtggcgcctgggtggcatacggagctacaaccctgagcagatcatgctgagtgctgcggtgcgccggaccagccgggacgtcagcatcatgaaggagaagcttattttctcagagatcagcgatggtgtagaggtctccgatgtgctctccgtatgttcagacaacagttatgacacatatgccaacagcaccgccacccctgtgggcccccgagggggtggcagccacaccaagaccctcatagagcggagtgggcgttagctgaagacatgtctgtcccacctgtacctgacacagaagctggggagcctaggagagctggtggaagtgtgtctgaactcggagtgctctgggagcgggctccacagcctccttgtgggctccagccccttgtcagccgcagcctctcttgagggggactccctgtctcctgaggcccagctgggccaggactccatcctttcagatgcccctgcaggcctggggctccttctgggaagtatggggcctagggcttggtccccctcttctgaggccctctcctgtatcccgacctggaagctttgatgggtcatgggccatgccataccccctgtggcaatggagtgtgtggatgctcacctgtgccatctgtcctcctgtctgtgccaggaggcacctgagttctctgctgttatcctgccccaagggcctgggccgagcctctacctgaagcaactctgctcttcctgtcagtctcaaagcacaaggaggttcagcccaggaggaagccagctgcaatgtggagacacgtcctcctccccaacccacctcatgccaccgccaaccccctgccccaggagcgggcctgagccacgtcctctaggagcagctggagatggccaaaagagtgagctcaggactactggatcccatgcccaggtgtccagcagacctcaaggcagaagggtcacctaacccaggagtccacagactgatgtgacctcaggttcccacatcagtggccacagggcagggcccacctggtagaagtgttctggatatggccagggtgggtgtgtggctaagtgggcctgaacagagggaacctagggcccttggccaatgtgattaaagctgccatcttg

SEQ ID NO: 12533 - DNA, 2597 bp, Homo sapiens
  source 1..2597: mol_type = unassigned DNA
aacgggccttcttgcgacgctcgggtctgggtccgggtccggacgtgcaacagaagccgtcagtggccccgctggctaaaaaagggcaagcatcggaggctcgagccagcggccgcggcgcttcccgacagttcctaattcggggcgctacgccggccccaccacctgttcccggcagccaatggggccgcggggggcggccggggcggagcgcggctacaaaaggcctcgggccccgcgcgcccgcccaccccgctccgggcgcgctctcgggaaggcttggaccgacgcggcccagaggccaggaacattccgcgcgtggaccagccgggccagggcgatgctgcgggtgcggtgtctgcgcggcgggagccgcggcgccgaggcggtgcactacatcggatctcggcttggacgaaccttgacaggatgggtgcagcgaactttccagagcacccaggcagctacggcttcctcccggaactcctgtgcagctgacgacaaagccactgagcctctgcccaaggactgccctgtctcttcttacaacgaatgggaccccttagaggaagtgatagtgggcagagcagaaaacgcctgtgttccaccgttcaccatcgaggtgaaggccaacacatatgaaaagtactggccattttaccagaagcaaggagggcattattttcccaaagatcatttgaaaaaggctgttgctgaaattgaagaaatgtgcaatattttaaaaacggaaggagtgacagtaaggaggcctgaccccattgactggtcattgaagtataaaactcctgattttgagtctacgggtttatacagtgcaatgcctcgagacatcctgatagttgtgggcaatgagattatcgaggctcccatggcatggcgttcacgcttctttgagtaccgagcgtacaggtcaattatcaaagactacttccaccgtggcgccaagtggacaacagctcctaagcccacaatggctgatgagctttataaccaggattatcccatccactctgtagaagacagacacaaattggctgctcagggaaaatttgtgacaactgagtttgagccatgctttgatgctgctgacttcattcgagctggaagagatatttttgcacagagaagccaggttacaaactacctaggcattgaatggatgcgtaggcatcttgctccagactacagagtgcatatcatctcctttaaagatcccaatcccatgcatattgatgctaccttcaacatcattggacctggtattgtgctttccaaccctgaccgaccatgtcaccagattgatcttttcaagaaagcaggatggactatcattactcctccaacaccaatcatcccagacgatcatccactctggatgtcatccaaatggctttccatgaatgtcttaatgctagatgaaaaacgtgttatggtggatgccaatgaagttccaattcaaaagatgtttgaaaagctgggtatcactaccattaaagttaacattcgtaatgccaattccctgggaggaggcttccattgctggacctgcgatgtccggcgccgaggcaccttacagtcctacttggactgaacaggcctgatggagcttgtggctggcctcagatacacctaagaagcttaggggcaaggttcattctcctgctttaaaaagtgcatgaactgtagtgctttaaacaatcatctccttaacaggggtcgtaagcctggtttgcttctattacttttctttgacataaagaaaataacttctgctaggtattactctctactcctaaagttatttactatttggcttcaagtataaaattttggtgaatgtgtaccaagaaaaaattagtcacctgagtaacttggccactaataattaaccatctacctctgtttttaattttctttccaaaaggcagcttgaaatgttggtcctaatcttaattttttttcctcttctatagacttgagaatgtttttctctaaatgagagaaagacttagaatgtacacagatccaaaatagaatcagattatctctttttttctaaaggagagaaagacttagaacatacacagatcctaagtagaaccaggtaattgtctctttttctaataaggaatttgggtaatttttaattttttgttttttaaaaaataacctagactatgcaaaacatcaaagtgaattttccatgaatgtttttaatattctcatctcaacattgtgatatatgctactaaaaaccttttcatatacatcttacctcatttcaagtgaattattttaatctttttctctctttccaaaaatttaggaatgtttagtgtaattggatttcgctatcagttcccatccttaagttttgatattcaatatctgatagatacactgcatctttggtcatctaagatttgtttacaaatgtgcaaattatttagagcatagactttataagcattaaaaaaaactaatggaggtaaaacctaaatgcgatgtgaaataattttagtgttgataccgtatgtgtatttttattctaataaacttttgtgttccagattgaa

SEQ ID NO: 12534 - DNA, 1522 bp, Homo sapiens
  source 1..1522: mol_type = unassigned DNA
cccaccccgctccgggcgcgctctcgggaaggcttggaccgacgcggcccagaggccaggaacattccgcgcgtggaccagccgggccagggcgatgctgcgggtgcggtgtctgcgcggcgggagccgcggcgccgaggcggtgcactacatcggatctcggcttggacgaaccttgacaggatgggtgcagcgaactttccagagcacccaggcagctacggcttcctcccggaactcctgtgcagctgacgacaaagccactgagcctctgcccaaggactgccctgtctcttcttacaacgaatgggaccccttagaggaagtgatagtgggcagagcagaaaacgcctgtgttccaccgttcaccatcgaggtgaaggccaacacatatgaaaagtactggccattttaccagaagcaaggagggcattattttcccaaagatcatttgaaaaaggctgttgctgaaattgaagaaatgtgcaatattttaaaaacggaaggagtgacagtaaggaggcctgaccccattgactggtcattgaagtataaaactcctgattttgagtctacgggtttatacagtgcaatgcctcgagacatcctgatagttgtgggcaatgagattatcgaggctcccatggcatggcgttcacgcttctttgagtaccgagcgtacaggtcaattatcaaagactacttccaccgtggcgccaagtggacaacagctcctaagcccacaatggctgatgagctttataaccaggattatcccatccactctgtagaagacagacacaaattggctgctcagggaaaatttgtgacaactgagtttgagccatgctttgatgctgctgacttcattcgagctggaagagatatttttgcacagagaagccaggttacaaactacctaggcattgaatggatgcgtaggcatcttgctccagactacagagtgcatatcatctcctttaaagatcccaatcccatgcatattgatgctaccttcaacatcattggacctggtattgtgctttccaaccctgaccgaccatgtcaccagattgatcttttcaagaaagcaggatggactatcattactcctccaacaccaatcatcccagacgatcatccactctggatgtcatccaaatggctttccatgaatgtcttaatgctagatgaaaaacgtgttatggtggatgccaatgaagttccaattcaaaagatgtttgaaaagctgggtatgtacaacaaatgaaacatgttgtcatacatgaaaacgttaaatgagaagaactaaagaaatgacatgctaggtttgataaatggtttgtctaattcaattttgattccttttagaggcaccaagttattatttcacagaaagtcagtatttttattttcaacacacgtagccccaacaagttggagatgcatcctgagctcctgagacatccccttaacaataagtttataaatcttatatgacttagccaacgttttggtgccc

SEQ ID NO: 12535 - DNA, 1495 bp, Homo sapiens
  source 1..1495: mol_type = unassigned DNA
gtccgcgatgcgcacggctcccaggcaggcaggcgcgctcgggcgaggtaggagcgatgtggcctgggaacgcctggcgcgccgcactcttctgggtgccccgcggccgccgcgcacagtcagcgctggcccagctgcgtggcattctggagggggagctggaaggcatccgcggagctggcacttggaagagtgagcgggtcatcacgtcccgtcaggggccgcacatccgcgtggacggcgtctccggaggaatccttaacttctgtgccaacaactacctgggcctgagcagccaccctgaggtgatccaggcaggtctgcaggctctggaggagtttggagctggcctcagctctgtccgctttatctgtggaacccagagcatccacaagaatctagaagcaaaaatagcccgcttccaccagcgggaggatgccatcctctatcccagctgttatgacgccaacgccggcctctttgaggccctgctgaccccagaggacgcagtcctgtcggacgagctgaaccatgcctccatcatcgacggcatccggctgtgcaaggcccacaagtaccgctatcgccacctggacatggccgacctagaagccaagctgcaggaggcccagaagcatcggctgcgcctggtggccactgatggggccttttccatggatggcgacatcgcacccctgcaggagatctgctgcctcgcctctagatatggtgccctggtcttcatggatgaatgccatgccactggcttcctggggcccacaggacggggcacagatgagctgctgggtgtgatggaccaggtcaccatcatcaactccaccctggggaaggccctgggtggagcatcagggggctacacgacagggcctgggcccctggtgtccctgctgcggcagcgcgcccggccatacctcttctccaacagtctgccacctgctgtcgttggctgcgcctccaaggccctagatctgctgatggggagtaacaccattgtccagtctatggctgccaagacccagaggttccgtagtaagatggaagctgctggcttcactatctcgggagccagtcaccccatctgccctgtgatgctgggtgatgcccggctggcctctcgcatggcggatgacatgctgaagagaggcatctttgtcatcgggttcagctaccccgtggtccccaagggcaaggcccggatccgggtacagatctcagcagtgcatagcgaggaagacattgaccgctgcgtggaggccttcgtggaagtggggcgactgcacggggcactgccctgagctctgggtaaggacgagaagagccaaggtccgcctactgccacagggtcaaaggaggttttcgatcagcccagaccagaggctctgagccctgaaccaaagtcccagagctgggctgggacgtgacctgtgctgagggctgtgagaatgtgaaacaacagtgtgaaaattggctgtga

SEQ ID NO: 12536 - DNA, 1656 bp, Homo sapiens
  source 1..1656: mol_type = unassigned DNA
aggctgcgtccgcgatgcgcacggctcccaggcaggcaggcgcgctcgggcgaggtaggagcgatgtggcctgggaacgcctggcgcgccgcactcttctgggtgccccgcggccgccgcgcacagtcagcgctggcccagctgcgtggcattctggagggggagctggaaggcatccgcggagctggcacttggaagagtgagcgggtcatcacgtcccgtcaggggccgcacatccgcgtggacggcgtctccggagggcctggcactgtcatctttccaggcctgcccttgccccacctgagctgctgtatccatctcctctccttcacctcaggaatccttaacttctgtgccaacaactacctgggcctgagcagccaccctgaggtgatccaggcaggtctgcaggctctggaggagtttggagctggcctcagctctgtccgctttatctgtggaacccagagcatccacaagaatctagaagcaaaaatagcccgcttccaccagcgggaggatgccatcctctatcccagctgttatgacgccaacgccggcctctttgaggccctgctgaccccagaggacgcagtcctgtcggacgagctgaaccatgcctccatcatcgacggcatccggctgtgcaaggcccacaagtaccgctatcgccacctggacatggccgacctagaagccaagctgcaggaggcccagaagcatcggctgcgcctggtggccactgatggggccttttccatggatggcgacatcgcacccctgcaggagatctgctgcctcgcctctagatatggtgccctggtcttcatggatgaatgccatgccactggcttcctggggcccacaggacggggcacagatgagctgctgggtgtgatggaccaggtcaccatcatcaactccaccctggggaaggccctgggtggagcatcagggggctacacgacagggcctgggcccctggtgtccctgctgcggcagcgcgcccggccatacctcttctccaacagtctgccacctgctgtcgttggctgcgcctccaaggccctagatctgctgatggggagtaacaccattgtccagtctatggctgccaagacccagaggttccgtagtaagatggaagctgctggcttcactatctcgggagccagtcaccccatctgccctgtgatgctgggtgatgcccggctggcctctcgcatggcggatgacatgctgaagagaggcatctttgtcatcgggttcagctaccccgtggtccccaagggcaaggcccggatccgggtacagatctcagcagtgcatagcgaggaagacattgaccgctgcgtggaggccttcgtggaagtggggcgactgcacggggcactgccctgagctctgggcccagtcctgtggccggttgaagaatcaggcaggagccagggctctgaggggaggcgcctgaggactgcagatctccactgacctctttccctagattaagatgggacccagtggccgggcacggtggctcaggcctgtaatcccagcactttgggaggccaaggtaggcggatcacctgaggtcgggagtttgagaccagcctgaccaacatggagaaaccccgtctctactaaaaatacgaaatt

SEQ ID NO: 12537 - DNA, 1517 bp, Homo sapiens
  source 1..1517: mol_type = unassigned DNA
gcgatgtggcctgggaacgcctggcgcgccgcactcttctgggtgccccgcggccgccgcgcacagtcagcgctggcccagctgcgtggcattctggagggggagctggaaggcatccgcggagctggcacttggaagagtgagcgggtcatcacgtcccgtcaggggccgcacatccgcgtggacggcgtctccggagggcctggcactgtcatctttccaggcctgcccttgccccacctgagctgctgtatccatctcctctccttcacctcaggaatccttaacttctgtgccaacaactacctgggcctgagcagccaccctgaggtgatccaggcaggtctgcaggctctggaggagtttggagctggcctcagctctgtccgctttatctgtggaacccagagcatccacaagaatctagaagcaaaaatagcccgcttccaccagcgggaggatgccatcctctatcccagctgttatgacgccaacgccggcctctttgaggccctgctgaccccagaggacgcagtcctgtcggacgagctgaaccatgcctccatcatcgacggcatccggctgtgcaaggcccacaagtaccgctatcgccacctggacatggccgacctagaagccaagctgcaggaggcccagaagcatcggctgcgcctggtggccactgatggggcctttcatggatggcgacatcgcacccctgcaggagatctgctgcctcgcctctagatatggtgccctggtcttcatggatgaatgccatgccactggcttcctggggcccacaggacggggcacagatgagctgctgggtgtgatggaccaggtcaccatcatcaactccaccctggggaaggccctgggtggagcatcagggggctacacgacagggcctgggcccctggtgtccctgctgcggcagcgcgcccggccatacctcttctccaacagtctgccacctgctgtcgttggctgcgcctccaaggccctagatctgctgatggggagtaacaccattgtccagtctatggctgccaagacccagaggttccgtagtaagatggaagctgctggcttcactatctcgggagccagtcaccccatctgccctgtgatgctgggtgatgcccggctggcctctcgcatggcggatgacatgctgaagagaggcatctttgtcatcgggttcagctaccccgtggtccccaagggcaaggcccggatccgggtacagatctcagcagtgcatagcgaggaagacattgaccgctgcgtggaggccttcgtggaagtggggcgactgcacggggcactgccctgagctctgggtaaggacgagaagagccaaggtccgcctactgccacagggtcaaaggaggttttcgatcagcccagaccagaggctctgagccctgaaccaaagtcccagagctgggctgggacgtgacctgtgctgagggctgtgagaatgtgaaacaacagtgtgaaaattggctgtg

SEQ ID NO: 12538 - DNA, 1552 bp, Homo sapiens
  source 1..1552: mol_type = unassigned DNA
cccgcggcaccgcctccgcgcctccatccagccggctccctccggccgcgaactgcccctccccgccccgcctcccggcgcgggtggccgaggcgtagcgctgcgacccccgcacccctgcgaacatggcgctgcgagtggtgcggagcgtgcgggccctgctctgcaccctgcgcgcggtcccgtcacccgccgcgccctgcccgccgaggccctggcagctgggggtgggcgccgtccgtacgctgcgcactggacccgctctgctctcggtgcgtaaattcacagagaaacacgaatgggtaacaacagaaaatggcattggaacagtgggaatcagcaattttgcacaggaagcgttgggagatgttgtttattgtagtctccctgaagttgggacaaaattgaacaaacaagatgagtttggtgctttggaaagtgtgaaagctgctagtgaactctattctcctttatcaggagaagtaactgaaattaatgaagctcttgcagaaaatccaggacttgtaaacaaatcttgttatgaagatggttggctgatcaagatgacactgagtaacccttcagaactagatgaacttatgagtgaagaagcatatgagaaatacataaaatctattgaggagtgaaaatggaactcctaaataaactagtatgaaataacgcaagccagcagagttgtcttaaattagtggtggatagaagacttagaatagaaacttttagtattaccgatggggaaaaaaaaactactgttaacactgctaatgaaagaaaatgccctttaactttctaatgattatagataaatataatatgcgtctttttcacaatatcctatgatttttagactaggctctagtgttcagaattcatgaaattatccatggtaaaaactagttataaaaattacataattcaaagataacattgttattcttaagccttatataatattgtaacttgcatgtatccatacctggatttgggatgaaatacttaatgatctttccattggaaataactggaagtgaagaggttttgttgcttgtacagtgtcagatgaggaacaccactatcttaattttgcgatacactgcatttgctggtgctatttttatacagtgaagcaacagctttgcagcaaaataataaaatacttcttcgttaatcatgtttgttttgatgttaatatttcatttagtaactctgctagtatttgtgaaagtgctaactttaacttacggaaagttactttttaaaaggaaatttaagccagaacaatgcaaagctccaagaaaatgttttctttagtcacaaatctggtttttcttaagccaagatctgtcacctttaacataataaaaaataaatcaccaactttgattttctatcatgcgaggtctgaagaaagaagaggaaagacagaggaaggtggaagttttgatcagtatagcacatggtgtttttaagttgttaaaccacgttcaggtttccacttaagtcatgggaataaaagtggacaaggactgaa

SEQ ID NO: 12539 - DNA, 3767 bp, Homo sapiens
  source 1..3767: mol_type = unassigned DNA
cccgcgagcgtccatccatctgtccggccgactgtccagcgaaaggggctccaggccgggcgcagccgccacccgggggaccgaggccaggagaggggccaagagcgcggctgacccttgcgggccggggcaggggacggtggccgcggccatgcagtcctgtgccagggcgtgggggctgcgcctgggccgcggggtcgggggcggccgccgcctggctgggggatcggggccgtgctgggcgccgcggagccgggacagcagcagtggcggcggggacagcgccgcggctggggcctcgcgcctcctggagcgccttctgcccagacacgacgacttcgctcggaggcacatcggccctggggacaaagaccagagagagatgctgcagaccttggggctggcgagcattgatgaattgatcgagaagacggtccctgccaacatccgtttgaaaagacccttgaaaatggaagaccctgtttgtgaaaatgaaatccttgcaactctgcatgccatttcaagcaaaaaccagatctggagatcgtatattggcatgggctattataactgctcagtgccacagacgattttgcggaacttactggagaactcaggatggatcacccagtatactccataccagcctgaggtgtctcaggggaggctggagagtttactcaactaccagaccatggtgtgtgacatcacaggcctggacatggccaatgcatccctgctggatgaggggactgcagccgcagaggcactgcagctgtgctacagacacaacaagaggaggaaatttctcgttgatccccgttgccacccacagacaatagctgttgtccagactcgagccaaatatactggagtcctcactgagctgaagttaccctgtgaaatggacttcagtggaaaagatgtcagtggagtgttgttccagtacccagacacggaggggaaggtggaagactttacggaactcgtggagagagctcatcagagtgggagcctggcctgctgtgctactgaccttttagctttgtgcatcttgaggccacctggagaatttggggtagacatcgccctgggcagctcccagagatttggagtgccactgggctatgggggaccccatgcagcattttttgctgtccgagaaagcttggtgagaatgatgcctggaagaatggtgggggtaacaagagatgccactgggaaagaagtgtatcgtcttgctcttcaaaccagggagcaacacattcggagagacaaggctaccagcaacatctgtacagctcaggccctcttggcgaatatggctgccatgtttgcaatctaccatggttcccatgggctggagcatattgctaggagggtacataatgccactttgattttgtcagaaggtctcaagcgagcagggcatcaactccagcatgacctgttctttgataccttgaagattcagtgtggctgctcagtgaaggaggtcttgggcagggccgctcagcggcagatcaattttcggctttttgaggatggcacacttggtatttctcttgatgaaacagtcaatgaaaaagatctggacgatttgttgtggatctttggttgtgagtcatctgcagaactggttgctgaaagcatgggagaggagtgcagaggtattccagggtctgtgttcaagaggaccagcccgttcctcacccatcaagtgttcaacagctaccactctgaaacaaacattgtccggtacatgaagaaactggaaaataaagacatttcccttgttcacagcatgattccactgggatcctgcaccatgaaactgaacagttcgtctgaactcgcacctatcacatggaaagaatttgcaaacatccacccctttgtgcctctggatcaagctcaaggatatcagcagcttttccgagagcttgagaaggatttgtgtgaactcacaggttatgaccaggtctgtttccagccaaacagcggagcccagggagaatatgctggactggccactatccgagcctacttaaaccagaaaggagaggggcacagaacggtttgcctcattccgaaatcagcacatgggaccaacccagcaagtgcccacatggcaggcatgaagattcagcctgtggaggtggataaatatgggaatatcgatgcagttcacctcaaggccatggtggataagcacaaggagaacctagcagctatcatgattacatacccatccaccaatggggtgtttgaagagaacatcagtgacgtgtgtgacctcatccatcaacatggaggacaggtctacctagacggggcaaatatgaatgctcaggtgggaatctgtcgccctggagacttcgggtctgatgtctcgcacctaaatcttcacaagaccttctgcattccccacggaggaggtggtcctggcatggggcccatcggagtgaagaaacatctcgccccgtttttgcccaatcatcccgtcatttcactaaagcggaatgaggatgcctgtcctgtgggaaccgtcagtgcggccccatggggctccagttccatcttgcccatttcctgggcttatatcaagatgatgggaggcaagggtcttaaacaagccacggaaactgcgatattaaatgccaactacatggccaagcgattagaaacacactacagaattcttttcaggggtgcaagaggttatgtgggtcatgaatttattttggacacgagacccttcaaaaagtctgcaaatattgaggctgtggatgtggccaagagactccaggattatggatttcacgcccctaccatgtcctggcctgtggcagggaccctcatggtggagcccactgagtcggaggacaaggcagagctggacagattctgtgatgccatgatcagcattcggcaggaaattgctgacattgaggagggccgcatcgaccccagggtcaatccgctgaagatgtctccacactccctgacctgcgttacatcttcccactgggaccggccttattccagagaggtggcagcattcccactccccttcgtgaaaccagagaacaaattctggccaacgattgcccggattgatgacatatatggagatcagcacctggtttgtacctgcccacccatggaagtttatgagtctccattttctgaacaaaagagggcgtcttcttagtcctctgtccctaagtttaaaggactgatttgatgcctctccccagagcatttgataagcaagaaagatttcatctcccaccccagcctcaagtaggagttttatatactgtgtatatctctgtaatctctgtcaaggtaaatgtaaatacagtagctggagggagtcgaagctgatggttggaagacggatttgctttggtattctgcttccacatgtgccagttgcctggattgggagccattttgtgttttgcgtagaaagttttaggaactttaacttttaatgtggcaagtttgcagatgtcatagaggctatcctggagacttaatagacatttttttgttccaaaagagtccatgtggactgtgccatctgtgggaaatcccagggcaaatgtttacattttgtataccctgaagaactctttttcctctaatatgcctaatctgtaatcacatttctgagtgttctcctctttttctgtgtgaggtttttttttttttaatctgcatttattagtattctaataaaagcatcttgatcggaagaa

SEQ ID NO: 12540 - DNA, 1072 bp, Homo sapiens
  source 1..1072: mol_type = unassigned DNA
gcggcgcaggatggtggacagcgtgtaccggacccgctccctgggggtggcggccgaagggctcccggaccagtacgcggacggggaggcggcgcgcgtgtggcagctgtatatcggagacacccgcagccgcaccgccgagtacaaggcatggctgcttgggctgctgcgccagcacggctgccagcgggtgctcgacgtagcctgtggcactggggtggactccattatgctggtggaagagggcttcagtgtgacgagtgtggatgccagtgacaagatgctgaagtatgcacttaaggagcgctggaaccggcggcacgagcccgccttcgacaagtgggtcatcgaagaagccaactggatgactctggacaaagatgtgccccagtcagcagagggtggctttgatgctgtcatctgccttggaaacagtttcgctcacttgccagactgcaaaggggaccagagtgagcaccggctggcgctgaaaaacattgcgagcatggtgcgggcagggggcctactggtcattgatcatcgcaactacgaccacatcctcagtacaggctgtgcacccccagggaagaacatctactataagagtgacttgaccaaggacgtcacaacatcagtgctgatagtgaacaacaaggcccacatggtgaccctggactatacggtgcaggtgccgggggctggccaggatggctctcctggcttgagtaagttccggctctcctactacccacactgtctggcatccttcacggagctgctccaagcagccttcggaggtaagtgccagcacagcgtcctgggcgacttcaagccttacaagccaggccaaacctacattccctgctacttcatccacgtgctcaagaggacagactgagtgtggcctcagctcccacaagcctctgcccaggcactgctaggctctgtctggaagatggggaccagcagccccacaccagggccagcctctagagcagactacagctggggtgcagggatgtgggttccacagacggaagggtaaacaatatagtctttttcagttcctgca

SEQ ID NO: 12541 - DNA, 1803 bp, Homo sapiens
  source 1..1803: mol_type = unassigned DNA
gggagccaacagacacgctggagtttaacaaacagcaatactcttcgcgctcctgaaaagcaggtctggacgctctccgtggtgctgaaacgcctcgcagccgccgctgtccgtggtatctacgaccccctcgctccaatttcccctggggctctccctccgcgcccctgttccccgcctccctttaacatctggattattttttgcaatagcgctttctggttttgtaagtgccaatttgaaacatttttgcccccataactcgtggactacaaagcacaaggacctgaaaaatgtacagcttcaatactcttcgactctacctttgggagaccattgtattcttcagccttgctgcttctaaggaggctgaagctgctcgctccgcacccaagcctatgtcaccctcggatttcctggataagctaatggggagaacctccggatatgatgccaggatcaggcccaattttaaaggtcccccagtgaacgtgagctgcaacattttcatcaacagctttggttccattgctgagacaaccatggactatagggtcaacatcttcctgcggcagcaatggaacgacccccgcctggcctataatgaataccctgacgactctctggacctggacccatccatgctggactccatctggaaacctgacctgttctttgccaacgagaagggggcccacttccatgagatcaccacagacaacaaattgctaaggatctcccggaatgggaatgtcctctacagcatcagaatcaccctgacactggcctgccccatggacttgaagaatttccccatggatgtccagacatgtatcatgcaactggaaagctttggatatacgatgaatgacctcatctttgagtggcaggaacagggagccgtgcaggtagcagatggactaactctgccccagtttatcttgaaggaagagaaggacttgagatactgcaccaagcactacaacacaggtaaattcacctgcattgaggcccggttccacctggagcggcagatgggttactacctgattcagatgtatattcccagcctgctcattgtcatcctctcatggatctccttctggatcaacatggatgctgcacctgctcgtgtgggcctaggcatcaccactgtgctcaccatgaccacccagagctccggctctcgagcatctctgcccaaggtgtcctatgtgaaagccattgacatttggatggcagtttgcctgctctttgtgttctcagccctattagaatatgctgccgttaactttgtgtctcggcaacataaggagctgctccgattcaggaggaagcggagacatcacaaggaggatgaagctggagaaggccgctttaacttctctgcctatgggatgggcccagcctgtctacaggccaaggatggcatctcagtcaagggcgccaacaacagtaacaccaccaacccccctcctgcaccatctaagtccccagaggagatgcgaaaactcttcatccagagggccaagaagatcgacaaaatatcccgcattggcttccccatggccttcctcattttcaacatgttctactggatcatctacaagattgtccgtagagaggacgtccacaaccagtgaagggtctgaaaggttgggggaggctgggagaggggaacgtgggaatagcacaggaatctgagagactaaggaagagaaggggaacggagggagggggcacacttacacaactctctctgcaatatgtgcaatagcaaaatgcagtgatgcatgaatttta

SEQ ID NO: 12542 - DNA, 1707 bp, Homo sapiens
  source 1..1707: mol_type = unassigned DNA
caacagacacgctggagtttaacaaacagcaatactcttcgcgctcctgaaaagcaggtctggacgctctccgtggtgctgaaacgcctcgcagccgccgctgtccgtggtatctacgaccccctcgctccaatttcccctggggctctccctccgcgcccctgttccccgcctccctttaacatctggattattttttgcaatagcgctttctggttttgtaagtgccaatttgaaacatttttgcccccataactcgtggactacaaagcacaaggacctgaaaaatgtacagcttcaatactcttcgactctacctttgggagaccattgtattcttcagccttgctgcttctaaggaggctgaagctgctcgctccgcacccaagcctatgtcaccctcggatttcctggataagctaatggggagaacctccggatatgatgccaggatcaggcccaattttaaaggtcccccagtgaacgtgagctgcaacattttcatcaacagctttggttccattgctgagacaaccatggactatagggtcaacatcttcctgcggcagcaatggaacgacccccgcctggcctataatgaataccctgacgactctctggacctggacccatccatgctggactccatctggaaacctgacctgttctttgccaacgagaagggggcccacttccatgagatcaccacagacaacaaattgctaaggatctcccggaatgggaatgtcctctacagcatcagaatcaccctgacactggcctgccccatggacttgaagaatttccccatggatgtccagacatgtatcatgcaactggaaagctttggatatacgatgaatgacctcatctttgagtggcaggaacagggagccgtgcaggtagcagatggactaactctgccccagtttatcttgaaggaagagaaggacttgagatactgcaccaagcactacaacacaggtaaattcacctgcattgaggcccggttccacctggagcggcagatgggttactacctgattcagatgtatattcccagcctgctcattgtcatcctctcatggatctccttctggatcaacatggatgctgcacctgctcgtgtgggcctaggcatcaccactgtgctcaccatgaccacccagagctccggctctcgagcatctctgcccaaggtgtcctatgtgaaagccattgacatttggatggcagtttgcctgctctttgtgttctcagccctattagaatatgctgccgttaactttgtgtctcggcaacataaggagctgctccgattcaggaggaagcggagacatcacaagagccccatgttgaatctattccaggaggatgaagctggagaaggccgctttaacttctctgcctatgggatgggcccagcctgtctacaggccaaggatggcatctcagtcaagggcgccaacaacagtaacaccaccaacccccctcctgcaccatctaagtccccagaggagatgcgaaaactcttcatccagagggccaagaagatcgacaaaatatcccgcattggcttccccatggccttcctcattttcaacatgttctactggatcatctacaagattgtccgtagagaggacgtccacaaccagtgaagggtctgaaaggttgggggaggctgggagaggggaacgtgggaat

SEQ ID NO: 12543 - DNA, 1555 bp, Homo sapiens
  source 1..1555: mol_type = unassigned DNA
caacagacacgctggagtttaacaaacagcaatactcttcgcgctcctgaaaagcaggtctggacgctctccgtggtgctgaaacgcctcgcagccgccgctgtccgtggtatctacgaccccctcgctccaatttcccctggggctctccctccgcgcccctgttccccgcctccctttaacatctggattattttttgcaatagcgctttctggttttgtaagtgccaatttgaaacatttttgcccccataactcgtggactacaaagcacaaggacctgaaaaatgtacagcttcaatactcttcgactctacctttgggagaccattgtattcttcaggtcccccagtgaacgtgagctgcaacattttcatcaacagctttggttccattgctgagacaaccatggactatagggtcaacatcttcctgcggcagcaatggaacgacccccgcctggcctataatgaataccctgacgactctctggacctggacccatccatgctggactccatctggaaacctgacctgttctttgccaacgagaagggggcccacttccatgagatcaccacagacaacaaattgctaaggatctcccggaatgggaatgtcctctacagcatcagaatcaccctgacactggcctgccccatggacttgaagaatttccccatggatgtccagacatgtatcatgcaactggaaagctttggatatacgatgaatgacctcatctttgagtggcaggaacagggagccgtgcaggtagcagatggactaactctgccccagtttatcttgaaggaagagaaggacttgagatactgcaccaagcactacaacacaggtaaattcacctgcattgaggcccggttccacctggagcggcagatgggttactacctgattcagatgtatattcccagcctgctcattgtcatcctctcatggatctccttctggatcaacatggatgctgcacctgctcgtgtgggcctaggcatcaccactgtgctcaccatgaccacccagagctccggctctcgagcatctctgcccaaggtgtcctatgtgaaagccattgacatttggatggcagtttgcctgctctttgtgttctcagccctattagaatatgctgccgttaactttgtgtctcggcaacataaggagctgctccgattcaggaggaagcggagacatcacaaggaggatgaagctggagaaggccgctttaacttctctgcctatgggatgggcccagcctgtctacaggccaaggatggcatctcagtcaagggcgccaacaacagtaacaccaccaacccccctcctgcaccatctaagtccccagaggagatgcgaaaactcttcatccagagggccaagaagatcgacaaaatatcccgcattggcttccccatggccttcctcattttcaacatgttctactggatcatctacaagattgtccgtagagaggacgtccacaaccagtgaagggtctgaaaggttgggggaggctgggagaggggaacgtgggaat

SEQ ID NO: 12544 - DNA, 3216 bp, Homo sapiens
  source 1..3216: mol_type = unassigned DNA
acgtctccgtctcattctatagccctcattccagcacaggatctcagcaatttttccctcttccccccacccactccagcgcgcagagtcctttcttctctctcatttacaacttctttttaaaagaaaacattttctagaaaaagggctttgctaaacagaaaagatataaaacaaaagccacagctatctagcatggcattgtcaccaactccctttgcatggtgatgcgattaaggtagcagcatttttattattcaggaaaagcagctgggggattcatcagttctgaggctttgtctttctgggttaactgatggtcccaagcctcggtttgacctgaccatgatgcccaggactggcactttttcttttttctcagcaaactgtacaaaaccaaatctctttttgattttcaaggaaactaggttcctgccaaattttgaatctggacaataaacagacactttgtcctagcatctttctggaatcatttcgggatattttccacaagcaacacagaaacaggaatgaaccggcagctagtgaacattttgacagccttgtttgcatttttcttagagacaaaccacttcaggacggctttctgcaaagaccatgactccaggtctggaaaacaaccttcacagaccctatctccttcagatttcttggacaagttaatgggaaggacatcaggatatgatgcaagaatcaggccaaattttaaaggtcctccagtaaacgttacttgcaatatttttatcaacagttttggatcagtcacagaaacgaccatggactaccgagtgaatatttttctgagacaacagtggaatgattcacggctggcgtacagtgagtacccagatgactccctggacttggacccatccatgctagactccatttggaaaccagatttgttctttgccaatgagaagggtgccaacttccacgatgtcaccactgacaacaaattgctacggatttcgaaaaatggcaaagtgctctacagtatcagactcaccttgaccttatcctgtcccatggacttgaagaactttccgatggatgtccagacctgtacaatgcagctggagagttttgggtacacgatgaatgacctgatatttgagtggttaagtgatggtccagtgcaagttgctgaaggattgaccctgccccagtttattttgaaagaagagaaggaacttggctactgtacaaagcactacaacactggaaagtttacctgcattgaggtcaagtttcatctggaacgccaaatgggatattatttgatccagatgtacatcccaagcctgcttatagtaattttgtcctgggtttccttttggataaatatggatgcagcccctgccagggtcgcactgggcatcaccacagtcttaacgatgaccacccagagttcaggctccagggcatctctgccaaaggtctcctatgtaaaagcgattgacatctggatggcggtgtgccttctgtttgtgtttgctgccttactggaatacgcagcggtgaacttcgtctccaggcaacacaaggagttcctgcgcctccgaagaagacagaagaggcagaataaggaagaagacgttactcgtgaaagtcgttttaattttagcggttatgggatgggtcactgcctccaagtgaaagatggaacagctgtcaaggccacacctgccaacccactcccacaaccgccaaaagatggagatgctatcaagaagaagtttgtggaccgggcaaaaaggattgacacgatatctcgagctgccttcccattggccttcctcattttcaacatcttttactggatcacatacaagatcattcggcatgaagatgtccacaagaaatagatgtgccctacagaccctgggaccttcttgcctcagtgttgtgcttgtaaatacacagtgaaattgtctttatatcactttgacagaggagaagattgagggaggggggagggagggtcatgggggtgggtttcctggcacctacatgaaaaaaaagacaagttatatgggtgatgaagaaaactgcacaaaattaaggggttgcagaatcacgggagcataataattcccttccataatctttagcattgttctttcagtcagacatgatatgcgcaacattcagacatgatatgcgcatcattcagacatgatatgcggggtcaagttcttaagggctgtttgccttttggtccttttggtttggtttggctttgactaattctggtactgaaaagttagctatacacacacacacacacacacacacacacacacacacacacacacacacacacacacacaaacttcaaaaatgcttaaccatctgaccatagtgactagcctatagtgagtcgaggaccaaactttttcaggaaaatgctgcctcgtttttaaaacaagcctcctaagctatgttctttacaatgtctgtaattagtgtttcacttgagaaagccttttgtgggtcgtaaattatttctacttatccagtaaataacaatgacaaaataaacaccaatgacagaaaaatttctactttactgtccatataggtgtgcattttaatatttttctttccaagataaaattttgaaacttaaattgtgtattgtgtaattaatttgatagtgtaccctcttaataaatgcccactttattttatatccaagttagtgcattatatatatatttttgctttggctatatttacacgtgactttaatcgcccaactgtgactagtcattgcagctactcagctacagtatttatggagatggtgtgtcctgaacagtgtagctcaggtcagcttgaactttccatttctgctctcattgtaggtgtaactactagtcctaatgtcaactgacccatgatttctactgtcagtcaatataagtgaacattgttttaaatatccttaactaacttaaagaattttaaaattgtactgtgattttcataacccgttgcctttttggtaccagagctacgtggtttgaattctggctacatgttttaagtaagaaaaaaaaagacgtatttttgcttactcagataaaagacaacctgtaaaaatataataattaaattttacatgtgctgtacaaggggttattttaaaaagcatttgttcaatttcaataaagctaagtgtgccgcaaa

SEQ ID NO: 12545 - DNA, 1730 bp, Homo sapiens
  source 1..1730: mol_type = unassigned DNA
gcatttttattattcaggaaaagcagctgggggattcatcagttctgaggctttgtctttctgggttaactgatggtcccaagcctcggtttgacctgaccatgatgcccaggactggcactttttcttttttctcagcaaactgtacaaaaccaaatctctttttgattttcaaggaaactaggttcctgccaaattttgaatctggacaataaacagacactttgtcctagcatctttctggaatcatttcgggatattttccacaagcaacacagaaacaggaatgaaccggcagctagtgaacattttgacagccttgtttgcatttttcttagagacaaaccacttcaggacggctttctgcaaagaccatgactccaggtctggaaaacaaccttcacagaccctatctccttcagatttcttggacaagttaatgggaaggacatcaggatatgatgcaagaatcaggccaaattttaaagggcctcctgtaaatgttacctgcaacatatttatcaacagctttgggtcaatagcagaaactacaatggactaccgagtgaatatttttctgagacaacagtggaatgattcacggctggcgtacagtgagtacccagatgactccctggacttggacccatccatgctagactccatttggaaaccagatttgttctttgccaatgagaagggtgccaacttccacgatgtcaccactgacaacaaattgctacggatttcgaaaaatggcaaagtgctctacagtatcagactcaccttgaccttatcctgtcccatggacttgaagaactttccgatggatgtccagacctgtacaatgcagctggagagttttgggtacacgatgaatgacctgatatttgagtggttaagtgatggtccagtgcaagttgctgaaggattgaccctgccccagtttattttgaaagaagagaaggaacttggctactgtacaaagcactacaacactggaaagtttacctgcattgaggtcaagtttcatctggaacgccaaatgggatattatttgatccagatgtacatcccaagcctgcttatagtaattttgtcctgggtttccttttggataaatatggatgcagcccctgccagggtcgcactgggcatcaccacagtcttaacgatgaccacccagagttcaggctccagggcatctctgccaaaggtctcctatgtaaaagcgattgacatctggatggcggtgtgccttctgtttgtgtttgctgccttactggaatacgcagcggtgaacttcgtctccaggcaacacaaggagttcctgcgcctccgaagaagacagaagaggcagaataaggaagaagacgttactcgtgaaagtcgttttaattttagcggttatgggatgggtcactgcctccaagtgaaagatggaacagctgtcaaggccacacctgccaacccactcccacaaccgccaaaagatggagatgctatcaagaagaagtttgtggaccgggcaaaaaggattgacacgatatctcgagctgccttcccattggccttcctcattttcaacatcttttactggatcacatacaagatcattcggcatgaagatgtccacaagaaatagatgtgccctacagaccctgggaccttcttgcctcagtgttgtgcttgtaaatacacagtgaaattgtctttatatcactttgaca

SEQ ID NO: 12546 - DNA, 659 bp, Homo sapiens
  source 1..659: mol_type = unassigned DNA
cttgattaatcagatgaatctgcatatgagaatgacggctttctgcaaagaccatgactccaggtctggaaaacaaccttcacagaccctatctccttcagatttcttggacaagttaatgggaaggacatcaggatatgatgcaagaatcaggccaaattttaaaggtcctccagtaaacgttacttgcaatatttttatcaacagttttggatcagtcacagaaacgaccatggactaccgagtgaatatttttctgagacaacagtggaatgattcacggctggcgtacagtgagtacccagatgactccctggacttggacccatccatgctagactccatttggaaaccagatttgttctttgccaatgagaagggtgccaacttccacgatgtcaccactgacaacaaattgctacggatttcgaaaaatggcaaagtgctctacagtatcagactcaccttgaccttatcctgtcccatggacttgaagaactttccgatggatgtccagacctgtacaatgcagctggagagttttgggtacacgatgaatgacctgatatttgagtggttaagtgatggtccagtgcaagttgctgaaggattgaccctgccccagtttattttgaaagaagagaaggaacttggctact

SEQ ID NO: 12547 - DNA, 3182 bp, Homo sapiens
  source 1..3182: mol_type = unassigned DNA
acttccctcaccctctccgtctcccgacctctcttctcctcttgctgtcatcgtacccccttcagtatcccctcgctgaacggccagtcactctttgccttcgaacagcaggcacgtcccctcttgaatgcttttccccgacccccgccccaagcaactgaaaaaggaaacatgcgcacttcagagcttggagctgtccgagtgctgaaatttataggctgggaaactaggttcctgccaaattttgaatctggacaataaacagacactttgtcctagcatctttctggaatcatttcgggatattttccacaagcaacacagaaacaggaatgaaccggcagctagtgaacattttgacagccttgtttgcatttttcttagagacaaaccacttcagaaccaagataaatggaacacatagtaataatgctatgaatactgggaaaacccactatgttcctttcaggtttacacctcctactatgattaagaaaaaatataggctggtttttattagaatcatcatcatcatcatcatcctcaccaccaccaccatcataatcaaataatacttgattaatcagatgaatctgcatatgagaatgacggctttctgcaaagaccatgactccaggtctggaaaacaaccttcacagaccctatctccttcagatttcttggacaagttaatgggaaggacatcaggatatgatgcaagaatcaggccaaattttaaagttttggatcagtcacagaaacgaccatggactaccgagtgaatatttttctgagacaacagtggaatgattcacggctggcgtacagtgagtacccagatgactccctggacttggacccatccatgctagactccatttggaaaccagatttgttctttgccaatgagaagggtgccaacttccacgatgtcaccactgacaacaaattgctacggatttcgaaaaatggcaaagtgctctacagtatcagactcaccttgaccttatcctgtcccatggacttgaagaactttccgatggatgtccagacctgtacaatgcagctggagagttttgggtacacgatgaatgacctgatatttgagtggttaagtgatggtccagtgcaagttgctgaaggattgaccctgccccagtttattttgaaagaagagaaggaacttggctactgtacaaagcactacaacactggaaagtttacctgcattgaggtcaagtttcatctggaacgccaaatgggatattatttgatccagatgtacatcccaagcctgcttatagtaattttgtcctgggtttccttttggataaatatggatgcagcccctgccagggtcgcactgggcatcaccacagtcttaacgatgaccacccagagttcaggctccagggcatctctgccaaaggtctcctatgtaaaagcgattgacatctggatggcggtgtgccttctgtttgtgtttgctgccttactggaatacgcagcggtgaacttcgtctccaggcaacacaaggagttcctgcgcctccgaagaagacagaagaggcagaataaggaagaagacgttactcgtgaaagtcgttttaattttagcggttatgggatgggtcactgcctccaagtgaaagatggaacagctgtcaaggccacacctgccaacccactcccacaaccgccaaaagatggagatgctatcaagaagaagtttgtggaccgggcaaaaaggattgacacgatatctcgagctgccttcccattggccttcctcattttcaacatcttttactggatcacatacaagatcattcggcatgaagatgtccacaagaaatagatgtgccctacagaccctgggaccttcttgcctcagtgttgtgcttgtaaatacacagtgaaattgtctttatatcactttgacagaggagaagattgagggaggggggagggagggtcatgggggtgggtttcctggcacctacatgaaaaaaaagacaagttatatgggtgatgaagaaaactgcacaaaattaaggggttgcagaatcacgggagcataataattcccttccataatctttagcattgttctttcagtcagacatgatatgcgcaacattcagacatgatatgcgcatcattcagacatgatatgcggggtcaagttcttaagggctgtttgccttttggtccttttggtttggtttggctttgactaattctggtactgaaaagttagctatacacacacacacacacacacacacacacacacacacacacacacacacacacacacacaaacttcaaaaatgcttaaccatctgaccatagtgactagcctatagtgagtcgaggaccaaactttttcaggaaaatgctgcctcgtttttaaaacaagcctcctaagctatgttctttacaatgtctgtaattagtgtttcacttgagaaagccttttgtgggtcgtaaattatttctacttatccagtaaataacaatgacaaaataaacaccaatgacagaaaaatttctactttactgtccatataggtgtgcattttaatatttttctttccaagataaaattttgaaacttaaattgtgtattgtgtaattaatttgatagtgtaccctcttaataaatgcccactttattttatatccaagttagtgcattatatatatatttttgctttggctatatttacacgtgactttaatcgcccaactgtgactagtcattgcagctactcagctacagtatttatggagatggtgtgtcctgaacagtgtagctcaggtcagcttgaactttccatttctgctctcattgtaggtgtaactactagtcctaatgtcaactgacccatgatttctactgtcagtcaatataagtgaacattgttttaaatatccttaactaacttaaagaattttaaaattgtactgtgattttcataacccgttgcctttttggtaccagagctacgtggtttgaattctggctacatgttttaagtaagaaaaaaaaagacgtatttttgcttactcagataaaagacaacctgtaaaaatataataattaaattttacatgtgctgtacaaggggttattttaaaaagcatttgttcaatttcaataaagctaagtgtgccgc

SEQ ID NO: 12548 - DNA, 8770 bp, Homo sapiens
  source 1..8770: mol_type = unassigned DNA
gtcgacaggaccgggttgtccggccccacccccgcttccctttgccgcgctccgggtctcgggttttaacccaaggtggagagctggattccggcgggcggcgcttggagcaggtggagaggcgtcctctttccggctgttgctgctcttcttcctccaatcctgggtctcagtcagggaagaacgaacattcttcctttgctgctggagctttagagaactgttgcccagcacctaggcacttcagacatttcatctcactcatttttgtaatttcactgtaaaaatcacctgcacatttataacactgtgactctccacttctgctcaatgctgagaaggggtccgcatactgcggggagctgtctaaggtgctgaagcttcccaagcatcagtctacaccaacaccatgcggggttagattgtacattttcattctgtctttctggttccccatgccttggataagactattttcaggatcgtgaatatctctccgtatcatggcccacgtgagacactttcggacattagtttcgggattttacttctgggaagcagcactgttactcagtttggttgccacaaaggaaacagacagtgcaagatctcgaagtgctccaatgtcaccttctgattttctggataaattaatgggcaggacatcaggatatgatgcaagaatcagacccaattttaaaggccctccagttaatgtcacatgcaacatattcatcaacagctttggctctatcgcagagacgaccatggattacagagtgaatatctttcttcgtcagaaatggaatgatccccgcctcgcgtacagtgaatatcctgacgactctttagacctcgacccctccatgttggactccatttggaaacctgatttgttctttgccaatgaaaagggtgccaactttcatgaagtcactacagacaacaaattgctaagaattttcaaaaatggaaatgttctttattcaataagattaacattaacactttcctgtccaatggatctcaagaattttcccatggatgtacaaacatgtataatgcaactggaaagctttgggtacacaatgaatgatctcatttttgaatggcaagatgaggcacccgtacaagtggcagaaggactcactttgccccagtttctgttgaaagaagaaaaagatttacgatactgcactaaacattacaatacaggaaagtttacgtgtatagaagtgcgattccatctggagcgacaaatgggatactatctgatccagatgtacattcccagtctcctgattgttattctatcctgggtttcattctggatcaacatggatgcagcaccggccagggtagctctggggataaccactgtgctaacgatgactacacagagttcaggatcacgagcttccttgccaaaagtttcatatgtcaaagctattgatatttggatggcagtatgcctcctttttgtgttttcagcacttctggagtatgcagctgtaaattttgtatcaagacaacacaaagaacttctgagatttcgacgaaagagaaagaataagacagaagcttttgcactggagaagttttaccgtttctcagatatggatgatgaggtaagggaaagccgattcagcttcacagcctatggaatgggaccatgtctacaagcaaaggatggcatgactccaaagggccccaaccaccctgtccaggtaatgccaaaaagtcctgatgaaatgaggaaggtctttatcgaccgggccaagaagattgataccatctcccgagcctgcttcccattagcttttttgatttttaatattttctactgggttatctataaaattcttaggcatgaggatattcatcagcagcaagattaagtctctgggggcatgcaaatgcaaatggtcaattcagaagaaagtgtctctgccataggtgtgtatgtgtatatgtgtgcgtgtggtatacaaatgatgaccattgtattaaaatggcatatggaaaagctttgtattttggttagctatgcaaagtcatgagaaagatgagattcttttaatgaatataaaatatttattaggggattctatttcatattaattccaggtgatttgttttttcacagtaaaccatgtaagtggaagctttactgccaatgtgtttatatgttatataatatctcataatagtagacatgaaaactactttgaaattccttgatttgtaattcaatgctattaaatcatacaaaagcaaattttgcacagtaaaccaatagtttgagatttaaaactattttcttatagtatagttacaaaatgggaaaataattagttacagtgggaaattcactcatattaatggaggattgtacatataaatactatttaaacaacatatgtaattttgaaaatttttaaataagagcattaaaagactttaatgatttggaatactaaatttaattgtttagaatattaagttttcctctgtgcaaatttaaaacaaataacaagagatcgtgttacagtcacaatctacttttcttaaactttgtatctctaggaacgaaggtggaaatacgggaaacaactttgtttttaaataagtattatagctatgtatttttagttattgccaaacattgaacaattcaagccagcacccttgtttttgttagacttttaatagctacttaactgtatgtgattgtgtttaataatttgatataacaggacaaaattcagtaagacttttatattttagtttagaatgtgactttaaaattcaatgggattaaagtatttacattttgataaaaatgaatacaatgaaaacaaaatggattcatggaagattttttaataaaaaccattttcccatcaatgttttatgggtctcaactcctatctccaaatataagtagggaaagttttaattttaaatgatataagtaagtcatttctataaagtgaggactctttttctatttctgaattaatgatttcaaaatctaagccattcgcaagatgtgaataattttaaatgaaatttttacataaaatttttcaatgaccccatgggattacttcaacaaaaacagagcattagtaacttgttttttgcagtgtaattgggtgcaaatgtatgatagagttcttggtaaacagaaccagactctgactctttttcagttttgctatttttttaactatttttaccataaatttatttggaaaagctttggaatgctttttaggtattttaattattggtcagatgcacaaactcagtccaccaaattattcacagagaaaactttaaagattaagaaaacaatgaactcagatgtacaatagaaaagccagttctttaacaagatgctattttctacccttcaaccactttcaaattaaaagcaaaaactaccatttaaaactaaaacctttacaatgttattgtacatcagcttatacaattgtaattttttaaaataacattttaaaaaatagtaaatgttaagcagtttttgctagtaaaagaccaagttcccctcctttataagtaacttaaaacaacactataaggaaataatatcatgtttggcattatgtgcaaatgacacaaccaaaagaatttgttactctgtaagtacccacgttgaggactgtgcacctgaaaattaaacatatgcttcttcatttggtgtgtatttaacaaaaccatggaaacatattcttgttctaaagattagagcaagatatgtcatttgtattccttgagaattagcaggagagtttgaggtaattataaactacatcatctcgatgtgtctctgaaatacctgaatacgtttttctatactttccacatcttatttcaaaagtttcccaacattgcttaagtgaattctgccaggagcaaacagaaatataatgaatgcaaacatgcttacttccaaaagaaattcacagacatcacttctttccatatttgagaatattataaatgtgtctttgttaaatcagaaacttagaaagtgaaaataccaaacatgagacaatattgtcaacaaggacgttggtacattagaaatctatctcaaaagtattacactttccttaggcatagttttcctttcctattatatttgtcactgtcttactgcactaagaaaatactttaacagctttcactcacaaggcaacagtgacaaggtgcatgtggctgaatccaatatgtttaaaggaatgtgtctcctccttcgaactcttatagaccttttaaaactgaaaaattacattgcagttagcatcctgagataatatttgcctcaataagccctgtgtccaaccagaatattttaaattaaaccaaccacaaaattattaatggcaagaaattaaaaatgtgtgcatatacattaactactaaacacacaaattggaattccaatgtgcatattctgaagtattttaaaatagccacattagaaaatatgggattttcatgtatgcagtttatatcattttcttaaaaagaattatttgtatgtcaatcattgaaatatttgattccatagcatatgaatttataggctatcttatacattagcatatatgtgcccaaccttttctttctttcccaaccattagaattgaacttaaaccataatgaggctctagaacttactttacaactttaaatagattcaagagtcactgtattttcaagaaagctgagggtgtttaaaacttctccaacccttccaaaagtttctccatggcgctggagaccccatccaactctcagtggctatattagggaatcatccggactgctcatcttattctaaaattaattcttattctgttgatatattctaataacttttatcttaatttggaatttaattgcttgtatatttatatatccctaagacatgaattcatgtattagtttatgaatacccaggatctcatggaaggtaagggaaattttagaaaaaaaaatgaataatctaaatgtttaactaacagaagagagcaagctgttcactactttagtactcagtgcaacttaagtagttataatatttgaaaaaagatttagatgtatcttccatactatacatccctttttctgaacattttttattccactttttaaaatatgcttttctatttttctcaacacaacatacttcaacctgctggttacttgggaggactgaatattatactggcagctaaatttttatttcatctataaagtacacattccaggaaatggacatgagagaatacaagagacttgccaaaattgaaatggaaaatacttgcagtattttgtaaatggaaaagaaggaaactgacagcattgtttttcacaggtgtcccctaaaaatttagaacactctaagaacaaaactctgagaacaaaaatgtatctaatgatccttagacagatatcattaacaatccttgaggtcatgatatcttctactccaaaagtgattccacactctttgcaacatagataatagcataaactcccaaaatttatcagcatatacgacctatatttttcatctagttaatattgaactagcaaagaaaagcaagccattccaaatataagacaatctggtgttaatacaatatattagaagaaatagtgtaaatgttcacacagattccctcttgcaaataaagtacccataatacccattgcatcttgtacctgtataagagacatcttcctcagcagatgcattggtttttatttccttatttgtgtgctacagtggtaaatatagcctcactgcattttttttattgttatataaacctttcatggataaataagcagtgtacactgtaaattgcattaatttaattaactttaaaattaaacttttatctcagcccccattcctctttacaaacatagtgatattaaaaagtgaacttccatagggagacacctggtactccaattacttcaaaagtaaagtgatgcatattcttccataacaaagatacttataggccatgtgtaaaatataactctctacaatttaaacggaactagggcagggaaaaatatcctggggaagcttcttccagatatgaggacaagagatataatcccaagttagtagctaggacccacttacctgtttttttggtctacattttacatcttaataatgccttcatctcttccctttccctctctctctctctctttcacacacacacacacacacacacacacacacacacacatacacatattggtaatgagatgaattcctttagattaaaaatacaaagacagtcaatttttctagacaaaggttcataatcctgtgatatgttttgcaatattaagtgattcctggtggaaaatatgaaccatgcagtcattcgatttggccagctcttaatcatgcaacaatcttttgcctcaaaaacacataaacaaagctaactggatcaagtctttaacccttaacaatcgaattctaaaacactatttgaaccgtttttgaagaacagctaaataactgtcaaaaacctttttcaaaagacagctagtaatattggatgactttgtagtgtctgaacaggtggttttctcagtagtttttgtggttaacacataaacaaagaggagacatttaaggtgatggagtattatttttaaaaagtgattttgaaccctggctatgtgttggaattccttacacattttaaaaatacatacatatgcttggtgtccaacatagaagattatgatttaatcattgattaaacaaatattcattgagtaccttatgtgtgcctggcactgtcccaagtgctaaatttagtatttttggaataagatctgaaattctggatgattgaaaaaattccagaagtgagagaattcgtgtgaacttacacaagcttattctcttaataaggatcaatttaacactttttaagttttatcattttttctttcttcaagcaactaattttagttgtctctcatttatattcttagaattaaaaataggcccggccaggtggctcacgcctgtaatcccagcactttgggaggccgaggcagtcaaatcacttgaggtcaggagttaagacaccagcctggccaatatgataaaaccctgtctctactaaaaatacaaaaattagccaggcatgatggcaggtgcctgtaatcccagttactcaagggaggctgaggtggaagaatggcttgagcccaggagatggaggttgcagtgagccaagatcgcaccactgcactccaaactgggtgacagagtgagactctgtctcacaaacaaacagacagacaaaaaaagaatttaaaataaatctttgatgcgtttcaattcagctttcctcccaatgtcagaatcttcaccattacattatccacattcttcgagcacccagatagcaacaggtagctcattactctgagggcagtcttctgttccattgtgacataactctagatgataaaaatgttaatcttcatcaagaaatgacttttacttcctaaaataccaagtaagtttattcccctcctataagacaactagcatatattttcacatttctgctgtctgtgtttaagttcaatcaaccccttatcactagctttattcttatttaaaccattcatgagagcattgtaagtgttaaacaatgatgagatattttcaggcttataaaataatgaaatataaaattaattatctacatagataaatagaaattgatgaaaatttctatgtatattattttcagtaactgttaatgtcttcctataacagcaataaatttaaattaaatatttttaaatttatttcagatatgaagatattatataaaactctacaaagtaatatgaatttaaaaaaactagcagcaaaccatattaaccatattgtgtgtttttagagtaaagctataacaaaagtacaggggattaagttgttttattttaatagctgcttttactctggggtggttttagcaatggcgcctttgggcaaccccgctcacatacacagtatccagcctgggtggttaatactagggagctgtgacttaaatggcaggaaaggattcagatgtaaaattgtacttgaatatgcttgaataattttgcacttcttcacttttttctctatgaattattcaatggtcattacttaaatttgtattttaatgtatgataaatgataatatggggggggaaatagagtgaagtaccctgacattctacagatataatatgatatgctatgaaaaacaaaacaaaaagaaaatgtgccatatattttccatgtaccatctttatatgatatacagtgacttcattattagtgagtcaagttgtttaaaggactaccaaaagaagtattgctattttatggtttttatggtgtaaattatttttctgtcttcttgagtcttatgtctaagtctgtcttccttgtccagatgctgtcatatttttccaggaaattatactgaaaacatatttaaaaatttatgcacgatttcatcaacttgtttttcattatattatatttagttcaattttgcaactaacagactctctatcagagtcattaacctgtgaacagtataaagtatttaacatgtaactatagataatttgatccgaaacaataaaaatgaacacttttcaagaatatgga

SEQ ID NO: 12549 - DNA, 3065 bp, Homo sapiens
  source 1..3065: mol_type = unassigned DNA
attccggcgggcggcgcttggagcaggtggagaggcgtcctctttccggctgttgctgctcttcttcctccaatcctgggtctcagtcagggaagaacgaacattcttcctttgctgctggagctttagagaactgttgcccagcacctaggcacttcagacatttcatctcactcatttttgtaatttcactgtaaaaatcacctgcacatttataacactgtgactctccacttctgctcaatgctgagaaggggtccgcatactgcggggagctgtctaaggtgctgaagcttcccaagcatcagtctacaccaacaccatgcggggttagattgtacattttcattctgtctttctggttccccatgccttggataagactattttcaggatcgtgaatatctctccgtatcatggcccacgtgagacactttcggacattagtttcgggattttacttctgggaagcagcactgttactcagtttggttgccacaaaggaaacagacagtgcaagatctcgaagtgctccaatgtcaccttctgattttctggataaattaatgggcaggacatcaggatatgatgcaagaatcagacccaattttaaaggccctccagttaatgtcacatgcaacatattcatcaacagctttggctctatcgcagagacgaccatggattacagagtgaatatctttcttcgtcagaaatggaatgatccccgcctcgcgtacagtgaatatcctgacgactctttagacctcgacccctccatgttggactccatttggaaacctgatttgttctttgccaatgaaaagggtgccaactttcatgaagtcactacagacaacaaattgctaagaattttcaaaaatggaaatgttctttattcaataagattaacattaacactttcctgtccaatggatctcaagaattttcccatggatgtacaaacatgtataatgcaactggaaagctttgggtacacaatgaatgatctcatttttgaatggcaagatgaggcacccgtacaagtggcagaaggactcactttgccccagtttctgttgaaagaagaaaaagatttacgatactgcactaaacattacaatacaggaaagtttacgtgtatagaagtgcgattccatctggagcgacaaatgggatactatctgatccagatgtacattcccagtctcctgattgttattctatcctgggtttcattctggatcaacatggatgcagcaccggccagggtagctctggggataaccactgtgctaacgatgactacacagagttcaggatcacgagcttccttgccaaaagtttcatatgtcaaagctattgatatttggatggcagtatgcctcctttttgtgttttcagcacttctggagtatgcagctgtaaattttgtatcaagacaacacaaagaacttctgagatttcgacgaaagagaaagaataaggatgatgaggtaagggaaagccgattcagcttcacagcctatggaatgggaccatgtctacaagcaaaggatggcatgactccaaagggccccaaccaccctgtccaggtaatgccaaaaagtcctgatgaaatgaggaaggtctttatcgaccgggccaagaagattgataccatctcccgagcctgcttcccattagcttttttgatttttaatattttctactgggttatctataaaattcttaggcatgaggatattcatcagcagcaagattaagtctctgggggcatgcaaatgcaaatggtcaattcagaagaaagtgtctctgccataggtgtgtatgtgtatatgtgtgcgtgtggtatacaaatgatgaccattgtattaaaatggcatatggaaaagctttgtattttggttagctatgcaaagtcatgagaaagatgagattcttttaatgaatataaaatatttattaggggattctatttcatattaattccaggtgatttgttttttcacagtaaaccatgtaagtggaagctttactgccaatgtgtttatatgttatataatatctcataatagtagacatgaaaactactttgaaattccttgatttgtaattcaatgctattaaatcatacaaaagcaaattttgcacagtaaaccaatagtttgagatttaaaactattttcttatagtatagttacaaaatgggaaaataattagttacagtgggaaattcactcatattaatggaggattgtacatataaatactatttaaacaacatatgtaattttgaaaatttttaaataagagcattaaaagactttaatgatttggaatactaaatttaattgtttagaatattaagttttcctctgtgcaaatttaaaacaaataacaagagatcgtgttacagtcacaatctacttttcttaaactttgtatctctaggaacgaaggtggaaatacgggaaacaactttgtttttaaataagtattatagctatgtatttttagttattgccaaacattgaacaattcaagccagcacccttgtttttgttagacttttaatagctacttaactgtatgtgattgtgtttaataatttgatataacaggacaaaattcagtaagacttttatattttagtttagaatgtgactttaaaattcaatgggattaaagtatttacattttgataaaaatgaatacaatgaaaacaaaatggattcatggaagattttttaataaaaaccattttcccatcaatgttttatgggtctcaactcctatctccaaatataagtagggaaagttttaattttaaatgatataagtaagtcatttctataaagtgaggactctttttctatttctgaattaatgatttcaaaatctaagccattcgcaagatgtgaataattttaaatgaaatttttacataaaatttttcaatgaccccatgggattacttcaacaaaaacagagcattagtaacttgttttttgcagtgtaattgggtgcaaatgtatgatagagttcttggtaaacagaaccag

SEQ ID NO: 12550 - DNA, 3126 bp, Homo sapiens
  source 1..3126: mol_type = unassigned DNA
ccgcccgcggtcgccaggttcccccgcggcccgcgctgtccccgctgcggccccgaccgcggcgcgccacggcgcaggctccgcggcccgagcaggcgcgtcagccgagctcggcggtggcgcgggcggctgggacgcagctgcccccgctcggcgcccgctgcacccttagcagccactgccacctgggcccggagcctccacgatctcgcccggcgattgtgggcaggggcgcctccggatcgatcttctgaaattcaagttttcaagatgaagtttttattgacaactgcctttttaattttaatttccttgtgggtggaagaagcctattctaaggaaaagtcttcaaagaaagggaaggggaaaaagaagcagtatctatgcccatctcagcagtcagcagaggaccttgcccgagtacctgccaactccactagcaatatcttgaacaggttattggtcagttatgatcccaggataagaccaaacttcaaaggcattcctgttgatgtagtagtcaacatttttattaacagttttggatccattcaagaaacaacaatggactatagagttaacatcttcctgagacaaaaatggaatgaccccaggctgaagctccccagtgattttaggggttcagatgcactgacagtggatccaacaatgtacaagtgtttatggaaacctgatttattttttgcaaatgaaaaaagtgccaattttcatgatgtgacccaggaaaacatcctcctctttatttttcgtgatggagatgtccttgtcagcatgaggttatctattactctttcatgccctttggacttgacattgtttcccatggatacacaacgttgcaagatgcaactggagagctttggttacacaactgatgatttacgatttatctggcagtcaggagatcctgtgcaattagaaaaaattgccttgcctcaatttgatatcaaaaaggaagatattgaatatggtaactgtacaaaatactataaaggcacgggctactacacatgcgtggaagtcatcttcaccctgaggaggcaggtcggcttttacatgatgggggtctacgccccaactctgctcattgttgttctctcctggctttccttctggatcaacccggacgcgagtgctgccagagtgcccctgggtatcttctcagtcctcagcttggcctctgagtgcacaacccttgccgctgagcttcccaaagtttcctatgtgaaggctcttgatgtttggcttattgcttgccttctctttgggtttgcttccctggtggagtatgcagttgtccaggtgatgctgaacaaccccaaaagggttgaagctgaaaaagccagaattgctaaggctgagcaagcagatggaaaaggtggaaatgtggctaaaaagaatactgtgaatggaacagggactcctgttcatattagcactttgcaggttggtgagaccagatgcaaaaaagtttgtacttctaagtctgatctgagatctaatgacttcagcattgttggaagcttaccaagagattttgaactatccaattatgactgctatggaaaacccattgaagttaacaacggacttgggaaatctcaggctaagaacaacaagaagcctccccctgcgaaacctgttattccaacagcagcaaagcgaattgatctttatgcaagagcattgtttcctttctgcttcttgttcttcaatgttatatattggtctatatatttatgataaatcttttccatttgtacaaaataaaattccatttcattgtgacctactcctttcataaatgccaatctgtgagaacttttgaattttcatagcaacattgcattttggatgccatttgattgtaataaaactgtggcaccttaattttgaatggcagcatgatcatgtaatatctgtgctctaataacgatgtatatatgtatagtgaacatattgcttagtaacaaatgaaggacaagcatactacataatataatccatacaattctcttcagttagtgtaaactgcaaatactacagataattctgataataaaatgatatgcacgctgaatcctgctatggtcaccattctaatgtatgtagtatttcaaatttccttccttgtaactttcaaagaaagccatcttattcttgtaaaattttagatggtattatcacagatttaaaaaggttgtattacatattgtttaaactttgtaagtagaaatatatctgttataattatacaggctctgtggagaaataaagttcaaaatatattaatttgtaaaatcagctcgttttaaagtgtgcttgtgttgtcaaaaatatcagatagtaatacacagtgagcatttttaaacaaagggaaacctatatttatgtaactgtatactgaattctgacaaaataaaaaaagataccttattgacgaaatatttaggataaacaaaattctatttaatccaccttaaaacctaaatgtattttcatggatttcatttgttggtacatattacacaaaacattgtgccttaaaatgagtcatacatcttttaaattggaatgcagtaatagatatgtgattttacatcatttttaagaaaccaaggggaagtaataagttgaaaaagaaatccataactattaaaagattttaacttttttattttattaaaatgcttgcatattttaagtaaaattaaaaatgtttactgaatttatttttttatttgaatattttgggattagttacaaaatatttagagattaaataaataatagctttgtttgtgttagacttcacttctacttgtattttctttcttgttaaaagtctagacaactgagatttacttactttgaacttgttccaatccaaaagtaagcactaagtctcattttatgagaccaccatttcttaatatcacatccagtgcacctttgtctttctgccatatctgaaataaaactatcagtaattcacatagataaacataagactaaagaagtatatttacattatctggagagttttgttgcagctacgagtttgtatggcaaattcaataataaagtattgtttatgcaaattgc

SEQ ID NO: 12551 - DNA, 1757 bp, Homo sapiens
  source 1..1757: mol_type = unassigned DNA
ggggcggcggagcgcgaggagcactgcggcgtgcccgggaggacgcgcgctgccctgcgcgggagaggggcgcggggcgcctggcagcggcagccgggtccccgctgcggtggcgcccgcggagacgctccgggtggagagatgcagagggccgggatcgatcttctgaaattcaagttttcaagatgaagtttttattgacaactgcctttttaattttaatttccttgtgggtggaagaagcctattctaaggaaaagtcttcaaagaaagggaaggggaaaaagaagcagtatctatgcccatctcagcagtcagcagaggaccttgcccgagtacctgccaactccactagcaatatcttgaacaggttattggtcagttatgatcccaggataagaccaaacttcaaaggcattcctgttgatgtagtagtcaacatttttattaacagttttggatccattcaagaaacaacaatggactatagagttaacatcttcctgagacaaaaatggaatgaccccaggctgaagctccccagtgattttaggggttcagatgcactgacagtggatccaacaatgtacaagtgtttatggaaacctgatttattttttgcaaatgaaaaaagtgccaattttcatgatgtgacccaggaaaacatcctcctctttatttttcgtgatggagatgtccttgtcagcatgaggttatctattactctttcatgccctttggacttgacattgtttcccatggatacacaacgttgcaagatgcaactggagagctttggttacacaactgatgatttacgatttatctggcagtcaggagatcctgtgcaattagaaaaaattgccttgcctcaatttgatatcaaaaaggaagatattgaatatggtaactgtacaaaatactataaaggcacgggctactacacatgcgtggaagtcatcttcaccctgaggaggcaggtcggcttttacatgatgggggtctacgccccaactctgctcattgttgttctctcctggctttccttctggatcaacccggacgcgagtgctgccagagtgcccctgggtatcttctcagtcctcagcttggcctctgagtgcacaacccttgccgctgagcttcccaaagtttcctatgtgaaggctcttgatgtttggcttattgcttgccttctctttgggtttgcttccctggtggagtatgcagttgtccaggtgatgctgaacaaccccaaaagggttgaagctgaaaaagccagaattgctaaggctgagcaagcagatggaaaaggtggaaatgtggctaaaaagaatactgtgaatggaacagggactcctgttcatattagcactttgcaggttggtgagaccagatgcaaaaaagtttgtacttctaagtctgatctgagatctaatgacttcagcattgttggaagcttaccaagagattttgaactatccaattatgactgctatggaaaacccattgaagttaacaacggacttgggaaatctcaggctaagaacaacaagaagcctccccctgcgaaacctgttattccaacagcagcaaagcgaattgatctttatgcaagagcattgtttcctttctgcttcttgttcttcaatgttatatattggtctatatatttatgataaatcttttccatttgtacaaaataaaattccatttcattgtgacctactcctttcataaatgccaatctgtgagaa

SEQ ID NO: 12552 - DNA, 2765 bp, Homo sapiens
  source 1..2765: mol_type = unassigned DNA
acggcgcaggctccgcggcccgagcaggcgcgtcagccgagctcggcggtggcgcgggcggctgggacgcagctgcccccgctcggcgcccgctgcacccttagcagccactgccacctgggcccggagcctccacgatctcgcccggcgattgtgggcaggggcgcctccggatcgatcttctgaaattcaagttttcaagatgaagtttttattgacaactgcctttttaattttaatttccttgtgggtggaagaagcctattctaaggaaaagtcttcaaagaaagggaaggggaaaaagaagcagtatctatgcccatctcagcagtcagcagaggaccttgcccgagtacctgccaactccactagcaatatcttgaacaggttattggtcagttatgatcccaggataagaccaaacttcaaaggcattcctgttgatgtagtagtcaacatttttattaacagttttggatccattcaagaaacaacaatggactatagagttaacatcttcctgagacaaaaatggaatgaccccaggctgaagctccccagtgattttaggggttcagatgcactgacagtggatccaacaatgtacaagtgtttatggaaacctgatttattttttgcaaatgaaaaaagtgccaattttcatgatgtgacccaggaaaacatcctcctctttatttttcgtgatggagatgtccttgtcagcatgaggttatctattactctttcatgccctttggacttgacattgtttcccatggatacacaacgttgcaagatgcaactggagagctttggttacacaactgatgatttacgatttatctggcagtcaggagatcctgtgcaattagaaaaaattgccttgcctcaatttgatatcaaaaaggaagatattgaatatggtaactgtacaaaatactataaaggcacgggctactacacatgcgtggaagtcatcttcaccctgaggaggcaggtcggcttttacatgatgggggtctacgccccaactctgctcattgttgttctctcctggctttccttctggatcaacccggacgcgagtgctgccagagtgcccctgggttggtgagaccagatgcaaaaaagtttgtacttctaagtctgatctgagatctaatgacttcagcattgttggaagcttaccaagagattttgaactatccaattatgactgctatggaaaacccattgaagttaacaacggacttgggaaatctcaggctaagaacaacaagaagcctccccctgcgaaacctgttattccaacagcagcaaagcgaattgatctttatgcaagagcattgtttcctttctgcttcttgttcttcaatgttatatattggtctatatatttatgataaatcttttccatttgtacaaaataaaattccatttcattgtgacctactcctttcataaatgccaatctgtgagaacttttgaattttcatagcaacattgcattttggatgccatttgattgtaataaaactgtggcaccttaattttgaatggcagcatgatcatgtaatatctgtgctctaataacgatgtatatatgtatagtgaacatattgcttagtaacaaatgaaggacaagcatactacataatataatccatacaattctcttcagttagtgtaaactgcaaatactacagataattctgataataaaatgatatgcacgctgaatcctgctatggtcaccattctaatgtatgtagtatttcaaatttccttccttgtaactttcaaagaaagccatcttattcttgtaaaattttagatggtattatcacagatttaaaaaggttgtattacatattgtttaaactttgtaagtagaaatatatctgttataattatacaggctctgtggagaaataaagttcaaaatatattaatttgtaaaatcagctcgttttaaagtgtgcttgtgttgtcaaaaatatcagatagtaatacacagtgagcatttttaaacaaagggaaacctatatttatgtaactgtatactgaattctgacaaaataaaaaaagataccttattgacgaaatatttaggataaacaaaattctatttaatccaccttaaaacctaaatgtattttcatggatttcatttgttggtacatattacacaaaacattgtgccttaaaatgagtcatacatcttttaaattggaatgcagtaatagatatgtgattttacatcatttttaagaaaccaaggggaagtaataagttgaaaaagaaatccataactattaaaagattttaacttttttattttattaaaatgcttgcatattttaagtaaaattaaaaatgtttactgaatttatttttttatttgaatattttgggattagttacaaaatatttagagattaaataaataatagctttgtttgtgttagacttcacttctacttgtattttctttcttgttaaaagtctagacaactgagatttacttactttgaacttgttccaatccaaaagtaagcactaagtctcattttatgagaccaccatttcttaatatcacatccagtgcacctttgtctttctgccatatctgaaataaaactatcagtaattcacatagataaacataagactaaagaagtatatttacattatctggagagttttgttgcagctacgagtttgtatggcaaattcaataataaagtattgtttatgcaaattgc

SEQ ID NO: 12553 - DNA, 1150 bp, Homo sapiens
  source 1..1150: mol_type = unassigned DNA
agaaatttctggaggtggtgtatcaaaatttactctgcgagactctgctgaactggctgcatcagggagaaatttcatctcccagaagggtgttgctcatcgtttcttcccggaaacatctgcagagactagcttttcaggctaaggtatcctccatgatgttaccattgcaaggtgcccagatgctgcagatgctggagaaatccttgaggaagagcctcccagcatccttaaaggtttatggaactgtctttcacataaaccatggaaatccattcaatctgaaggctgtggtggacaagtggcctgattttaatacagtggttgtctgccctcaggagcaggatatgacagatgaccttgatcactataccaatacttaccaaatctactccaaagatccccaaaactgtcaggaattccttggatcaccagaactcatcaactggaaacagcatttacagattcaaagttcacagcctagcctgaatgaggctatacaaaatcttgcagccattaagtccttcaaagtcaaacaaacacaacgcattctctatatggcagctgaaacagccaaggaactgactcctttcctgctgaaatcaaagattttatctcccaatggtggcaaacccaaggccatgtgagtttgataaaatccagtctataccactcacacctctcaagtaacctcccaacttctctccctgcattcactctggctttcctacaatcaatgttgtacaaagaaatcagaattacatttttaaaaaatgtaactcagaacatgtttctctcctgcttaaaagactccaccatctcccttctcatctagaataaaccaggcctctggctaccacttggacctttattgcccttcctgctttcttcctccaacagctctgaccttcactctgttcctctttcatcacaagctcatctatattccaggacttcacatttgttatttcttctgtctactctgtctctcaagacaatagaggtcacagcaaatacaaacctttatactaatggattttgttttcttcttggaccctccatagcaaccaagagatgtttaaactctcatccatggatgttacccatgctcacttggtgaataaattctggcattttggtggtaatgaga

SEQ ID NO: 12554 - DNA, 1735 bp, Homo sapiens
  source 1..1735: mol_type = unassigned DNA
ggtggtgtatcaaaatttactctgcgagactctgctgaactggctgcatcagggagaaatttcatctcccagaagggtgttgctcatcgtttcttcccggaaacatctgcagagactagcttttcaggctaaggtatcctccatgatgttaccattgcaaggtgcccagatgctgcagatgctggagaaatccttgaggaagagcctcccagcatccttaaaggtttatggaactgtctttcacataaaccatggaaatccattcaatctgaaggctgtggtggacaagtggcctgattttaatacagtggttgtctgccctcaggagcaggatatgacagatgaccttgatcactataccaatacttaccaaatctactccaaagatccccaaaactgtcaggaattccttggatcaccagaactcatcaactggaaacagcatttacagattcaaagttcacagcctagcctgaatgaggctatacaaaatcttgcagccattaagtccttcaaagtcaaacaaacacaacgcattctctatatggcagctgaaacagccaaggaactgactcctttcctgctgaaatcaaagattttatctcccaatggtggcaaacccaaggccatcaaccaagagatgtttaaactctcatccatggatgttacccatgctcacttggtgaataaattctggcattttggtggtaatgagaggagccagagattcattgagcgctgcattcagacctttcccacctgctgtctcctggggcctgaggggacccctgtgtgctgggatctaatggaccagactggagagatgagaatggcaggcaccttgccggaataccggctccatggccttgtgacgtatgtcatctattcccacgcccagaaattgggcaaacttgggtttcctgtctattctcatgtagactacagcaatgaagctatgcaaaaaatgagttacacactgcaacatgttcccattcccagaagctggaaccagtggaactgtgtacctctgtgatgccaatcctgaacataagacagtgttgggcaggtctgggcgtataatttgaggagtggatggtggatgaaaagaaataataaattgtaatcagcagtaaaggagtgggcactgtttggactctggggaagcagtgtgatgttcaacagcatcgccatggtccctgcattcacaggtttctcagtgggaagcaggcccaggtcctcttacatttgacataagcaatttacctccccacatttccaggacctctatgacacttcatcagatacatattgctccaaattacttctcctggaatccctggttcctcagttgcaagacccttgccagtttttctgggagctaggaagaggtgaattaaattttctgagcactatgacttctttctttctaaagcctttcccttatgatcaacaagtggactctcctcagcaggtctttagagattatcctctcctgttattgctactttataggtacattaaatatactggacacaaatatatatgggatattaggctaaatacagtatacatgatatagcagggaatgttactagaagaaatatcaactgatgatatcctatcctctccaagctcctattccaggaaaaaagatccaatgttttttctaaagatgagcttccaaaacccacaactcctaaataatacagaaagttttgtgtttgactgtatacaa

SEQ ID NO: 12555 - DNA, 1070 bp, Homo sapiens
  source 1..1070: mol_type = unassigned DNA
cagtgacagtccttgtgctctggttagattccatatccctgaacttcaacctgaaaacttccatcagctaaggtatcctccatgatgttaccattgcaaggtgcccagatgctgcagatgctggagaaatccttgaggaagagcctcccagcatccttaaaggtttatggaactgtctttcacataaaccatggaaatccattcaatctgaaggctgtggtggacaagtggcctgattttaatacagtggttgtctgccctcaggagcaggatatgacagatgaccttgatcactataccaatacttaccaaatctactccaaagatccccaaaactgtcaggaattccttggatcaccagaactcatcaactggaaacagcatttacagattcaaagttcacagcctagcctgaatgaggctatacaaaatcttgcagccattaagtccttcaaagtcaaacaaacacaacgcattctctatatggcagctgaaacagccaaggaactgactcctttcctgctgaaatcaaagattttatctcccaatggtggcaaacccaaggccatcaaccaagagatgtttaaactctcatccatggatgttacccatgctcacttggtgaataaattctggcattttggtggtaatgagaggagccagagattcattgagcgctgcattcagacctttcccacctgctgtctcctggggcctgaggggacccctgtgtgctgggatctaatggaccagactggagagatgagaatggcaggcaccttgccggaataccggctccatggccttgtgacgtatgtcatctattcccacgcccagaaattgggcaaacttgggtttcctgtctattctcatgtagactacagcaatgaagctatgcaaaaaatgagttacacactgcaacatgttcccattcccagaagctggaaccagtggaactgtgtacctctgtgatgccaatcctgaacataagacagtgttgggcaggtctgggcgtataatttgaggagtggatggtggatgaaaagaaataataaattgtaatcagcagt

SEQ ID NO: 12556 - DNA, 3378 bp, Homo sapiens
  source 1..3378: mol_type = unassigned DNA
cagtgacgctgcggcctccttctgcctaggtcccaacgcttcggggcaggggtgcggtcttgcaataggaagccgagcgtcttgcaagcttcccgtcgggcaccagctactcggccccgcaccctacctggtgcattccctagacacctccggggtccctacctggagatccccggagccccccttcctgcgccagccatgcctttaaaccgcactttgtccatgtcctcactgccaggactggaggactgggaggatgaattcgacctggagaacgcagtgctcttcgaagtggcctgggaggtggctaacaaggtgggtggcatctacacggtgctgcagacgaaggcgaaggtgacaggggacgaatggggcgacaactacttcctggtggggccgtacacggagcagggcgtgaggacccaggtggaactgctggaggcccccaccccggccctgaagaggacactggattccatgaacagcaagggctgcaagttcctggcacagagtgaggagaagccacatgtggttgctcacttccatgagtggttggcaggcgttggactctgcctgtgtcgtgcccggcgactgcctgtagcaaccatcttcaccacccatgccacgctgctggggcgctacctgtgtgccggtgccgtggacttctacaacaacctggagaacttcaacgtggacaaggaagcaggggagaggcagatctaccaccgatactgcatggaaagggcggcagcccactgcgctcacgtcttcactactgtgtcccagatcaccgccatcgaggcacagcacttgctcaagaggaaaccagatattgtgacccccaatgggctgaatgtgaagaagttttctgccatgcatgagttccagaacctccatgctcagagcaaggctcgaatccaggagtttgtgcggggccatttttatgggcatctggacttcaacttggacaagaccttatacttctttatcgccggccgctatgagttctccaacaagggtgctgacgtcttcctggaggcattggctcggctcaactatctgctcagagtgaacggcagcgagcagacagtggttgccttcttcatcatgccagcgcggaccaacaatttcaacgtggaaaccctcaaaggccaagctgtgcgcaaacagctttgggacacggccaacacggtgaaggaaaagttcgggaggaagctttatgaatccttactggttgggagccttcccgacatgaacaagatgctggataaggaagacttcactatgatgaagagagccatctttgcaacgcagcggcagtctttcccccctgtgtgcacccacaatatgctggatgactcctcagaccccatcctgaccaccatccgccgaatcggcctcttcaatagcagtgccgacagggtgaaggtgattttccacccggagttcctctcctccacaagccccctgctccctgtggactatgaggagtttgtccgtggctgtcaccttggagtcttcccctcctactatgagccttggggctacacaccggctgagtgcacggttatgggaatccccagtatctccaccaatctctccggcttcggctgcttcatggaggaacacatcgcagacccctcagcttacggtatctacattcttgaccggcggttccgcagcctggatgattcctgctcgcagctcacctccttcctctacagtttctgtcagcagagccggcggcagcgtatcatccagcggaaccgcacggagcgcctctccgaccttctggactggaaatacctaggccggtactatatgtctgcgcgccacatggcgctgtccaaggcctttccagagcacttcacctacgagcccaacgaggcggatgcggcccaggggtaccgctacccacggccagcctcggtgccaccgtcgccctcgctgtcacgacactccagcccgcaccagagtgaggacgaggaggatccccggaacgggccgctggaggaagacggcgagcgctacgatgaggacgaggaggccgccaaggaccggcgcaacatccgtgcaccagagtggccgcgccgagcgtcctgcacctcctccaccagcggcagcaagcgcaactctgtggacacggccacctccagctcactcagcaccccgagcgagcccctcagccccaccagctccctgggcgaggagcgtaactaagtccgccccaccacactccccgcctgtcctgcctctctgctccagagagaggatgcagaggggtgctgctcctaaacccccgctccagatctgcactgggtgtggccccgcagtgcccccacccagtccgccaaacactccaccccctccagctccagtttccaagttcctgcactccagaatccacaaagccgtgcctttctctggctccagaatatgcataatcagcgccctggagtcccctgggcctggaccgcttcccagaggccaggaatctgccattactctgcggtggtgccagaggttttaggaaacctggcatggtgctttcaggtctggggcttttagagccccccgtgtggcttacaaattctacagcatacagagcaggccacgctcaggcccggcatgcgggccaccaagttctggaaaccacgtggtgtccctgcgaatggggcgatcaagtccagagccggggcactttcagagtttgaaggtaactgagagcagatggtcctccatttcaactccagaagtggggctctgggagggatgttctagccctccctggcatgtcagagccaggctctgcctggaggatccctccatccggctcctgtcatcccctacactttggccaagcaagaggtggtagaaccacttggctgctcattccttctggaggacacacagtctcagtccagatgccttcctgtctttctggccctttctggaccagatcctactcttcctttctaaatctgagatctccctccagggaatccgcctgcagaggacagagctggctgtcttcccccacccctaacctggcttattcccaactgctctgcccactgtgaaaccactaggttctaggtcctggcttctagatctggaaccttaccacgttactgcatactgatccctttcccatgatccagaactgaggtcactgggttctagaacccccacatttacctcgaggctcttccatccccaaactgtgccctgccttcagctttggtgaaagggagggcccctcatgtgtgctgtgctgtgtctgcaccgcttggtttgcagttgagaggggagggcaggaggggtgtgattggagtgtgtccggagatgagatgaaaaaaatacatctatatttaagaa

SEQ ID NO: 12557 - DNA, 3574 bp, Homo sapiens
  source 1..3574: mol_type = unassigned DNA
agtgacgctgcggcctccttctgcctaggtcccaacgcttcggggcaggggtgcggtcttgcaataggaagccgagcgtcttgcaagcttcccgtcgggcaccagctactcggccccgcaccctacctggtgcattccctagacacctccggggtccctacctggagatccccggagccccccttcctgcgccagccatgcctttaaaccgcactttgtccatgtcctcactgccaggactggaggactgggaggatgaattcgacctggagaacgcagtgctcttcgaagtggcctgggaggtggctaacaaggtgggtggcatctacacggtgctgcagacgaaggcgaaggtgacaggggacgaatggggcgacaactacttcctggtggggccgtacacggagcagggcgtgaggacccaggtggaactgctggaggcccccaccccggccctgaagaggacactggattccatgaacagcaagggctgcaaggtgtatttcgggcgctggctgatcgagggaggccctctggtggtgctcctggacgtgggtgcctcagcttgggccctggagcgctggaagggagagctctgggatacctgcaacatcggagtgccgtggtacgaccgcgaggccaacgacgctgtcctctttggctttctgaccacctggttcctgggtgagttcctggcacagagtgaggagaagccacatgtggttgctcacttccatgagtggttggcaggcgttggactctgcctgtgtcgtgcccggcgactgcctgtagcaaccatcttcaccacccatgccacgctgctggggcgctacctgtgtgccggtgccgtggacttctacaacaacctggagaacttcaacgtggacaaggaagcaggggagaggcagatctaccaccgatactgcatggaaagggcggcagcccactgcgctcacgtcttcactactgtgtcccagatcaccgccatcgaggcacagcacttgctcaagaggaaaccagatattgtgacccccaatgggctgaatgtgaagaagttttctgccatgcatgagttccagaacctccatgctcagagcaaggctcgaatccaggagtttgtgcggggccatttttatgggcatctggacttcaacttggacaagaccttatacttctttatcgccggccgctatgagttctccaacaagggtgctgacgtcttcctggaggcattggctcggctcaactatctgctcagagtgaacggcagcgagcagacagtggttgccttcttcatcatgccagcgcggaccaacaatttcaacgtggaaaccctcaaaggccaagctgtgcgcaaacagctttgggacacggccaacacggtgaaggaaaagttcgggaggaagctttatgaatccttactggttgggagccttcccgacatgaacaagatgctggataaggaagacttcactatgatgaagagagccatctttgcaacgcagcggcagtctttcccccctgtgtgcacccacaatatgctggatgactcctcagaccccatcctgaccaccatccgccgaatcggcctcttcaatagcagtgccgacagggtgaaggtgattttccacccggagttcctctcctccacaagccccctgctccctgtggactatgaggagtttgtccgtggctgtcaccttggagtcttcccctcctactatgagccttggggctacacaccggctgagtgcacggttatgggaatccccagtatctccaccaatctctccggcttcggctgcttcatggaggaacacatcgcagacccctcagcttacggtatctacattcttgaccggcggttccgcagcctggatgattcctgctcgcagctcacctccttcctctacagtttctgtcagcagagccggcggcagcgtatcatccagcggaaccgcacggagcgcctctccgaccttctggactggaaatacctaggccggtactatatgtctgcgcgccacatggcgctgtccaaggcctttccagagcacttcacctacgagcccaacgaggcggatgcggcccaggggtaccgctacccacggccagcctcggtgccaccgtcgccctcgctgtcacgacactccagcccgcaccagagtgaggacgaggaggatccccggaacgggccgctggaggaagacggcgagcgctacgatgaggacgaggaggccgccaaggaccggcgcaacatccgtgcaccagagtggccgcgccgagcgtcctgcacctcctccaccagcggcagcaagcgcaactctgtggacacggccacctccagctcactcagcaccccgagcgagcccctcagccccaccagctccctgggcgaggagcgtaactaagtccgccccaccacactccccgcctgtcctgcctctctgctccagagagaggatgcagaggggtgctgctcctaaacccccgctccagatctgcactgggtgtggccccgcagtgcccccacccagtccgccaaacactccaccccctccagctccagtttccaagttcctgcactccagaatccacaaagccgtgcctttctctggctccagaatatgcataatcagcgccctggagtcccctgggcctggaccgcttcccagaggccaggaatctgccattactctgcggtggtgccagaggttttaggaaacctggcatggtgctttcaggtctggggcttttagagccccccgtgtggcttacaaattctacagcatacagagcaggccacgctcaggcccggcatgcgggccaccaagttctggaaaccacgtggtgtccctgcgaatggggcgatcaagtccagagccggggcactttcagagtttgaaggtaactgagagcagatggtcctccatttcaactccagaagtggggctctgggagggatgttctagccctccctggcatgtcagagccaggctctgcctggaggatccctccatccggctcctgtcatcccctacactttggccaagcaagaggtggtagaaccacttggctgctcattccttctggaggacacacagtctcagtccagatgccttcctgtctttctggccctttctggaccagatcctactcttcctttctaaatctgagatctccctccagggaatccgcctgcagaggacagagctggctgtcttcccccacccctaacctggcttattcccaactgctctgcccactgtgaaaccactaggttctaggtcctggcttctagatctggaaccttaccacgttactgcatactgatccctttcccatgatccagaactgaggtcactgggttctagaacccccacatttacctcgaggctcttccatccccaaactgtgccctgccttcagctttggtgaaagggagggcccctcatgtgtgctgtgctgtgtctgcaccgcttggtttgcagttgagaggggagggcaggaggggtgtgattggagtgtgtccggagatgagatgaaaaaaatacatctatatttaagaatccca

SEQ ID NO: 12558 - DNA, 1276 bp, Homo sapiens
  source 1..1276: mol_type = unassigned DNA
agtgacgctgcggcctccttctgcctaggtcccaacgcttcggggcaggggtgcggtcttgcaataggaagccgagcgtcttgcaagcttcccgtcgggcaccagctactcggccccgcaccctacctggtgcattccctagacacctccggggtccctacctggagatccccggagccccccttcctgcgccagccatgcctttaaaccgcactttgtccatgtcctcactgccaggactggaggactgggaggatgaattcgacctggagaacgcagtgctcttcgaagtggcctgggaggtggctaacaagggtgtatttcgggcgctggctgatcgagggaggccctctggtggtgctcctggacgtgggtgcctcagcttgggccctggagcgctggaagggagagctctgggatacctgcaacatcggagtgccgtggtacgaccgcgaggccaacgacgctgtcctctttggctttctgaccacctggttcctgggtgagttcctggcacagagtgaggagaagccacatgtggttgctcacttccatgagtggttggcaggcgttggactctgcctgtgtcgtgcccggcgactgcctgtagcaaccatcttcaccacccatgccacgctgctggggcgctacctgtgtgccggtgccgtggacttctacaacaacctggagaacttcaacgtggacaaggaagcaggggagaggcagatctaccaccgatactgcatggaaagggcggcagcccactgcgctcacgtcttcactactgtgtcccagatcaccgccatcgaggcacagcacttgctcaagaggaaaccaggcatctggacttcaacttggacaagaccttatacttctttatcgccggccgctatgagttctccaacaagggtgctgacgtcttcctggaggcattggctcggctcaactatctgctcagagtgaacggcagcgagcagacagtggttgccttcttcatcatgccagcgcggaccaacaatttcaacgtggaaaccctcaaaggccaagctgtgcgcaaacagctttgggacacggccaacacggtgaaggaaaagttcgggaggaagctttatgaatccttactggttgggagccttcccgacatgaacaagatgctggataaggaagacttcactatgatgaagagagccatctttgcaacgcagcggcagtctttcccccctgtgtgcacccacaatatgctggatgactcctcagaccccatcctgaccaccat

SEQ ID NO: 12559 - DNA, 2561 bp, Homo sapiens
  source 1..2561: mol_type = unassigned DNA
agtgacgctgcggcctccttctgcctaggtcccaacgcttcggggcaggggtgcggtcttgcaataggaagccgagcgtcttgcaagcttcccgtcgggcaccagctactcggccccgcaccctacctggtgcattccctagacacctccggggtccctacctggagatccccggagccccccttcctgcgccagccatgcctttaaaccgcactttgtccatgtcctcactgccaggactggaggactgggaggatgaattcgacctggagaacgcagtgctcttcgaagtggcctgggaggtggctaacaagggtgtatttcgggcgctggctgatcgagggaggccctctggtggtgctcctggacgtgggtgcctcagcttgggccctggagcgctggaagggagagctctgggatacctgcaacatcggagtgccgtggtacgaccgcgaggccaacgacgctgtcctctttggctttctgaccacctggttcctgggtgagttcctggcacagagtgaggagaagccacatgtggttgctcacttccatgagtggttggcaggcgttggactctgcctgtgtcgtgcccggcgactgcctgtagcaaccatcttcaccacccatgccacgctgctggggcgctacctgtgtgccggtgccgtggacttctacaacaacctggagaacttcaacgtggacaaggaagcaggggagaggcagatctaccaccgatactgcatggaaagggcggcagcccactgcgctcacgtcttcactactgtgtcccagatcaccgccatcgaggcacagcacttgctcaagaggaaaccagatattgtgacccccaatgggctgaatgtgaagaagttttctgccatgcatgagttccagaacctccatgctcagagcaaggctcgaatccaggagtttgtgcggggccatttttatgggcatctggacttcaacttggacaagaccttatacttctttatcgccggccgctatgagttctccaacaagggtgctgacgtcttcctggaggcattggctcggctcaactatctgctcagagtgaacggcagcgagcagacagtggttgccttcttcatcatgccagcgcggaccaacaatttcaacgtggaaaccctcaaaggccaagctgtgcgcaaacagctttgggacacggccaacacggtgaaggaaaagttcgggaggaagctttatgaatccttactggttgggagccttcccgacatgaacaagatgctggataaggaagacttcactatgatgaagagagccatctttgcaacgcagcggcagtctttcccccctgtgtgcacccacaatatgctggatgactcctcagaccccatcctgaccaccatccgccgaatcggcctcttcaatagcagtgccgacagggtgaaggtgattttccacccggagttcctctcctccacaagccccctgctccctgtggactatgaggagtttgtccgtggctgtcaccttggagtcttcccctcctactatgagccttggggctacacaccggctgagtgcacggttatgggaatccccagtatctccaccaatctctccggcttcggctgcttcatggaggaacacatcgcagacccctcagcttacggtatctacattcttgaccggcggttccgcagcctggatgattcctgctcgcagctcacctccttcctctacagtttctgtcagcagagccggcggcagcgtatcatccagcggaaccgcacggagcgcctctccgaccttctggactggaaatacctaggccggtactatatgtctgcgcgccacatggcgctgtccaaggcctttccagagcacttcacctacgagcccaacgaggcggatgcggcccaggggtaccgctacccacggccagcctcggtgccaccgtcgccctcgctgtcacgacactccagcccgcaccagagtgaggacgaggaggatccccggaacgggccgctggaggaagacggcgagcgctacgatgaggacgaggaggccgccaaggaccggcgcaacatccgtgcaccagagtggccgcgccgagcgtcctgcacctcctccaccagcggcagcaagcgcaactctgtggacacggccacctccagctcactcagcaccccgagcgagcccctcagccccaccagctccctgggcgaggagcgtaactaagtccgccccaccacactccccgcctgtcctgcctctctgctccagagagaggatgcagaggggtgctgctcctaaacccccgctccagatctgcactgggtgtggccccgcagtgcccccacccagtccgccaaacactccaccccctccagctccagtttccaagttcctgcactccagaatccacaaagccgtgcctttctctggctccagaatatgcataatcagcgccctggagtcccctgggcctggaccgcttcccagaggccaggaatctgccattactctgcggtggtgccagaggttttaggaaacctggcatggtgctttca

SEQ ID NO: 12560 - DNA, 1503 bp, Homo sapiens
  source 1..1503: mol_type = unassigned DNA
agtgacgctgcggcctccttctgcctaggtcccaacgcttcggggcaggggtgcggtcttgcaataggaagccgagcgtcttgcaagcttcccgtcgggcatctggacttcaacttggacaagaccttatacttctttatcgccggccgctatgagttctccaacaagggtgctgacgtcttcctggaggcattggctcggctcaactatctgctcagagtgaacggcagcgagcagacagtggttgccttcttcatcatgccagcgcggaccaacaatttcaacgtggaaaccctcaaaggccaagctgtgcgcaaacagctttgggacacggccaacacggtgaaggaaaagttcgggaggaagctttatgaatccttactggttgggagccttcccgacatgaacaagatgctggataaggaagacttcactatgatgaagagagccatctttgcaacgcagcggcagtctttcccccctgtgtgcacccacaatatgctggatgactcctcagaccccatcctgaccaccatccgccgaatcggcctcttcaatagcagtgccgacagggtgaaggtgattttccacccggagttcctctcctccacaagccccctgctccctgtggactatgaggagtttgtccgtggctgtcaccttggagtcttcccctcctactatgagccttggggctacacaccggctgagtgcacggttatgggaatccccagtatctccaccaatctctccggcttcggctgcttcatggaggaacacatcgcagacccctcagcttacggtatctacattcttgaccggcggttccgcagcctggatgattcctgctcgcagctcacctccttcctctacagtttctgtcagcagagccggcggcagcgtatcatccagcggaaccgcacggagcgcctctccgaccttctggactggaaatacctaggccggtactatatgtctgcgcgccacatggcgctgtccaaggcctttccagagcacttcacctacgagcccaacgaggcggatgcggcccaggggtaccgctacccacggccagcctcggtgccaccgtcgccctcgctgtcacgacactccagcccgcaccagagtgaggacgaggaggatccccggaacgggccgctggaggaagacggcgagcgctacgatgaggacgaggaggccgccaaggaccggcgcaacatccgtgcaccagagtggccgcgccgagcgtcctgcacctcctccaccagcggcagcaagcgcaactctgtggacacggccacctccagctcactcagcaccccgagcgagcccctcagccccaccagctccctgggcgaggagcgtaactaagtccgccccaccacactccccgcctgtcctgcctctctgctccagagagaggatgcagaggggtgctgctcctaaacccccgctccagatctgcactgggtgtggccccgcagtgcccccacccagtccgcc

SEQ ID NO: 12561 - DNA, 1890 bp, Homo sapiens
  source 1..1890: mol_type = unassigned DNA
ccgcgcagctgggaggatgcggacggcagcgagagcgtgcgcggccacgtgacggccgctataagagcgcacggggcagacgctcggttccccgccgtgcctcctcgctggccgcgctccctcccggtgccggcttctctgagtcaccaacctgaggctgccccggccgcctgcgcacccggcagcaccatgacagatcaggcctttgtgacactaaccacaaacgatgcctacgccaaaggtgccctggtcctgggatcatctctgaaacagcacaggaccaccaggaggctggtcgtgctcgccacccctcaggtctcagactccatgagaaaagttttagagacagtctttgatgaagtcatcatggtagatgtcttggacagtggcgattctgctcatctaaccttaatgaagaggccagagttgggtgtcacgctgacaaagctccactgctggtcgcttacacagtattcaaaatgtgtattcatggatgcagatactctggtcctagcaaatattgatgatctttttgacagagaagaattgtcagcagcaccagacccagggtggcctgactgcttcaattccggagtcttcgtttatcagccttcagttgaaacatacaatcagctgttgcatcttgcttctgagcaaggtagttttgatggtggggaccaaggcatactgaacacattttttagcagctgggcaacaacagatatcagaaaacacctgccgtttatttataacctaagcagcatctctatatactcctacctcccggcatttaaagtgtttggtgcaagtgccaaagttgtgcatttcctgggacgagtcaaaccatggaattatacttatgatcccaaaacaaaaagtgtcaaaagtgaggcccatgatcccaacatgactcatccagagtttctcatcctgtggtggaacatctttaccaccaacgttttacctctgcttcaacaatttggccttgtcaaagacacctgctcatatgtaaatgtggaagatgtctcaggagccatatcacatctgtcccttggggagatcccagctatggcacagccgtttgtatcctcggaagaacggaaggaacgatgggaacagggccaggctgattatatgggagcagattcctttgacaacatcaagaggaaacttgacacttacctccagtagaaacactgcatttttctgtgaacacatccacttcacaagccttgtttctgatacttagtatctagagctgggttgagaaaagtctgttacagttgctagaggttttcattaaaacttatcagatgagaggcttttttaggataagaggtgagaactgggcaaaagttgtgaagcagcaattctgttatatggacagtgttctgctttttaatcctatttagcttgtttcagaaattctcacttttgttgactgccaacatacaaagtaagggaaactcaagatattaagatggctgtatcagttcttaaaatctgcagagcctggttcaaaatcagtcactcccttcagaagcagacatggcatctgttccttgcttgcttgttggttgtgtacctttcacgagacctgaattttagaattgcccagtgctgccagagtgagtgagtgtaattctcctttcaggtaaagataggctatctcaacactgctgagtgattcataaacatatcaaccaatagcattaacccattttatttcctgtccttagtgtctgaagatgctcaccagttttctgtgtacagtaaggcagcatgctaaaatgcttttgttcagttctgtatatttgaaaatagcagtgtgttctctgatggttacctgcagtggcaccctgtacaaaaaataaaagacttattgctgta

SEQ ID NO: 12562 - DNA, 2052 bp, Homo sapiens
  source 1..2052: mol_type = unassigned DNA
agcaggggcgccggtgagccgcagccgcagcggcagcctagccccgagggagggaggaggagccgagggagacgcgggacccggagccccgcgggccaccgcccctgccggccgcgcagctgggaggatgcggacggcagcgagagcgtgcgcggccacgtgacggccgctataagagcgcacggggcagacgctcggttccccgccgtgcctcctcgctggccgcgctccctcccggtgccggcttctctgagtcaccaacctgaggctgccccggccgcctgcgcacccggcagcaccatgacagatcaggcctttgtgacactaaccacaaacgatgcctacgccaaaggtgccctggtcctgggatcatctctgaaacagcacaggaccaccaggaggctggtcgtgctcgccacccctcaggtctcagactccatgagaaaagttttagagacagtctttgatgaagtcatcatggtagatgtcttggacagtggcgattctgctcatctaaccttaatgaagaggccagagttgggtgtcacgctgacaaagctccactgctggtcgcttacacagtattcaaaatgtgtattcatggatgcagatactctggtcctagcaaatattgatgatctttttgacagagaagaattgtcagcagcaccagacccagggtggcctgactgcttcaattccggagtcttcgtttatcagccttcagttgaaacatacaatcagctgttgcatcttgcttctgagcaaggtagttttgatggtggggaccaaggcatactgaacacattttttagcagctgggcaacaacagatatcagaaaacacctgccgtttatttataacctaagcagcatctctatatactcctacctcccggcatttaaagtgtttggtgcaagtgccaaagttgtgcatttcctgggacgagtcaaaccatggaattatacttatgatcccaaaacaaaaagtgtcaaaagtgaggcccatgatcccaacatgactcatccagagtttctcatcctgtggtggaacatctttaccaccaacgttttacctctgcttcaacaatttggccttgtcaaagacacctgctcatatgtaaatgtgctttcagacttggtctatacactggctttctcttgtggcttctgtagaaaggaagatgtctcaggagccatatcacatctgtcccttggggagatcccagctatggcacagccgtttgtatcctcggaagaacggaaggaacgatgggaacagggccaggctgattatatgggagcagattcctttgacaacatcaagaggaaacttgacacttacctccagtagaaacactgcatttttctgtgaacacatccacttcacaagccttgtttctgatacttagtatctagagctgggttgagaaaagtctgttacagttgctagaggttttcattaaaacttatcagatgagaggcttttttaggataagaggtgagaactgggcaaaagttgtgaagcagcaattctgttatatggacagtgttctgctttttaatcctatttagcttgtttcagaaattctcacttttgttgactgccaacatacaaagtaagggaaactcaagatattaagatggctgtatcagttcttaaaatctgcagagcctggttcaaaatcagtcactcccttcagaagcagacatggcatctgttccttgcttgcttgttggttgtgtacctttcacgagacctgaattttagaattgcccagtgctgccagagtgagtgagtgtaattctcctttcaggtaaagataggctatctcaacactgctgagtgattcataaacatatcaaccaatagcattaacccattttatttcctgtccttagtgtctgaagatgctcaccagttttctgtgtacagtaaggcagcatgctaaaatgcttttgttcagttctgtatatttgaaaatagcagtgtgttctctgatggttacctgcagtggcaccctgtacaaaaaataaaagacttattgctgta

SEQ ID NO: 12563 - DNA, 1563 bp, Homo sapiens
  source 1..1563: mol_type = unassigned DNA
gctggccgcgctccctcccggtgccggcttctctgagtcaccaacctgaggctgccccggccgcctgcgcacccggcagcaccatgacagatcaggcctttgtgacactaaccacaaacgatgcctacgccaaaggtgccctggtcctgggatcatctctgaaacagcacaggaccaccaggaggctggtcgtgctcgccacccctcaggtctcagactccatgagaaaagttttagagacagtctttgatgaagtcatcatggtagatgtcttggacagtggcgattctgctcatctaaccttaatgaagaggccagagttgggtgtcacgctgacaaagctccactgctggtcgcttacacagtattcaaaatgtgtattcatggatgcagatactctggtcctagcaaatattgatgatctttttgacagagaagaattgtcagcagcaccagacccagggtggcctgactgcttcaattccggagtcttcgtttatcagccttcagttgaaacatacaatcagctgttgcatcttgcttctgagcaaggtagttttgatggtggggaccaaggcatactgaacacattttttagcagctgggcaacaacagatatcagaaaacacctgccgtttatttataacctaagcagcatctctatatactcctacctcccggcatttaaagtgaagatgtctcaggagccatatcacatctgtcccttggggagatcccagctatggcacagccgtttgtatcctcggaagaacggaaggaacgatgggaacagggccaggctgattatatgggagcagattcctttgacaacatcaagaggaaacttgacacttacctccagtagaaacactgcatttttctgtgaacacatccacttcacaagccttgtttctgatacttagtatctagagctgggttgagaaaagtctgttacagttgctagaggttttcattaaaacttatcagatgagaggcttttttaggataagaggtgagaactgggcaaaagttgtgaagcagcaattctgttatatggacagtgttctgctttttaatcctatttagcttgtttcagaaattctcacttttgttgactgccaacatacaaagtaagggaaactcaagatattaagatggctgtatcagttcttaaaatctgcagagcctggttcaaaatcagtcactcccttcagaagcagacatggcatctgttccttgcttgcttgttggttgtgtacctttcacgagacctgaattttagaattgcccagtgctgccagagtgagtgagtgtaattctcctttcaggtaaagataggctatctcaacactgctgagtgattcataaacatatcaaccaatagcattaacccattttatttcctgtccttagtgtctgaagatgctcaccagttttctgtgtacagtaaggcagcatgctaaaatgcttttgttcagttctgtatatttgaaaatagcagtgtgttctctgatggttacctgcagtggcaccctgtacaaaaaataaaagacttattgctgt

SEQ ID NO: 12564 - DNA, 3277 bp, Homo sapiens
  source 1..3277: mol_type = unassigned DNA
cgcgggcttgcgggcaggggctgcagggaggaggagaggacccgcgcccgcgggggctggcggaggcggggccgggcttccggacagaggccaatcgctgccctcggggcctccagcgccggctctgggccgaggcagccagagcgcggaagaggcctggaaatccacgcggattcccggagacggcgcctctgctctgcgggttcgtggcgaggaagtccacccactgctcccgggcgcaggtctgcaggtccgcgcccactgcccgcggcgccactgaccatgtcggagacagagtttcaccatggtgcccaggctggtctcgaactcctgaggtcaagcaattcacccacctcagcctcccaaagtgctggaatgacagtgactgatcaggcttttgtcacactagccaccaatgacatctactgccagggcgccctggtcctggggcagtcactgaggagacacaggctgacgaggaagctggtggtgttgatcactcctcaggtgtccagcctgctcagggtcatcctctcgaaggtgttcgatgaagtcattgaagtgaatctaatcgatagtgccgactacatccacctggcctttctgaagagacctgagctcgggctcaccctcaccaagcttcactgttggactctcactcactacagcaagtgtgtcttcctggatgcagacactctggtgctgtccaatgtcgatgagctgtttgacaggggagagttttctgcggccccggaccccggatggccggattgcttcaatagcggggtgtttgtcttccagccttctctccacacgcataaactcctgctacagcacgccatggaacacggcagctttgacggggcagaccaaggcttactgaatagtttcttcaggaactggtcgaccacagacatccacaagcacctgccgttcatctataacttgagtagtaacacgatgtacacttacagccctgccttcaagcaattcggttccagtgcaaaggtcgtccactttttggggtccatgaaaccttggaactacaagtacaatccacagagtggctcggtgttggagcaaggctcagcgtccagcagccagcaccaggcggcattccttcatctctggtggacggtctaccagaacaacgtgctgcccctttataaaagcgtccaagcgggggaagcacgcgcgtctcctggtcacacactttgccacagtgatgtgggggggccgtgtgcggattcagcctctggtgttggagagccgtgtgaaaattcaacacccagtgcgggcgtgccgtgtgcaaattcaccactgggttctaaccagcctgctcagggccttccggagccgacccagatagtggatgagaccctgtccctacctgaaggacgccgttcagaagatatgatagcttgtcctgaaactgagactcctgccgtgataacgtgtgacccactgtcccagccttcccctcagcctgcagacttcacagagactgaaaccatcttggtcgacctggccgtctctgtttcccagatctccatcgaagagaaggtgaaggaattgagccccgaggaagagaggaggaagtgggaggaaggccgtatcgactacatggggaaggacgcgtttgctcgcatccaggagaagctggaccggttcctgcagtaatccggcagctggtgggcgttgtgtgtagttagacaatgtcctgttgggtggtcctgttgcgtggagatctcctctggtcctttcaaagggaaacgctgttgaaccttgtgcctctatttatgcttaatccatttgagtgcctcacacaaaaaacgtagagtatagaaatccaccttaaagcccctcgccccaacttctccaccaacgccttctgggctttcttcagaggtcacttctacccttgaagctgtcggcaaaagcgagcagtaataacattctagtagactctcgatggtggtctccgctcttgcccgaaggacctctgaagtacgctggagctgtgttgtacaggtgctgtgagacctaccctattcagaattaaacctcactgcaaatttcctcccatcacgaagctaacaacactaatatacgtatttagcacctctgaggctttgccatggagacccatttctgtagggctaaggaaacatttagacgtggtgactgactttcatttggacttggcgaagtgtatctgagaaacacctcggctgtggtctctctgctttaaatcctaacaggacttcctagagcgttgacagaaattctactcgtggacgttgggaagaaagattgtaggtggcttggggaatgtgggtggcttagaggatctaaaccgattcacttcctggttgagaagcaacgagggcttgctctaaatcgtttagaggataacaggatctagagatgctctctgcttgacaacaaaagtcagggtgcagtcggtccacccttgactgctcttggcttggtctctaccctcactacctcagttctcaataacttagtgaatcactgccctcctcaaagccatttccactcagctctttccagagaattctcagttttatgagacgggaaactttatttcacgagaaagcctcattgtcagaagtatcttcattcaatgggcacaatatgctgtgtatctcaccaggtagctgtcaggggccaccgagagtgtcgttaaaaatgggcatggttgtaataaaggaggaaagtgcgacttttgaaatgtttggaaggtttatttctcatgcacattccagggaaaagcagagagtaaattagagacgggataggaaggccgtgggagaactcgatcctagcctgtgtcagctggatgtgtttacgtggagaggcgtggccactttttaggtcacctgaagcagtttagcctttggatagaggaacctgcctgaatttatggcattagtggtggcatttttttgtgtacaagatgtgggtgatggaggggctgtttctttttccgtgtgggtggttaataatcgtcagtctcggagggcgaggctcgtaggatatttcaggtgagtcagggttggatggtcatcggctttcagaaggagaccacgggaatgttcagggaaacaatgtcagcttctctgaggaccagaattcatgttcacgggcagtgatgagttggcttatggagtgagtccagtctggaattccgccgtgcattctagcctgtatcatctcatttggacaaatgctggcacgttgaaattaaaatgtt

SEQ ID NO: 12565 - DNA, 3393 bp, Homo sapiens
  source 1..3393: mol_type = unassigned DNA
cgcgggcttgcgggcaggggctgcagggaggaggagaggacccgcgcccgcgggggctggcggaggcggggccgggcttccggacagaggccaatcgctgccctcggggcctccagcgccggctctgggccgaggcagccagagcgcggaagaggcctggaaatccacgcggattcccggagacggcgcctctgctctgcgggttcgtggcgaggaagtccacccactgctcccgggcgcaggtctgcaggtccgcgcccactgcccgcggcgccactgaccatgtcggagacagagtttcaccatggtgcccaggctggtctcgaactcctgaggtcaagcaattcacccacctcagcctcccaaagtgctggaatgacagtgactgatcaggcttttgtcacactagccaccaatgacatctactgccagggcgccctggtcctggggcagtcactgaggagacacaggctgacgaggaagctggtggtgttgatcactcctcaggtgtccagcctgctcagggtcatcctctcgaaggtgttcgatgaagtcattgaagtgaatctaatcgatagtgccgactacatccacctggcctttctgaagagacctgagctcgggctcaccctcaccaagcttcactgttggactctcactcactacagcaagtgtgtcttcctggatgcagacactctggtgctgtccaatgtcgatgagctgtttgacaggggagagttttctgcggccccggaccccggatggccggattgcttcaatagcggggtgtttgtcttccagccttctctccacacgcataaactcctgctacagcacgccatggaacacggcagctttgacggggcagaccaaggcttactgaatagtttcttcaggaactggtcgaccacagacatccacaagcacctgccgttcatctataacttgagtagtaacacgatgtacacttacagccctgccttcaagcaattcggttccagtgcaaaggtcgtccactttttggggtccatgaaaccttggaactacaagtacaatccacagagtggctcggtgttggagcaaggctcagcgtccagcagccagcaccaggcggcattccttcatctctggtggacggtctaccagaacaacgtgctgcccctttataaaagcgtccaagcgggggaagcacgcgcgtctcctggtcacacactttgccacagtgatgtgggggggccgtgtgcggattcagcctctggtgttggagagccgtgtgaaaattcaacacccagtgcgggcgtgccgtgtgcaaattcaccactgggttctaaccagcctgctcagggccttccggagccgacccagatagtggatgagaccctgtccctacctgaaggacgccgttcagaagatatgatagcttgtcctgaaactgagactcctgccgtgataacgtgtgacccactgtcccagccttcccctcagcctgcagacttcacagagactgaaaccatcttgcagccagcaaataaagtcgaaagtgtctcatccgaggaaaccttcgaaccaagccaggaactccctgctgaggctctcagggaccccagtctgcaggatgcactggaggtcgacctggccgtctctgtttcccagatctccatcgaagagaaggtgaaggaattgagccccgaggaagagaggaggaagtgggaggaaggccgtatcgactacatggggaaggacgcgtttgctcgcatccaggagaagctggaccggttcctgcagtaatccggcagctggtgggcgttgtgtgtagttagacaatgtcctgttgggtggtcctgttgcgtggagatctcctctggtcctttcaaagggaaacgctgttgaaccttgtgcctctatttatgcttaatccatttgagtgcctcacacaaaaaacgtagagtatagaaatccaccttaaagcccctcgccccaacttctccaccaacgccttctgggctttcttcagaggtcacttctacccttgaagctgtcggcaaaagcgagcagtaataacattctagtagactctcgatggtggtctccgctcttgcccgaaggacctctgaagtacgctggagctgtgttgtacaggtgctgtgagacctaccctattcagaattaaacctcactgcaaatttcctcccatcacgaagctaacaacactaatatacgtatttagcacctctgaggctttgccatggagacccatttctgtagggctaaggaaacatttagacgtggtgactgactttcatttggacttggcgaagtgtatctgagaaacacctcggctgtggtctctctgctttaaatcctaacaggacttcctagagcgttgacagaaattctactcgtggacgttgggaagaaagattgtaggtggcttggggaatgtgggtggcttagaggatctaaaccgattcacttcctggttgagaagcaacgagggcttgctctaaatcgtttagaggataacaggatctagagatgctctctgcttgacaacaaaagtcagggtgcagtcggtccacccttgactgctcttggcttggtctctaccctcactacctcagttctcaataacttagtgaatcactgccctcctcaaagccatttccactcagctctttccagagaattctcagttttatgagacgggaaactttatttcacgagaaagcctcattgtcagaagtatcttcattcaatgggcacaatatgctgtgtatctcaccaggtagctgtcaggggccaccgagagtgtcgttaaaaatgggcatggttgtaataaaggaggaaagtgcgacttttgaaatgtttggaaggtttatttctcatgcacattccagggaaaagcagagagtaaattagagacgggataggaaggccgtgggagaactcgatcctagcctgtgtcagctggatgtgtttacgtggagaggcgtggccactttttaggtcacctgaagcagtttagcctttggatagaggaacctgcctgaatttatggcattagtggtggcatttttttgtgtacaagatgtgggtgatggaggggctgtttctttttccgtgtgggtggttaataatcgtcagtctcggagggcgaggctcgtaggatatttcaggtgagtcagggttggatggtcatcggctttcagaaggagaccacgggaatgttcagggaaacaatgtcagcttctctgaggaccagaattcatgttcacgggcagtgatgagttggcttatggagtgagtccagtctggaattccgccgtgcattctagcctgtatcatctcatttggacaaatgctggcacgttgaaattaaaatgttaaaaaaca

SEQ ID NO: 12566 - DNA, 1956 bp, Homo sapiens
  source 1..1956: mol_type = unassigned DNA
cttcccggcagccggggctgggcaccaggcggcgcgcgggcttgcgggcaggggctgcagggaggaggagaggacccgcgcccgcgggggctggcggaggcggggccgggcttccggacagaggccaatcgctgccctcggggcctccagcgccggctctgggccgaggcagccagagcgcggaagaggcctggaaatccacgcggattcccggagacggcgcctctgctctgcgggttcgtggcgaggaagtccacccactgctcccgggcgcaggtctgcaggtccgcgcccactgcccgcggcgccactgaccatgtcggtgactgatcaggcttttgtcacactagccaccaatgacatctactgccagggcgccctggtcctggggcagtcactgaggagacacaggctgacgaggaagctggtggtgttgatcactcctcaggtgtccagcctgctcagggtcatcctctcgaaggtgttcgatgaagtcattgaagtgaatctaatcgatagtgccgactacatccacctggcctttctgaagagacctgagctcgggctcaccctcaccaagcttcactgttggactctcactcactacagcaagtgtgtcttcctggatgcagacactctggtgctgtccaatgtcgatgagctgtttgacaggggagagttttctgcggccccggaccccggatggccggattgcttcaatagcggggtgtttgtcttccagccttctctccacacgcataaactcctgctacagcacgccatggaacacggcagctttgacggggcagaccaaggcttactgaatagtttcttcaggaactggtcgaccacagacatccacaagcacctgccgttcatctataacttgagtagtaacacgatgtacacttacagccctgccttcaagcaattcggttccagtgcaaaggtcgtccactttttggggtccatgaaaccttggaactacaagtacaatccacagagtggctcggtgttggagcaaggctcagcgtccagcagccagcaccaggcggcattccttcatctctggtggacggtctaccagaacaacgtgctgcccctttataaaagcgtccaagcgggggaagcacgcgcgtctcctggtcacacactttgccacagtgatgtgggggggccgtgtgcggattcagcctctggtgttggagagccgtgtgaaaattcaacacccagtgcgggcgtgccgtgtgcaaattcaccactgggttctaaccagcctgctcagggccttccggagccgacccagatagtggatgagaccctgtccctacctgaaggacgccgttcagaagatatgatagcttgtcctgaaactgagactcctgccgtgataacgtgtgacccactgtcccagccttcccctcagcctgcagacttcacagagactgaaaccatcttgcagccagcaaataaagtcgaaagtgtctcatccgaggaaaccttcgaaccaagccaggaactccctgctgaggctctcagggaccccagtctgcaggatgcactggaggtcgacctggccgtctctgtttcccagatctccatcgaagagaaggtgaaggaattgagccccgaggaagagaggaggaagtgggaggaaggccgtatcgactacatggggaaggacgcgtttgctcgcatccaggagaagctggaccggttcctgcagtaatccggcagctggtgggcgttgtgtgtagttagacaatgtcctgttgggtggtcctgttgcgtggagatctcctctggtcctttcaaagggaaacgctgttgaaccttgtgcctctatttatgcttaatccatttgagtgcctcacacaaaaaacgtagagtatagaaatccaccttaaagcccctcgccccaacttctccaccaacgccttctgggctttcttcaga

SEQ ID NO: 12567 - DNA, 624 bp, Homo sapiens
  source 1..624: mol_type = unassigned DNA
agtgcgccgagccagggcaccgagtgctggggaatacaggccgtccaggcgcggcggggcgcggggagacggaggctgccggagcctggaaatccacgcggattcccggagacggcgcctctgctctgcgggttcgtggcgaggaagtccacccactgctcccgggcgcaggtctgcaggtccgcgcccactgcccgcggcgccactgaccatgtcggtgactgatcaggcttttgtcacactagccaccaatgacatctactgccagggcgccctggtcctggggcagtcactgaggagacacaggctgacgaggaagctggtggtgttgatcactcctcaggtgtccagcctgctcagggtcatcctctcgaaggtgttcgatgaagtcattgaagtgaatctaatcgatagtgccgactacatccacctggcctttctgaagagacctgagctcgggctcaccctcaccaagcttcactgttggactctcactcactacagcaagtgtgtcttcctggatgcagacactctggtgctgtccaatgtcgatgagctgtttgacaggggagagttttctgcggccccggaccccggatggccggattgcttcaatagcggggt

SEQ ID NO: 12568 - DNA, 3172 bp, Homo sapiens
  source 1..3172: mol_type = unassigned DNA
cgcgggcttgcgggcaggggctgcagggaggaggagaggacccgcgcccgcgggggctggcggaggcggggccgggcttccggacagaggccaatcgctgccctcggggcctccagcgccggctctgggccgaggcagccagagcgcggaagaggcctggaaatccacgcggattcccggagacggcgcctctgctctgcgggttcgtggcgaggaagtccacccactgctcccgggcgcaggtctgcaggtccgcgcccactgcccgcggcgccactgaccatgtcggagacagagtttcaccatggtgcccaggctggtctcgaactcctgaggtcaagcaattcacccacctcagcctcccaaagtgctggaatgacagtgactgatcaggcttttgtcacactagccaccaatgacatctactgccagggcgccctggtcctggggcagtcactgaggagacacaggctgacgaggaagctggtggtgttgatcactcctcaggtgtccagcctgctcagggtcatcctctcgaaggtgttcgatgaagtcattgaagtgaatctaatcgatagtgccgactacatccacctggcctttctgaagagacctgagctcgggctcaccctcaccaagcttcactgttggactctcactcactacagcaagtgtgtcttcctggatgcagacactctggtgctgtccaatgtcgatgagctgtttgacaggggagagttttctgcggccccggaccccggatggccggattgcttcaatagcggggtgtttgtcttccagccttctctccacacgcataaactcctgctacagcacgccatggaacacggcagctttgacggggcagaccaaggcttactgaatagtttcttcaggaactggtcgaccacagacatccacaagcacctgccgttcatctataacttgagtagtaacacgatgtacacttacagccctgccttcaagcaattcggttccagtgcaaaggtcgtccactttttggggtccatgaaaccttggaactacaagtacaatccacagagtggctcggtgttggagcaaggctcagcgtccagcagccagcaccaggcggcattccttcatctctggtggacggtctaccagaacaacgtgctgcccctttataaaagcgtccaagcgggggaagcacgcgcgtctcctggtcacacactttgccacagtgatgtgggggggccgtgtgcggattcagcctctggtgttggagagccgtgtgaaaattcaacacccagtgcgggcgtgccgtgtgcaaattcaccactgggttctaaccagcctgctcagggccttccggagccgacccagatagtggatgagaccctgtccctacctgaaggacgccgttcagaagatgtcgacctggccgtctctgtttcccagatctccatcgaagagaaggtgaaggaattgagccccgaggaagagaggaggaagtgggaggaaggccgtatcgactacatggggaaggacgcgtttgctcgcatccaggagaagctggaccggttcctgcagtaatccggcagctggtgggcgttgtgtgtagttagacaatgtcctgttgggtggtcctgttgcgtggagatctcctctggtcctttcaaagggaaacgctgttgaaccttgtgcctctatttatgcttaatccatttgagtgcctcacacaaaaaacgtagagtatagaaatccaccttaaagcccctcgccccaacttctccaccaacgccttctgggctttcttcagaggtcacttctacccttgaagctgtcggcaaaagcgagcagtaataacattctagtagactctcgatggtggtctccgctcttgcccgaaggacctctgaagtacgctggagctgtgttgtacaggtgctgtgagacctaccctattcagaattaaacctcactgcaaatttcctcccatcacgaagctaacaacactaatatacgtatttagcacctctgaggctttgccatggagacccatttctgtagggctaaggaaacatttagacgtggtgactgactttcatttggacttggcgaagtgtatctgagaaacacctcggctgtggtctctctgctttaaatcctaacaggacttcctagagcgttgacagaaattctactcgtggacgttgggaagaaagattgtaggtggcttggggaatgtgggtggcttagaggatctaaaccgattcacttcctggttgagaagcaacgagggcttgctctaaatcgtttagaggataacaggatctagagatgctctctgcttgacaacaaaagtcagggtgcagtcggtccacccttgactgctcttggcttggtctctaccctcactacctcagttctcaataacttagtgaatcactgccctcctcaaagccatttccactcagctctttccagagaattctcagttttatgagacgggaaactttatttcacgagaaagcctcattgtcagaagtatcttcattcaatgggcacaatatgctgtgtatctcaccaggtagctgtcaggggccaccgagagtgtcgttaaaaatgggcatggttgtaataaaggaggaaagtgcgacttttgaaatgtttggaaggtttatttctcatgcacattccagggaaaagcagagagtaaattagagacgggataggaaggccgtgggagaactcgatcctagcctgtgtcagctggatgtgtttacgtggagaggcgtggccactttttaggtcacctgaagcagtttagcctttggatagaggaacctgcctgaatttatggcattagtggtggcatttttttgtgtacaagatgtgggtgatggaggggctgtttctttttccgtgtgggtggttaataatcgtcagtctcggagggcgaggctcgtaggatatttcaggtgagtcagggttggatggtcatcggctttcagaaggagaccacgggaatgttcagggaaacaatgtcagcttctctgaggaccagaattcatgttcacgggcagtgatgagttggcttatggagtgagtccagtctggaattccgccgtgcattctagcctgtatcatctcatttggacaaatgctggcacgttgaaattaaaatgtt

SEQ ID NO: 12569 - DNA, 751 bp, Homo sapiens
  source 1..751: mol_type = unassigned DNA
gcagttgtctttggtagtttttttgcactaacttcaggaaccagctcatgatctcaggatgtatggaaaaataatctttgtattactattgtcagatacgcacaaacgggacacatatgcagccactcctagagctcatgaagtttcagaaatttctgttagaactgtttaccctccagaagaggaaaccggagaaagggtacaacttgcccatcatttctctgaaccagagataacactcattatttttggggtgatggctggtgttattggaacgatcctcttaatttcttacggtattcgccgactgataaagaaaagcccatctgatgtaaaacctctcccctcacctgacacagacgtgcctttaagttctgttgaaatagaaaatccagagacaagtgatcaatgagaatctgttcaccaaaccaaatgtggaaagaacacaaagaagacataagacttcagtcaagtgaaaaattaacatgtggactggacactccaataaattatatacctgcctaagttgtacaatttcagaatgcaattttcattataatgagttccagtgactcaatgatggggaaaaaaatctctgctcattaatatttcaagataaagaacaaatgtttccttgaatgcttgcttttgtgtgttagcataatttttagaattgtttgagaattctgatccaaaactttagttgaattcatctacgtttgtttaatattaacttaacctattctattgt

SEQ ID NO: 12570 - DNA, 2659 bp, Homo sapiens
  source 1..2659: mol_type = unassigned DNA
gcaggaaggtgggcctggaagataacagctagcaggctaaggtcagacactgacacttgcagttgtctttggtagtttttttgcactaacttcaggaaccagctcatgatctcaggatgtatggaaaaataatctttgtattactattgtcagaaattgtgagcatatcagcattaagtaccactgaggtggcaatgcacacttcaacttcttcttcagtcacaaagagttacatctcatcacagacaaatgatacgcacaaacgggacacatatgcagccactcctagagctcatgaagtttcagaaatttctgttagaactgtttaccctccagaagaggaaaccggagaaagggtacaacttgcccatcatttctctgaaccagagataacactcattatttttggggtgatggctggtgttattggaacgatcctcttaatttcttacggtattcgccgactgataaagaaaagcccatctgatgtaaaacctctcccctcacctgacacagacgtgcctttaagttctgttgaaatagaaaatccagagacaagtgatcaatgagaatctgttcaccaaaccaaatgtggaaagaacacaaagaagacataagacttcagtcaagtgaaaaattaacatgtggactggacactccaataaattatatacctgcctaagttgtacaatttcagaatgcaattttcattataatgagttccagtgactcaatgatggggaaaaaaatctctgctcattaatatttcaagataaagaacaaatgtttccttgaatgcttgcttttgtgtgttagcataatttttagaattgtttgagaattctgatccaaaactttagttgaattcatctacgtttgtttaatattaacttaacctattctattgtattataatgatgattctgtcaaatgaaaggcttgaaatacctagatgaagtttagattttcttcctattgtaaacttttgagtctggtttcattgttttaaataaattaaggggacactaaagtcctatcattcatttccttcattgctgaacaggcaagatataatattacatgaatgattactatattttgttcacactaataaagcttatgctcagaaatgccatacacacacacacacacacacacaaacacacacatttatcatttaatgcataaatcaacacaaaaggttttcccattaatatgaaatattacatatatataagtgccatatttaaaataatttgtctaacagtagaactgtgtcggagcactcactgaagcttgcattccactgaaagagttatttgtgtaagtagagtatccggagaaggaaaagaacttacgacctttctttataacagaaactcaactctaaattcaacaagatgtgcaaaccggacatgcaggtgaatattttaataggttactataaggttctcaattaaattctttaatctgtccagtcccagtttctcttattaataaaactttggaaattgctttaaaccatttaaaggaaatttctagatatagaaactaaggactgtgactatacagctgtcactcatttgtagtaaaacttaaaaagcaaaaacaaaaaacaaaaaagaccttcctgtgatactttatttccgaactaataaaaatctatatgactttttattattgtgtgataaccaagtaaatgttttctattttgcatattttcaggcatggtaacagaaatttaccttttaataaattaaaaaatctaaattttaacctacttgtatgttcggagagtgtttttgtactatattgactacttaaaatagagaatgagactaagaagggaacatttctgttgatacatgttttttaaaagtaattttaagagcattattaggttaattaatccaattaatgacccaaatgccaaggtaattttaaatttacatttttaataaaagcaacatgttgaaacaagagagggtgagattaacctttttgctaaagtaatttacaagtcaaagacaggaagagatcagagtgaatgtgccttcttaaccagagctacagaatttagtgaataattaaagtacaaactgctttgacctccttgaacttttccaagcaatttctctgtacttctatatatgaatgtcttagccaattttctgctactataacagaatacgacagactgggtaatttaaaaagaaaagaaatttattttcttcctagttctggaggctgggaaggcgaagggcatggcactgacatctgccttgtaactgatgagaaccttcttactgcatgataacaaagcagcaaggcaagcaaaagcgtaagatgaagagagaggaaatgaagccaaacacatcctttcatcagaagcccattccctctataaggcgttattacatttatgagaatggagtcctcatgacctaatcgtgaccttaaaggcccctcccaacactgttacaatggcaattaaatttcaacaaaggttccagaggtgacattcgaatcagcaatgaaattttcatagttaaatttggtattcgtgggggaagaaatgaccatttcccttgtatttttataattaaatcagcaaaatattgtaataaagaaatctttcctgtgaagataccatgacccc

SEQ ID NO: 12571 - DNA, 244 bp, Homo sapiens
  source 1..244: mol_type = unassigned DNA
gcagttgtctttggtagtttttttgcactaacttcaggaaccagctcatgatctcaggatgtatggaaaaataatctttgtattactattgtcagaaattgtgagcatatcagcattaagtaccactgaggtggcaatgcacacttcaacttcttcttcagtcacaaagagttacatctcatcacagacaaatggagaaagggtacaacttgcccatcatttctctgaaccagactttcataat

SEQ ID NO: 12572 - DNA, 357 bp, Homo sapiens
  source 1..357: mol_type = unassigned DNA
atgtatggaaaaataatctttgtattactattgtcagaaattgtgagcatatcagcattaagtaccactgaggtggcaatgcacacttcaacttcttcttcagtcacaaagagttacatctcatcacagacaaatggagaaagggtacaacttgcccatcatttctctgaaccagagataacactcattatttttggggtgatggctggtgttattggaacgatcctcttaatttcttacggtattcgccgactgataaagaaaagcccatctgatgtaaaacctctcccctcacctgacacagacgtgcctttaagttctgttgaaatagaaaatccagagacaagtgatcaatga

SEQ ID NO: 12573 - DNA, 441 bp, Homo sapiens
  source 1..441: mol_type = unassigned DNA
atgtatggaaaaataatctttgtattactattgtcagaaattgtgagcatatcagcattaagtaccactgaggtggcaatgcacacttcaacttcttcttcagtcacaaagagttacatctcatcacagacaaatgatacgcacaaacgggacacatatgcagccactcctagagctcatgaagtttcagaaatttctgttagaactgtttaccctccagaagaggaaaccgagataacactcattatttttggggtgatggctggtgttattggaacgatcctcttaatttcttacggtattcgccgactgataaagaaaagcccatctgatgtaaaacctctcccctcacctgacacagacgtgcctttaagttctgttgaaatagaaaatccagagacaagtgatcaatgagaatctgttcaccaaaccaaatgtgga

SEQ ID NO: 12574 - DNA, 258 bp, Homo sapiens
  source 1..258: mol_type = unassigned DNA
atgtatggaaaaataatctttgtattactattgtcaggagaaagggtacaacttgcccatcatttctctgaaccagagataacactcattatttttggggtgatggctggtgttattggaacgatcctcttaatttcttacggtattcgccgactgataaagaaaagcccatctgatgtaaaacctctcccctcacctgacacagacgtgcctttaagttctgttgaaatagaaaatccagagacaagtgatcaatga

SEQ ID NO: 12575 - DNA, 622 bp, Homo sapiens
  source 1..622: mol_type = unassigned DNA
tttgcactaacttcaggaaccagctcatgatctcaggatgtatggaaaaataatctttgtattactattgtcaggagacggagccaaccctgaaaattctgggaaaagaggacagaaggcagagggaagagcaagagcaaaaattctgaaacagcagaaattgtgagcatatcagcattaagtaccactgaggtggcaatgcacacttcaacttcttcttcagtcacaaagagttacatctcatcacagacaaatgatacgcacaaacgggacacatatgcagccactcctagagctcatgaagtttcagaaatttctgttagaactgtttaccctccagaagaggaaaccggagaaagggtacaacttgcccatcatttctctgaaccagagataacactcattatttttggggtgatggctggtgttattggaacgatcctcttaatttcttacggtattcgccgactgataaagaaaagcccatctgatgtaaaacctctcccctcacctgacacagacgtgcctttaagttctgttgaaatagaaaatccagagacaagtgatcaatgagaatctgttcaccaaaccaaatgtggaaagaacacaaagaagacataag

SEQ ID NO: 12576 - DNA, 527 bp, Homo sapiens
  source 1..527: mol_type = unassigned DNA
agttgtctttggtagtttttttgcactaacttcaggaaccagctcatgatctcaggatgtatggaaaaataatctttgtattactattgtcagaaattgtgagcatatcagcattaagtaccactgaggtggcaatgcacacttcaacctcttcttcagtcacaaagagttacatctcatcacagacaaatggagaaacgggacaacttgtccatcgtttcactgtaccagctcctgtagtgataatactcattattttgtgtgtgatggctggtattattggaacgatcctcttaatttcttacagtattcgccgactgataaaggcatgaggatgtggcctgcatgctgcctgatcttgcctagaaccggctgcacctgctgttctcttgtttatgcaaactggctgcacctgctattcctttgcttatgcccctacccctggctatcctaattccctgttctcctgcctcactattactgtattctctacttctaaataaaaataaaacaaaatacaaaccgtt

SEQ ID NO: 12577 - DNA, 521 bp, Homo sapiens
  source 1..521: mol_type = unassigned DNA
gtctttggtagtttttttgcactaacttcaggaaccagctcatgatctcaggatgtatggaaaaataatctttgtattactattgtcagaaattgtgagcatatcagcattaagtaccactgaggtggcaatgcacacttcaacctcttcttcagtcacaaagagttacatctcatcacagacaaatggagaaacgggacaacttgtccatcgtttcactgtaccagctcctgtagtgataatactcattattttgtgtgtgatggctggtattattggaacgatcctcttaatttcttacagtattcgccgactgataaaggcatgaggatgtggcctgcatgctgcctgatcttgcctagaaccggctgcacctgctgttctcttgtttatgcaaactggctgcacctgctattcctttgcttatgcccctacccctggctatcctaattccctgttctcctgcctcactattactgtattctctacttctaaataaaaataaaacaaaatacaaaccg

SEQ ID NO: 12578 - DNA, 360 bp, Homo sapiens
  source 1..360: mol_type = unassigned DNA
tttgcactaacttcaggaaccagctcatgatctcaggatgtatggaaaaataatctttgtattactattgtcaggagaaacgggacaacttgtccatcgtttcactgtaccagctcctgtagtgataatactcattattttgtgtgtgatggctggtattattggaacgatcctcttaatttcttacagtattcgccgactgataaaggcatgaggatgtggcctgcatgctgcctgatcttgcctagaaccggctgcacctgctgttctcttgtttatgcaaactggctgcacctgctattcctttgcttatgcccctacccctggctatcctaattccctgttctcctgcctcactat

SEQ ID NO: 12579 - DNA, 1246 bp, Homo sapiens
  source 1..1246: mol_type = unassigned DNA
agtggcagatggaaagagaaacggttagaaaagcgtggttcttgcgcaggaaagttggagcaaagaagagttcagaagtgggcgggtgtgtgtttaaaaaaaaaaaagggggtggaaaccccaccagccaagtctgcagaaaaaaaataaatgaagtctgcctatctccgggccagagcccctcccctcggcccgcgcgggaggagtgtgacccaggtgccgcttcctctcgccgccgagggtcaggagcccgggagcgcgaccctcccccggcccggcctggcccggcctggccagtccccgcggtctctgcccgggctgacgcccaggaatgtggtcgacgagaagccccaacagcacggcgtggcctctcagcctcgagcctgatccggggatggcctctgcctccaccacaatgcatactaccaccattgcagagcctgatccagggatgtctggatggccggatggcagaatggagacctccacccccaccataatggacattgtcgtcattgcaggtgtgattgctgctgtggccatcgtcctagtctccctcctcttcgtcatgctgcgctacatgtaccggcacaagggcacgtaccacaccaatgaggccaagggcacggagtttgctgagagtgcagatgcagccctgcagggagaccctgccctccaagatgctggtgatagcagcagaaaggagtactttatttgagggacaacagacttcacttccctgaatgcctcccccatctccatcaggaaaaatacaccccatcgcccagcacccctgctgataccaccagacagagagagagagcacttgattcttcccgagatagccacctggaaacactaggtgcctgcccagggaggaacggaggaggactcgcgctacaagaggccactcccagggacccagggaggcgatggccaccccagaggccaccttttgctccacggaggtgggagaaaatctgggcacatggggccccctgggcagtgcaggacaacatcagctcactggcaggaaagtccttgttgagggtgagggggtgctggggtacccgggggctggggaagcaaggaaataagtcatctgtatgctgactggggataatggcatcaaatgtcagtccttgacatttggggggaacagcaggtgccagagctaaaaggtacctttgtctgccattgatccagctcagaacgattggaaataaatttgaaatgtaaccgagca

SEQ ID NO: 12580 - DNA, 1072 bp, Homo sapiens
  source 1..1072: mol_type = unassigned DNA
ggccagagcccctcccctcggcccgcgcgggaggagtgtgacccaggtgccgcttcctctcgccgccgagggtcaggagcccgggagcgcgaccctcccccggcccggcctggcccggcctggccagtccccgcggtctctgcccgggctgacgcccaggaatgtggtcgacgagaagccccaacagcacggcgtggcctctcagcctcgagcctgatccggggatggcctctgcctccaccacaatgcatactaccaccattgcagagcctgatccagggatgtctggatggccggatggcagaatggagacctccacccccaccataatggacattgtcgtcattgcaggtgtgattgctgctgtggccatcgtcctagtctccctcctcttcgtcatgctgcgctacatgtaccggcacaagggcacgtaccacaccaatgaggccaagggcacggagtttgctgagagtgcagatgcagccctgcagggagaccctgccctccaagatgctggtgatagcagcagaaaggagtactttatttgagggacaacagacttcacttccctgaatgcctcccccatctccatcaggaaaaatacaccccatcgcccagcacccctgctgataccaccagacagagagagagagcacttgattcttcccgagatagccacctggaaacactaggtgcctgcccagggaggaacggaggaggactcgcgctacaagaggccactcccagggacccagggaggcgatggccaccccagaggccaccttttgctccacggaggtgggagaaaatctgggcacatggggccccctgggcagtgcaggacaacatcagctcactggcaggaaagtccttgttgagggtgagggggtgctggggtacccgggggctggggaagcaaggaaataagtcatctgtatgctgactggggataatggcatcaaatgtcagtccttgacatttggggggaacagcaggtgccagagctaaaaggtacctttgtctgccattgatccagctcagaacgattggaaataaatttgaaatgtaaccg

SEQ ID NO: 12581 - DNA, 932 bp, Homo sapiens
  source 1..932: mol_type = unassigned DNA
cgggagcgcgaccctcccccggcccggcctggcccggcctggccagtccccgcggtctctgcccgggctgacgcccaggaatgtggtcgacgagaagccccaacagcacggcgtggcctctcagcctcgagcctgatccagggatgtctggatggccggatggcagaatggagacctccacccccaccataatggacattgtcgtcattgcaggtgtgattgctgctgtggccatcgtcctagtctccctcctcttcgtcatgctgcgctacatgtaccggcacaagggcacgtaccacaccaatgaggccaagggcacggagtttgctgagagtgcagatgcagccctgcagggagaccctgccctccaagatgctggtgatagcagcagaaaggagtactttatttgagggacaacagacttcacttccctgaatgcctcccccatctccatcaggaaaaatacaccccatcgcccagcacccctgctgataccaccagacagagagagagagcacttgattcttcccgagatagccacctggaaacactaggtgcctgcccagggaggaacggaggaggactcgcgctacaagaggccactcccagggacccagggaggcgatggccaccccagaggccaccttttgctccacggaggtgggagaaaatctgggcacatggggccccctgggcagtgcaggacaacatcagctcactggcaggaaagtccttgttgagggtgagggggtgctggggtacccgggggctggggaagcaaggaaataagtcatctgtatgctgactggggataatggcatcaaatgtcagtccttgacatttggggggaacagcaggtgccagagctaaaaggtacctttgtctgccattgatccagctcagaacgattggaaataaatttgaaatgtaac

SEQ ID NO: 12582 - DNA, 1684 bp, Homo sapiens
  source 1..1684: mol_type = unassigned DNA
gtctttggtagtttttttgcactaacttcaggagccagctcgtgatctcaggatgtatggaaaaataatctttgtattactattgtcaggaattgtgagcatatcagcatcaagtaccactggtgtggcaatgcacacttcaacctcttcttcagtcacaaagagttacatctcatcacagacaaatgggataacactcattaattggtgggcgatggctcgtgttatttttgaggtgatgcttgttgttgttggaatgatcatcttaatttcttactgtattcgatgactgataaaggttttcatgcctctgggattgagattagaggaagaaagcaaagaaaggacatttttttacttcactgttcatggtgtaattgtgtgcctgacggctgtagctactaacttggcttacgttgactggctactaagggactctaggagtcagaaactaaatgctgagtctctcaaaggcgtagagagaatttcagagggccttaccatgacatgaggattaaactccagttctgcccgattctcatcacgaaatccttatcccatgcctcattgtgtttggtgtccccttgcctaggggacagtcctcctgggtaagatcagcaagataactcttcagtcacattccatttgatactttgaatactctgaggtccttacccaccaaatggatggaattcagctgctcaatcactgcctttctcagaactcggttgtccaaccacaattccctttcccttaggatagggctatattggcaaaatgccgcccgaacagactgctgacagtaaaccaaatattagtttctctcaccttcttgaaggcatttacagtctttgtaagcttttctcctagattttccctttcctgttcctgcttagattctaagaatgaagtgcatccttctccttttcttcattaggtgaagtgggatttacccattaccatatattcaccaccaggtcactgacgagagactccagtgaatcgctttccctctgcattcctctccttgtacagactagagggtcacattgtgtaaagcctaacatagccctgcaaagagatctggccccagcagtgaacacaaactcagtaattctctttagagtgaggtggtaatcagtgcctcttggtttcagccgtggtcctagtggctacttatggaagaataggaatagttccacaacatcctgtaacattggcttacctgtatattatatgccacccgtaaccataaaaacaccaggatttaggttccttgaaggtaatgactatgggtccctctctgtggaagaatactgaatagaagagagaaatcactcaatatgtggaatgactgatatggtttggctgtgttcccactcaaatctcatcttgaattgtagttccaataatccccacatgtcatgggaggaacccagtgggaggtacttgaatcattgcggtggtttcccctgtgctattctcatgatagtgagtaaattctcacataatctgatagttttataaaggagcttcccccttcactcagctctcattcttctccttcctgccactatgtaagaaagatgtgtttgtttcccctttggtcatgattgtaagtatcctgagaccttcccagccatgcaaaactgtagatcaataaaacctctttcctttataaatt

SEQ ID NO: 12583 - DNA, 221 bp, Homo sapiens
  source 1..221: mol_type = unassigned DNA
agttgtctttggtagtttttttgcactaacttcaggagccagctcgtgatctcaggatgtatggaaaaataatctttgtattactattgtcaggaattgtgagcatatcagcatcaagtaccactggtgtggcaatgcacacttcaacctcttcttcagtcacaaagagttacatctcatcacagacaaatggagaaaggggacaacttgtccatcgtttc

SEQ ID NO: 12584 - DNA, 499 bp, Homo sapiens
  source 1..499: mol_type = unassigned DNA
agttgtctttggtagtttttttgcactaacttcaggagccagctcgtgatctcaggatgtatggaaaaataatctttgtattactattgtcaggaattgtgagcatatcagcatcaagtaccactggtgtggcaatgcacacttcaacctcttcttcagtcacaaagagttacatctcatcacagacaaatgggataacactcattaattggtgggcgatggctcgtgttatttttgaggtgatgcttgttgttgttggaatgatcatcttaatttcttactgtattcgatgactgataaaggcatgaggatgtggcctgcatgctgcctgatcttgcctagaaccagctgcacctgctgttctcttgcttatgcaaactggctgcacctgctattcctttgcttatgccccaacccttggctatcctaactccctgttctcctgcctattactgtattctctacttctaaataaaaataaaacaaaatacaaattatt

SEQ ID NO: 12585 - DNA, 1624 bp, Homo sapiens
  source 1..1624: mol_type = unassigned DNA
cgtgatctcaggatgtatggaaaaataatctttgtattactattgtcaggaattgtgagcatatcagcatcaagtaccactggtgtggcaatgcacacttcaacctcttcttcagtcacaaagagttacatctcatcacagacaaatggttgtgttattggtaacataatttgctctgacaaaagcaaataaaggaaattttagacctttattattcaactggataaaactgaaggttcagaagtgattgcaaatattgccaaccaggttttcatgcctctgggattgagattagaggaagaaagcaaagaaaggacatttttttacttcactgttcatggtgtaattgtgtgcctgacggctgtagctactaacttggcttacgttgactggctactaagggactctaggagtcagaaactaaatgctgagtctctcaaaggcgtagagagaatttcagagggccttaccatgacatgaggattaaactccagttctgcccgattctcatcacgaaatccttatcccatgcctcattgtgtttggtgtccccttgcctaggggacagtcctcctgggtaagatcagcaagataactcttcagtcacattccatttgatactttgaatactctgaggtccttacccaccaaatggatggaattcagctgctcaatcactgcctttctcagaactcggttgtccaaccacaattccctttcccttaggatagggctatattggcaaaatgccgcccgaacagactgctgacagtaaaccaaatattagtttctctcaccttcttgaaggcatttacagtctttgtaagcttttctcctagattttccctttcctgttcctgcttagattctaagaatgaagtgcatccttctccttttcttcattaggtgaagtgggatttacccattaccatatattcaccaccaggtcactgacgagagactccagtgaatcgctttccctctgcattcctctccttgtacagactagagggtcacattgtgtaaagcctaacatagccctgcaaagagatctggccccagcagtgaacacaaactcagtaattctctttagagtgaggtggtaatcagtgcctcttggtttcagccgtggtcctagtggctacttatggaagaataggaatagttccacaacatcctgtaacattggcttacctgtatattatatgccacccgtaaccataaaaacaccaggatttaggttccttgaaggtaatgactatgggtccctctctgtggaagaatactgaatagaagagagaaatcactcaatatgtggaatgactgatatggtttggctgtgttcccactcaaatctcatcttgaattgtagttccaataatccccacatgtcatgggaggaacccagtgggaggtacttgaatcattgcggtggtttcccctgtgctattctcatgatagtgagtaaattctcacataatctgatagttttataaaggagcttcccccttcactcagctctcattcttctccttcctgccactatgtaagaaagatgtgtttgtttcccctttggtcatgattgtaagtatcctgagaccttcccagccatgcaaaactgtag

SEQ ID NO: 12586 - DNA, 3402 bp, Homo sapiens
  source 1..3402: mol_type = unassigned DNA
gcaccaattgaggagagacacatgggtgggaaattgcaataaaaagacggcccacagcaggctgcattcccatggctggccagaggaggaacgctttgtgttctcatcggagctgcatgggaagtctgcatacagcaaagtgacctgcatgcctcaccttatggaaaggatggtgggctctggcctcctgtggctggccttggtctcctgcattctgacccaggcatctgcagtgcagcgaggttatggaaaccccattgaagccagttcgtatgggctggacctggactgcggagctcctggcaccccagaggctcatgtctgttttgacccctgtcagaattacaccctcctggatgaacccttccgaagcacagagaactcagcagggtcccaggggtgcgataaaaacatgagcggctggtaccgctttgtaggggaaggaggagtaaggatgtcggagacctgtgtccaggtgcaccgatgccagacagacgctcccatgtggctgaatgggacccaccctgcccttggggatggcatcaccaaccacactgcctgtgcccattggagtggcaactgctgtttctggaaaacagaggtgctggtgaaggcctgcccaggcgggtaccatgtgtaccggttggaaggcactccctggtgtaatctgagatactgcacagacccatccactgtggaggacaagtgtgagaaggcctgccgccccgaggaggagtgccttgccctcaacagcacctggggctgtttctgcagacaggacctcaatagttctgatgtccacagtttgcagcctcagctagactgtgggcccagggagatcaaggtgaaggtggacaaatgtttgctgggaggcctgggtttgggggaggaggtcattgcctacctgcgagacccaaactgcagcagcatcttgcagacagaggagaggaactgggtatctgtgaccagccccgtccaggctagtgcctgcaggaacattctggagagaaatcaaacccatgccatctacaaaaacaccctctccttggtcaatgatttcatcatcagagacaccatcctcaacatcaacttccaatgtgcctacccactggacatgaaagtcagcctccaagctgccttgcagcccattgtaagttccctgaacgtcagtgtggacgggaatggagagttcattgtcaggatggccctcttccaagaccagaactacacgaatccttacgaaggggatgcagttgaactgtctgttgagtccgtgctgtatgtgggtgccatcttggaacaaggggacacctcccggtttaacctggtgttgaggaactgctatgccacccccactgaagacaaggctgaccttgtgaagtatttcatcatcagaaacagctgctcaaatcaacgtgattccaccatccacgtggaggagaatgggcagtcctcggaaagccggttctcagttcagatgttcatgtttgctggacattatgacctagttttcctgcattgtgagattcatctctgtgattctcttaatgaacagtgccagccttcttgctcaagaagtcaagtccgcagtgaagtaccggccatcgacctagcccgggttctagatttggggcccatcactcggagaggtgcacagtctcccggtgtcatgaatggaacccctagcactgcagggttcctggtggcctggcctatggtcctcctgactgtcctcctggcttggctgttctgagagctccgctgagcatctggccttgaagtttgtgttcttccctctggcaatggctcccttcagcacttctgctttccactccaattcacacaggcttggtattaatagaatcaaggccaagctaggttaggaaaagggaagagctttcaccttctttaaaactctcggctgggcgcagtggctcatgcctgtaatcccagcattttgggaggctgaggcaggtggatcacctgaggtcagcagttcaaaatcagcctggccaaaatgctgaaactccgtctctactaaaaatacaaaaattagccaggcatggtggcaggcgcctgtaatcccagctactcgggaggccaaggcaggagaattgctcgaactcagggggtggaggttgcagtgagttgagattgtgccattgcactccagcctgggcaacagagcaagactctgtctcaggaaaaaaaaaaaaaaaaaagaaaagcaacatagtggggtttctgtcaatctgtcctcggctgcccttctcatttgttgatgggaccttgaaagcaagcttgctaggtgccctctgtggctccagcctttaccggaagtgtggtgcatgtttttaacttcagggaagcggtatcctgtcactggggtatgggatgagcatggagaagaggcaccagccacgattccttcctaagcatctcctgttctgactgctcatgaattgaagaaactgacccttgtgttcactctgcttcctctgattgtttctatcatggtttccaaaaattgccatgggaacatgtcaaagggccacttttggagactctgctccaggaagaactagtccccatagctcccctatcccccaccataccacagacatgctgtgacttagagaactacacaaacatccttgggacctagatgctggaggaatgacttaatttgatgcagaaactccatcacccaagggagtacctctcactgtaaacagtgctgtgcttgctctgaaggattaagcaagaagtcccaacagaagcaatgcaccagtcctgctatgggaatgaaactgcaaagcctaggagatgggtgaagtccctttctggagacctttaatgagtacttcaaagcacccgacacagatgcagcaaatagggcatcacacatacacaggcattaatactcacgggcatatagatgctgacatgtgtacactgacttacgcccttcccacagctacagataaggcctcgcaaagttggcctcagagacacatcaggaaccaaggtggaccagcaggtgccgagcctgtgtatctgcttggaggagacgttccaatgtgctgccttgttcagagatggtgtagttgcaagaaacagaaacccaccacaatttctcaggcaaaaagggagttaattataaggacataagagcacaaagttccagtgcaagagatacatccaggctgcacaagctccgggagtggggcctggcaagccaaaagaaaccaaagtttgtcttgccttctgttcctctttctgaagccacatagccttttatgactgtgtatttttgcatcgcttttgttttctttttatgtctctgaagccagcttttcctgttcactcatcccttgattaaatatggacattctagcttca

SEQ ID NO: 12587 - DNA, 1980 bp, Homo sapiens
  source 1..1980: mol_type = unassigned DNA
attcccatggctggccagaggaggaacgctttgtgttctcatcggagctgcatgggaagtctgcatacagcaaagtgacctgcatgcctcaccttatggaaaggatggtgggctctggcctcctgtggctggccttggtctcctgcattctgacccaggcatctgcagtgcagcgagacccatccactgtggaggacaagtgtgagaaggcctgccgccccgaggaggagtgccttgccctcaacagcacctggggctgtttctgcagacaggacctcaatagttctgatgtccacagtttgcagcctcagctagactgtgggcccagggagatcaaggtgaaggtggacaaatgtttgctgggaggcctgggtttgggggaggaggtcattgcctacctgcgagacccaaactgcagcagcatcttgcagacagaggagaggaactgggtatctgtgaccagccccgtccaggctagtgcctgcaggaacattctggagagaaatcaaacccatgccatctacaaaaacaccctctccttggtcaatgatttcatcatcagagacaccatcctcaacatcaacttccaatgtgcctacccactggacatgaaagtcagcctccaagctgccttgcagcccattgtaagttccctgaacgtcagtgtggacgggaatggagagttcattgtcaggatggccctcttccaagaccagaactacacgaatccttacgaaggggatgcagttgaactgtctgttgagtccgtgctgtatgtgggtgccatcttggaacaaggggacacctcccggtttaacctggtgttgaggaactgctatgccacccccactgaagacaaggctgaccttgtgaagtatttcatcatcagaaacagctgctcaaatcaacgtgattccaccatccacgtggaggagaatgggcagtcctcggaaagccggttctcagttcagatgttcatgtttgctggacattatgacctagttttcctgcattgtgagattcatctctgtgattctcttaatgaacagtgccagccttcttgctcaagaagtcaagtccgcagtgaagtaccggccatcgacctagcccgggttctagatttggggcccatcactcggagaggtgcacagtctcccggtgtcatgaatggaacccctagcactgcagggttcctggtggcctggcctatggtcctcctgactgtcctcctggcttggctgttctgagagctccgctgagcatctggccttgaagtttgtgttcttccctctggcaatggctcccttcagcacttctgctttccactccaattcacacaggcttggtattaatagaatcaaggccaagctaggttaggaaaagggaagagctttcaccttctttaaaactctcggctgggcgcagtggctcatgcctgtaatcccagcattttgggaggctgaggcaggtggatcacctgaggtcagcagttcaaaatcagcctggccaaaatgctgaaactccgtctctactaaaaatacaaaaattagccaggcatggtggcaggcgcctgtaatcccagctactcgggaggccaaggcaggagaattgctcgaactcagggggtggaggttgcagtgagttgagattgtgccattgcactccagcctgggcaacagagcaagactctgtctcaggaaaaaaaaaaaaaaaaaagaaaagcaacatagtggggtttctgtcaatctgtcctcggctgcccttctcatttgttgatgggaccttgaaagcaagcttgctaggtgccctctgtggctccagcctttaccggaagtgtggtgcatgtttttaacttcagggaagcggtatcctgtcactggggtatgggatgagcatggagaagaggcaccagccacgattccttcctaagcatctcctgttctgactgctcatgaattgaagaaactgacccttgtgttc

SEQ ID NO: 12588 - DNA, 1989 bp, Homo sapiens
  source 1..1989: mol_type = unassigned DNA
attcccatggctggccagaggaggaacgctttgtgttctcatcggagctgcatgggaagtctgcatacagcaaagtgacctgcatgcctcaccttatggaaaggatggtgggctctggcctcctgtggctggccttggtctcctgcattctgacccaggcatctgcagtgcagcgagttccacgagacccatccactgtggaggacaagtgtgagaaggcctgccgccccgaggaggagtgccttgccctcaacagcacctggggctgtttctgcagacaggacctcaatagttctgatgtccacagtttgcagcctcagctagactgtgggcccagggagatcaaggtgaaggtggacaaatgtttgctgggaggcctgggtttgggggaggaggtcattgcctacctgcgagacccaaactgcagcagcatcttgcagacagaggagaggaactgggtatctgtgaccagccccgtccaggctagtgcctgcaggaacattctggagagaaatcaaacccatgccatctacaaaaacaccctctccttggtcaatgatttcatcatcagagacaccatcctcaacatcaacttccaatgtgcctacccactggacatgaaagtcagcctccaagctgccttgcagcccattgtaagttccctgaacgtcagtgtggacgggaatggagagttcattgtcaggatggccctcttccaagaccagaactacacgaatccttacgaaggggatgcagttgaactgtctgttgagtccgtgctgtatgtgggtgccatcttggaacaaggggacacctcccggtttaacctggtgttgaggaactgctatgccacccccactgaagacaaggctgaccttgtgaagtatttcatcatcagaaacagctgctcaaatcaacgtgattccaccatccacgtggaggagaatgggcagtcctcggaaagccggttctcagttcagatgttcatgtttgctggacattatgacctagttttcctgcattgtgagattcatctctgtgattctcttaatgaacagtgccagccttcttgctcaagaagtcaagtccgcagtgaagtaccggccatcgacctagcccgggttctagatttggggcccatcactcggagaggtgcacagtctcccggtgtcatgaatggaacccctagcactgcagggttcctggtggcctggcctatggtcctcctgactgtcctcctggcttggctgttctgagagctccgctgagcatctggccttgaagtttgtgttcttccctctggcaatggctcccttcagcacttctgctttccactccaattcacacaggcttggtattaatagaatcaaggccaagctaggttaggaaaagggaagagctttcaccttctttaaaactctcggctgggcgcagtggctcatgcctgtaatcccagcattttgggaggctgaggcaggtggatcacctgaggtcagcagttcaaaatcagcctggccaaaatgctgaaactccgtctctactaaaaatacaaaaattagccaggcatggtggcaggcgcctgtaatcccagctactcgggaggccaaggcaggagaattgctcgaactcagggggtggaggttgcagtgagttgagattgtgccattgcactccagcctgggcaacagagcaagactctgtctcaggaaaaaaaaaaaaaaaaaagaaaagcaacatagtggggtttctgtcaatctgtcctcggctgcccttctcatttgttgatgggaccttgaaagcaagcttgctaggtgccctctgtggctccagcctttaccggaagtgtggtgcatgtttttaacttcagggaagcggtatcctgtcactggggtatgggatgagcatggagaagaggcaccagccacgattccttcctaagcatctcctgttctgactgctcatgaattgaagaaactgacccttgtgttc

SEQ ID NO: 12589 - DNA, 3412 bp, Homo sapiens
  source 1..3412: mol_type = unassigned DNA
gtgcaccaattgaggagagacacatgggtgggaaattgcaataaaaagacggcccacagcaggctgcattcccatggctggccagaggaggaacgctttgtgttctcatcggagctgcatgggaagtctgcatacagcaaagtgacctgcatgcctcaccttatggaaaggatggtgggctctggcctcctgtggctggccttggtctcctgcattctgacccaggcatctgcagtgcagcgaggttatggaaaccccattgaagccagttcgtatgggctggacctggactgcggagctcctggcaccccagaggctcatgtctgttttgacccctgtcagaattacaccctcctggatgaacccttccgaagcacagagaactcagcagggtcccaggggtgcgataaaaacatgagcggctggtaccgctttgtaggggaaggaggagtaaggatgtcggagacctgtgtccaggtgcaccgatgccagacagacgctcccatgtggctgaatgggacccaccctgcccttggggatggcatcaccaaccacactgcctgtgcccattggagtggcaactgctgtttctggaaaacagaggtgctggtgaaggcctgcccaggcgggtaccatgtgtaccggttggaaggcactccctggtgtaatctgagatactgcacagttccacgagacccatccactgtggaggacaagtgtgagaaggcctgccgccccgaggaggagtgccttgccctcaacagcacctggggctgtttctgcagacaggacctcaatagttctgatgtccacagtttgcagcctcagctagactgtgggcccagggagatcaaggtgaaggtggacaaatgtttgctgggaggcctgggtttgggggaggaggtcattgcctacctgcgagacccaaactgcagcagcatcttgcagacagaggagaggaactgggtatctgtgaccagccccgtccaggctagtgcctgcaggaacattctggagagaaatcaaacccatgccatctacaaaaacaccctctccttggtcaatgatttcatcatcagagacaccatcctcaacatcaacttccaatgtgcctacccactggacatgaaagtcagcctccaagctgccttgcagcccattgtaagttccctgaacgtcagtgtggacgggaatggagagttcattgtcaggatggccctcttccaagaccagaactacacgaatccttacgaaggggatgcagttgaactgtctgttgagtccgtgctgtatgtgggtgccatcttggaacaaggggacacctcccggtttaacctggtgttgaggaactgctatgccacccccactgaagacaaggctgaccttgtgaagtatttcatcatcagaaacagctgctcaaatcaacgtgattccaccatccacgtggaggagaatgggcagtcctcggaaagccggttctcagttcagatgttcatgtttgctggacattatgacctagttttcctgcattgtgagattcatctctgtgattctcttaatgaacagtgccagccttcttgctcaagaagtcaagtccgcagtgaagtaccggccatcgacctagcccgggttctagatttggggcccatcactcggagaggtgcacagtctcccggtgtcatgaatggaacccctagcactgcagggttcctggtggcctggcctatggtcctcctgactgtcctcctggcttggctgttctgagagctccgctgagcatctggccttgaagtttgtgttcttccctctggcaatggctcccttcagcacttctgctttccactccaattcacacaggcttggtattaatagaatcaaggccaagctaggttaggaaaagggaagagctttcaccttctttaaaactctcggctgggcgcagtggctcatgcctgtaatcccagcattttgggaggctgaggcaggtggatcacctgaggtcagcagttcaaaatcagcctggccaaaatgctgaaactccgtctctactaaaaatacaaaaattagccaggcatggtggcaggcgcctgtaatcccagctactcgggaggccaaggcaggagaattgctcgaactcagggggtggaggttgcagtgagttgagattgtgccattgcactccagcctgggcaacagagcaagactctgtctcaggaaaaaaaaaaaaaaaaaagaaaagcaacatagtggggtttctgtcaatctgtcctcggctgcccttctcatttgttgatgggaccttgaaagcaagcttgctaggtgccctctgtggctccagcctttaccggaagtgtggtgcatgtttttaacttcagggaagcggtatcctgtcactggggtatgggatgagcatggagaagaggcaccagccacgattccttcctaagcatctcctgttctgactgctcatgaattgaagaaactgacccttgtgttcactctgcttcctctgattgtttctatcatggtttccaaaaattgccatgggaacatgtcaaagggccacttttggagactctgctccaggaagaactagtccccatagctcccctatcccccaccataccacagacatgctgtgacttagagaactacacaaacatccttgggacctagatgctggaggaatgacttaatttgatgcagaaactccatcacccaagggagtacctctcactgtaaacagtgctgtgcttgctctgaaggattaagcaagaagtcccaacagaagcaatgcaccagtcctgctatgggaatgaaactgcaaagcctaggagatgggtgaagtccctttctggagacctttaatgagtacttcaaagcacccgacacagatgcagcaaatagggcatcacacatacacaggcattaatactcacgggcatatagatgctgacatgtgtacactgacttacgcccttcccacagctacagataaggcctcgcaaagttggcctcagagacacatcaggaaccaaggtggaccagcaggtgccgagcctgtgtatctgcttggaggagacgttccaatgtgctgccttgttcagagatggtgtagttgcaagaaacagaaacccaccacaatttctcaggcaaaaagggagttaattataaggacataagagcacaaagttccagtgcaagagatacatccaggctgcacaagctccgggagtggggcctggcaagccaaaagaaaccaaagtttgtcttgccttctgttcctctttctgaagccacatagccttttatgactgtgtatttttgcatcgcttttgttttctttttatgtctctgaagccagcttttcctgttcactcatcccttgattaaatatggacattctagcttc

SEQ ID NO: 12590 - DNA, 1925 bp, Homo sapiens
  source 1..1925: mol_type = unassigned DNA
attatgaagattaaatgtgagaagtcaagaacgcaaagcagtgcccagcatgttcagcattcagcacacagcactattgtttgtaggaagcattcgcacaatgctgagacagctggaagggttgacattgtgaggggagggcccttctttcaccatcctttgcgtaaatggcttatctcacctccactcaacaagcccagtgtatggcctagaactcccatcatacctgtgcaccaattgaggagagacacatgggtgggaaattgcaataaaaagacggcccacagcaggctgcattcccatggctggccagaggaggaacgctttgtgttctcatcggagctgcatgggaagtctgcatacagcaaagtgacctgcatgcctcaccttatggaaaggatggtgggctctggcctcctgtggctggccttggtctcctgcattctgacccaggcatctgcagtgcagcgagatcacctagacccatccactgtggaggacaagtgtgagaaggcctgccgccccgaggaggagtgccttgccctcaacagcacctggggctgtttctgcagacaggacctcaatagttctgatgtccacagtttgcagcctcagctagactgtgggcccagggagatcaaggtgaaggtggacaaatgtttgctgggaggcctgggtttgggggaggaggtcattgcctacctgcgagacccaaactgcagcagcatcttgcagacagaggagaggaactgggtatctgtgaccagccccgtccaggctagtgcctgcaggaacattctggagagaaatcaaacccatgccatctacaaaaacaccctctccttggtcaatgatttcatcatcagagacaccatcctcaacatcaacttccaatgtgcctacccactggacatgaaagtcagcctccaagctgccttgcagcccattgtaagttccctgaacgtcagtgtggacgggaatggagagttcattgtcaggatggccctcttccaagaccagaactacacgaatccttacgaaggggatgcagttgaactgtctgttgagtccgtgctgtatgtgggtgccatcttggaacaaggggacacctcccggtttaacctggtgttgaggaactgctatgccacccccactgaagacaaggctgaccttgtgaagtatttcatcatcagaaacagctgctcaaatcaacgtgattccaccatccacgtggaggagaatgggcagtcctcggaaagccggttctcagttcagatgttcatgtttgctggacattatgacctagttttcctgcattgtgagattcatctctgtgattctcttaatgaacagtgccagccttcttgctcaagaagtcaagtccgcagtgaagtaccggccatcgacctagcccgggttctagatttggggcccatcactcggagaggtgcacagtctcccggtgtcatgaatggaacccctagcactgcagggttcctggtggcctggcctatggtcctcctgactgtcctcctggcttggctgttctgagagctccgctgagcatctggccttgaagtttgtgttcttccctctggcaatggctcccttcagcacttctgctttccactccaattcacacaggcttggtattaatagaatcaaggccaagctaggttaggaaaagggaagagctttcaccttctttaaaactctcggctgggcgcagtggctcatgcctgtaatcccagcattttgggaggctgaggcaggtggatcacctgaggtcagcagttcaaaatcagcctggccaaaatgctgaaactccgtctctactaaaaatacaaaaattagccaggcatggtggcaggcgcctgtaatcccagctactcgggaggccaaggcaggagaattgctcgaactca

SEQ ID NO: 12591 - DNA, 2501 bp, Homo sapiens
  source 1..2501: mol_type = unassigned DNA
gagagaaggacggagtcgagtggcaccctagaagacgctctgtgccttcggaggtctttctgcctgcctgtcctcatgcctctcctcctcttgctgctcctgctgccaagccccttacacccccaccccatctgtgaggtctccaaagtggccagccacctagaagtgaactgtgacaagaggaatctgacagcgctgcctccagacctgccgaaagacacaaccatcctccacctgagtgagaacctcctgtacaccttctccctggcaaccctgatgccttacactcgcctcactcagctgaacctagataggtgcgagctcaccaagctccaggtcgatgggacgctgccagtgctggggaccctggatctatcccacaatcagctgcaaagcctgcccttgctagggcagacactgcctgctctcaccgtcctggacgtctccttcaaccggctgacctcgctgcctcttggtgccctgcgtggtcttggcgaactccaagagctctacctgaaaggcaatgagctgaagaccctgcccccagggctcctgacgcccacacccaagctggagaagctcagtctggctaacaacaacttgactgagctccccgctgggctcctgaatgggctggagaatctcgacacccttctcctccaagagaactcgctgtatacaataccaaagggcttttttgggtcccacctcctgccttttgcttttctccacgggaacccctggttatgcaactgtgagatcctctattttcgtcgctggctgcaggacaatgctgaaaatgtctacgtatggaagcaaggtgtggacgtcaaggccatgacctctaacgtggccagtgtgcagtgtgacaattcagacaagtttcccgtctacaaatacccaggaaaggggtgccccacccttggtgatgaaggtgacacagacctatatgattactacccagaagaggacactgagggcgataaggtgcgtgccacaaggactgtggtcaagttccccaccaaagcccatacaaccccctggggtctattctactcatggtccactgcttctctagacagccaaatgccctcctccttgcatccaacacaagaatccactaaggagcagaccacattcccacctagatggaccccaaatttcacacttcacatggaatccatcacattctccaaaactccaaaatccactactgaaccaaccccaagcccgaccacctcagagcccgtcccggagcccgccccaaacatgaccaccctggagcccactccaagcccgaccaccccagagcccacctcagagcccgcccccagcccgaccaccccggagcccacctcagagcccgcccccagcccgaccaccccagagcccacctcagagcccgcccccagcccgaccaccccggagcccaccccaatcccgaccatcgccacaagcccgaccatcctggtgtctgccacaagcctgatcactccaaaaagcacatttttaactaccacaaaacccgtatcactcttagaatccaccaaaaaaaccatccctgaacttgatcagccaccaaagctccgtggggtgctccaagggcatttggagagctccagaaatgacccttttctccaccccgacttttgctgcctcctccccctgggcttctatgtcttgggtctcttctggctgctctttgcctctgtggtcctcatcctgctgctgagctgggttgggcatgtgaaaccacaggccctggactctggccaaggtgctgctctgaccacagccacacaaaccacacacctggagctgcagaggggacggcaagtgacagtgccccgggcctggctgctcttccttcgaggttcgcttcccactttccgctccagcctcttcctgtgggtacggcctaatggccgtgtggggcctctagtggcaggaaggaggccctcagctctgagtcagggtcgtggtcaggacctgctgagcacagtgagcattaggtactctggccacagcctctgagggtgggaggtttggggaccttgagagaagagcctgtgggctctcctattggaatctagttgggggttggaggggtaaggaacacagggtgatagggaggggtcttagttcctttttctgtatcagaagccctgtcttcacaacacaggcacacaatttcagtcccagccaaagcagaaggggtaatgacatggacttggcggggggacaagacaaagctcccgatgctgcatggggcgctgccagatctcacggtgaaccattttggcagaatacagcatggttcccacatgcatctatgcacagaagaaaatctggaaagtgatttatcaggatgtgagcactcgttgtgtctggatgttacaaatatgggtggttttattttctttttccctgtttagcattttctagttttccactattattgtatattatctgtataataaaaaataattttagggttggga

SEQ ID NO: 12592 - DNA, 2339 bp, Homo sapiens
  source 1..2339: mol_type = unassigned DNA
gacgctctgtgccttcggaggtctttctgcctgcctgtcctcatgcctctcctcctcttgctgctcctgctgccaagccccttacacccccaccccatctgtgaggtctccaaagtggccagccacctagaagtgaactgtgacaagaggaatctgacagcgctgcctccagacctgccgaaagacacaaccatcctccacctgagtgagaacctcctgtacaccttctccctggcaaccctgatgccttacactcgcctcactcagctgaacctagataggtgcgagctcaccaagctccaggtcgatgggacgctgccagtgctggggaccctggatctatcccacaatcagctgcaaagcctgcccttgctagggcagacactgcctgctctcaccgtcctggacgtctccttcaaccggctgacctcgctgcctcttggtgccctgcgtggtcttggcgaactccaagagctctacctgaaaggcaatgagctgaagaccctgcccccagggctcctgacgcccacacccaagctggagaagctcagtctggctaacaacaacttgactgagctccccgctgggctcctgaatgggctggagaatctcgacacccttctcctccaagagaactcgctgtatacaataccaaagggcttttttgggtcccacctcctgccttttgcttttctccacgggaacccctggttatgcaactgtgagatcctctattttcgtcgctggctgcaggacaatgctgaaaatgtctacgtatggaagcaaggtgtggacgtcaaggccatgacctctaacgtggccagtgtgcagtgtgacaattcagacaagtttcccgtctacaaatacccaggaaaggggtgccccacccttggtgatgaaggtgacacagacctatatgattactacccagaagaggacactgagggcgataaggtgcgtgccacaaggactgtggtcaagttccccaccaaagcccatacaaccccctggggtctattctactcatggtccactgcttctctagacagccaaatgccctcctccttgcatccaacacaagaatccactaaggagcagaccacattcccacctagatggaccccaaatttcacacttcacatggaatccatcacattctccaaaactccaaaatccactactgaaccaaccccaagcccgaccacctcagagcccgtcccggagcccgccccaaacatgaccaccctggagcccactccaagcccgaccaccccagagcccacctcagagcccgcccccagcccgaccaccccggagcccaccccaatcccgaccatcgccacaagcccgaccatcctggtgtctgccacaagcctgatcactccaaaaagcacatttttaactaccacaaaacccgtatcactcttagaatccaccaaaaaaaccatccctgaacttgatcagccaccaaagctccgtggggtgctccaagggcatttggagagctccagaaatgacccttttctccaccccgacttttgctgcctcctccccctgggcttctatgtcttgggtctcttctggctgctctttgcctctgtggtcctcatcctgctgctgagctgggttgggcatgtgaaaccacaggccctggactctggccaaggtgctgctctgaccacagccacacaaaccacacacctggagctgcagaggggacggcaagtgacagtgccccgggcctggctgctcttccttcgaggttcgcttcccactttccgctccagcctcttcctgtgggtacggcctaatggccgtgtggggcctctagtggcaggaaggaggccctcagctctgagtcagggtcgtggtcaggacctgctgagcacagtgagcattaggtactctggccacagcctctgagggtgggaggtttggggaccttgagagaagagcctgtgggctctcctattggaatctagttgggggttggaggggtaaggaacacagggtgatagggaggggtcttagttcctttttctgtatcagaagccctgtcttcacaacacaggcacacaatttcagtcccagccaaagcagaaggggtaatgacatggacttggcggggggacaagacaaagctcccgatgctgcatggggcgctgccagatctcacggtgaaccattttggcagaatacagcatggttcccacatgcatctatgcacagaagaaaatctggaaagtgatttatcaggatgtgagcactcgttgtgtctggatgttacaaatatgggtggttttattttctttttccctgtttagcattttctagttttc

SEQ ID NO: 12593 - DNA, 1553 bp, Homo sapiens
  source 1..1553: mol_type = unassigned DNA
gtcttcccttatccccagacgcctagcgggcagggttgggctgaatcaaatgggagccctccagacataaggaggccagaggctgcaaggagcggggtcgtgaccgcttacaccccttctccacagcccggcccgacctggagggcccccggggcactgggcggtgagccacctcctggcaactctcggtgccgtcccctgccctcgctcgaggcctcttctccccagcaccgctgtggtgtgccgggatcctgagcctaggcctcccgatgttcccacccgcatgatcccttcccgccacacgatgctccgttttcttccgttgtgaatgccgcgtcctgtcctggtgacaggagaacaatgttggtgaacgtcgcagcgggtgtccgagtgctccgtgtgcccctgagagcgggtgggagcggaagcctgagcggcctgcggcctccggcgatagtgtgctatctgccgctgcagcgcgcgtccgcgcggcctctgggctatttctggccaggccgcagcactgtggtcggtgcgggcgtggcaggggcggggcggccttatcgctcggctctcccgcctacgcctcccgctgcagagtaagccgggctgccgtcttctcgccatgggctccgggccgcgcggggcgctgagcttactgctcctgctgctggccccgccgagccgcccggccgcaggttgcccggcgccctgtagctgcgcggggacgctcgtggactgcgggcgccgcgggctgacttgggcctcgctgccgaccgccttccctgtcgacacaaccgagctggtgctgaccggcaacaacctgacggcgctgccgccggggctgctggacgcgctgcccgcgctgcgcaccgcacacctgggcgccaacccctggcgctgcgactgccgccttgtgccgctgcgcgcctggctggccggccgccccgagcgtgcgccctaccgcgacctgcgttgcgtggcgcccccagcgctgcgcggccgcctgctgccctatctggccgaggacgagctgcgcgccgcttgcgctcccggcccgctctgctggggggcgctggcggcgcagcttgcgctgctgggccttgggctgctgcacgcgttgctgctggtgctgctgctgtgccgcctgcggaggctgcgggcccgggcccgcgctcgcgccgcagcccggctgtcgctgaccgacccgctggtggccgagcgagccggaaccgacgagtcctgaggagagaaccggtgcgtcctgaggagagaaccggcgctgggcaacacgggcctgcaaactcgacaggaccctgcccgaggggccctcgcgccaacctggaccggtccccgcctcctccgctgcccaatctctcagacccaccccacctgcaggcccagaccacgtgggacagaactcctgcccaccctaccccgagggaggcgaacccgcacttccaggcttgggaggaccatggggcacaatgcggtccagaccctgctgcgtctcccttccaaactctggtgctgaataaacccttctgatctgg

SEQ ID NO: 12594 - DNA, 1230 bp, Homo sapiens
  source 1..1230: mol_type = unassigned DNA
atgatcccttcccgccacacgatgctccgttttcttccggtgaatgccgcgtcctgtcctggtgacaggagaacaatgttggtgaacgtcgcagcgggtgtccgagtgctccgtgtgcccctgagagcgggtgggagcggaagcctgagcggcctgcggcctccggcgatagtgtgctatctgccgctgcagcgcgcgtccgcgtctgggctatttctggccaggccgcagcactgtggtcggtgcgggcgtggcaggggcggggcggccttatcgctcggctctcccgcctacgcctcccgctgcagagtaagccgggctgccgtcttctcgccatgggctccggtgagtctggagtccggtcgggcccccggctgctccctaggccgacccgggttgagaggagctctggtcgtttggctgcagctgggagagacttgggtcagacttagaggggacttccagccggcgtgcggggtggtcagggtggagaggctggcgggctaccgggacgccgggcatcaggggctggatggagccgggccggcagtctgggtactcagagatgtcgcccaggtgcccgccgaccgctcggcttactgcggcgcttcccttgcagggccgcgcggggcgctgagcttactgctcctgctgctggccccgccgagccgcccggccgcaggttgcccggcgccctgtagctgcgcggggacgctcgtggactgcgggcgccgcgggctgacttgggcctcgctgccgaccgccttccctgtcgacacaaccgagctggtgctgaccggcaacaacctgacggcgctgccgccggggctgctggacgcgctgcccgcgctgcgcaccgcacacctgggcgccaacccctggcgctgcgactgccgccttgtgccgctgcgcgcctggctggccggccgccccgagcgtgcgccctaccgcgacctgcgttgcgtggcgcccccagcgctgcgcggccgcctgctgccctatctggccgaggacgagctgcgcgccgcttgcgctcccggcccgctctgctggggggcgctggcggcgcagcttgcgctgctgggccttgggctgctgcacgcgttgctgctggtgctgctgctgtgccgcctgcggaggctgcgggcccgggcccgcgctcgcgccgcagcccggctgtcgctgaccgacccgctggtggccgagcgagccggaaccgacgagtcctga

SEQ ID NO: 12595 - DNA, 889 bp, Homo sapiens
  source 1..889: mol_type = unassigned DNA
cagctgtatcccatagagttgccacccaggcctcagccaggacctttcaggccagacaggagcacctgaccaaaggcttcacagccgccctcaccgcccggccttctacggtgtccagagacagttagccaggcctgggctgggcacactccaccttccctagtcaccagctggtttcccagaggagaaggctgagacccgagaagggagccagcctgtcccatgcctgcctggggagccctgttcctgctctgggccacagcagaggccaccaaggactgccccagcccatgtacctgccgcgccctggaaaccatggggctgtgggtggactgcaggggccacggactcacggccctgcctgccctgccggcccgcacccgccaccttctgctggccaacaacagccttcagtccgtgcccccgggagcctttgaccacctgccccagctgcagaccctcgatgtgacgcagaacccctggcactgtgactgcagcctcacctatctgcgcctctggctggaggaccgcacgcccgaggccctgctgcaggtccgctgtgccagccccagcctcgctgcccatggcccgctgggccggctgacaggctaccagctgggcagctgtggctggcagctgcaggcgtcctgggtgcgcccgggggtcttgtgggacgtggcgctggtcgccgtggccgcgctgggcctggctcttctggctggcctgctgtgtgccaccacagaggccctggattgagccaggcccccagaacccctggctccaggccagggggccagtccctgaggcaggtccccagactccaccaagcctggtcagcccaaaccaccagaagcccagaataaactggcagctcagctgttttatataa

SEQ ID NO: 12596 - DNA, 3275 bp, Homo sapiens
  source 1..3275: mol_type = unassigned DNA
agaagaaatgaggtggggagaaagagagagagagagagagatcgagattgagatcttaagaaagagagcaaggaggaagagcccggtggggagcaggtccttctcccccacccccctacccccaactcccactggagccgcattgagactgtaggcaccaccgggcgccgaatggctgttttctaactgggatcctcggtgacgtatggctgcctgccccttggcagctgtctttatggaccagtaggcagagcgaaattgacgctgacaagacttttgcatcttggaagggactgtaatctactgtagtgaagaacagagcctctcaatcagacgggtgtaaataagagacggaggggagtccaaaagaaaaggaagaggaggaaaaacaagtgtgtgttggggggaacagggggaaaagcatttttggtggatggtatgaagccagccatggaaactgcagccgaggaaaatactgaacaaagccaagagagaaaagtgaacagcagagctgaaatggaaattggcaggtaccactggatgtacccaggctcaaagaaccaccagtaccatcccgtgccaaccctgggggacagggctagccccttgagcagtccaggctgctttgaatgctgcatcaagtgtctgggaggagtcccctacgcctccctggtggccaccatcctctgcttctccggggtggccttattctgcggctgtgggcatgtggctctcgcaggcaccgtggcgattcttgagcaacacttctccaccaacgccagtgaccatgccttgctgagcgaggtgatacaactgatgcagtatgtcatctatggaattgcgtcctttttcttcttgtatgggatcattctgttggcagaaggcttttacaccacaagtgcagtgaaagaactgcacggtgagtttaaaacaaccgcttgtggccgatgcatcagtggaatgttcgttttcctcacctatgtgcttggagtggcctggctgggtgtgtttggtttctcagcggtgcccgtgtttatgttctacaacatatggtcaacttgtgaagtcatcaagtcaccgcagaccaacgggaccacgggtgtggagcagatctgtgtggatatccgacaatacggtatcattccttggaatgctttccccggaaaaatatgtggctctgccctggagaacatctgcaacacaaacgagttctacatgtcctatcacctgttcattgtggcctgtgcaggagctggtgccaccgtcattgccctgatccacttcctcatgatactgtcttctaactgggcttacttaaaggatgcgagcaaaatgcaggcttaccaggatatcaaagcaaaggaagaacaggaactgcaagatatccagtctcggtcaaaagaacaactcaattcttacacataaatgtttgccagagtgtttcggccgacgtatttacagctctgacaaatcatcagacagctgctctgcagtacagatgtgtatcccaccaaactaatgtagatgtacaaacacttcactgtctgtctcaagctgctgggatgtatctctaggaaaaccttccagtgggtaaatctttttctttagaacaaatattggaggtttcatgttagccattttaaaaggcaacactttgacaaaatgatcgttcatactttgggaatttgtggcatgttcacatttattgctagggcaattctaccaagacactcaatggaatatgtcacactccttaatagggacctgtgactccttaataaggacctgtgacatgcccagcatcaagggataagaccgtaaattcacatatatgccatctgtcctcaagtgttatctacataggaaataaaatggaattgatgtaaagttccatttctgacagctgacatttattaaactttggatcaaagataatgtgattcttatgattgatttctcaaactagcttttccctcccaagtccaggacccattaatttcctgagccaatcagaaatatatttttcaataatgctaaaattagctacaattctgctgaccctactattaaagaatctggatgctggactcactgacaagctttccagaagcaattttataacagatttcattttaacaaaatactgatccaattttcattattcttgagaaatgtcagctttgccttaatgagtatttgctttaaatttctaagaatttatatcataactagagacccaaatatctttcacagaattttgttccataaatgtttttcttaattattaagaagtgttaccttattaaaatgaccaccattctaaaccatttttcagtggtctggatacgaagtttacagtttcataccaactatctaaaacctaattgcaaattgaccacagacctctaacctcctacttttatagacttgaatacttaagtaatttaaattagggttggtatttcatttttttcttatctaaatcttagtttcctggaataataaagtttgatgttcagcaagagaactgcttgagtttaagccattttcaaaagaaacttgccttttacattattgtgttccagaacattaagtgactgtaggtactgggtattagtgatggtaaactttgtgttgctctttatgaaatgatccatataactgttgggtgcatcagtgcttttcaaaggggctgcttactatagggttaactatgtatattcattgttaagagttaacttgtggtttggctgtttcctggattttataacatacatgtgcagaaatgtattcaaatgaaaggaagcatacctttatcaagatgctattaaaattgaacatcaagtataatatttcatttggattctcttttttggttaatgcctaaaaatgcctatttgggatttttttttttttttaaattaagagaagctctcttctgtgtagaacagttgttccaaaatagcttagtgttttgttttcctgttgcatgacagatttaactattctttccagcagtggaggtgctgtcagagtccagtgttctagaagaggcagtgtctaaagcctaattttacttttctaattctggtagctattaccaggaatttttgaaagttttgtttaagtagtctaatattttttatgtaaagagcattaaattttgctatgtataaatttttgtaacctaacagtgaatcaatattttctatcagtgccaagggcttcctgtagttctattcaagtgttacaataaatatttgtagataatagtc

SEQ ID NO: 12597 - DNA, 1673 bp, Homo sapiens
  source 1..1673: mol_type = unassigned DNA
cttttgcatcttggaagggactgtaatctactgtagtgaagaacagagcctctcaatcagacgggtgtaaataagagacggaggggagtccaaaagaaaaggaagaggaggaaaaacaagtgtgtgttggggggaacagggggaaaagcatttttggtggatggtatgaagccagccatggaaactgcagccgaggaaaatactgaacaaagccaagagagaaaagtgaacagcagagctgaaatggaaattggcaggtaccactggatgtacccaggctcaaagaaccaccagtaccatcccgtgccaaccctgggggacagggctagccccttgagcagtccaggctgctttgaatgctgcatcaagtgtctgggaggagtcccctacgcctccctggtggccaccatcctctgcttctccggggtggccttattctgcggctgtgggcatgtggctctcgcaggcaccgtggcgattcttgagcaacacttctccaccaacgccagtgaccatgccttgctgagcgaggtgatacaactgatgcagtatgtcatctatggaattgcgtcctttttcttcttgtatgggatcattctgttggcagaaggcttttacaccacaagtgcagtgaaagaactgcacggtgagtttaaaacaaccgcttgtggccgatgcatcagtggaatgttcgttttcctcacctatgtgcttggagtggcctggctgggtgtgtttggtttctcagcggtgcccgtgtttatgttctacaacatatggtcaacttgtgaagtcatcaagtcaccgcagaccaacgggaccacgggtgtggagcagatctgtgtggatatccgacaatacggtatcattccttggaatgctttccccggaaaaatatgtggctctgccctggagaacatctgcaacacaaacgagttctacatgtcctatcacctgttcattgtggcctgtgcaggagctggtgccaccgtcattgccctgctgatctacatgatggctactacatataactatgcggttttgaagtttaagagtcgggaagattgctgcactaaattctaaattgcataaggagttttagagagctatgctctgtagcatgaaatatcactgacactccagactaaagcagagtctaggtttctgcaattttgttacagtaatttgtaaatagctttagtaaactcaccttgcatggtagattaataagatgacttactgtacatgaattacacaataatgagatctggtggctatttccacattttgaaaaggattcagttatttactgacagtggtgagcatcctttttaaaataatgttctcatacttaaacattagagagcagtatctttaaatgaattattaacactttggaatacttacattttctgttatttttgattgcctgataaccagtttcaatgatgaaaatgaaaacaagtgctgaagatgaaatggaagagaaccgttttaatctggattttgttttgtcacacctggaaaatactttgcaaatatgttctaaattgaaaacaatttttttatgatcacatggttcactaccaaatgaccctcaaataagccagatgaaaatttgaagaaaaaggtcacccagttctctggaaaaaaaaaaaaaaaaaaaaaaaaaa

SEQ ID NO: 12598 - DNA, 1830 bp, Homo sapiens
  source 1..1830: mol_type = unassigned DNA
ggctagaagaaatgaggtggggagaaagagagagagagagagagatcgagattgagatcttaagaaagagagcaaggaggaagagcccggtggggagcaggtccttctcccccacccccctacccccaactcccactggagccgcattgagactgtaggcaccaccgggcgccgaatggctgttttctaactgggatcctcggtgacgtatggctgcctgccccttggcagctgtctttatggaccagtaggcagagcgaaattgacgctgacaagacttttgcatcttggaagggactgtaatctactgtagtgaagaacagagcctctcaatcagacgggtgtaaataagagacggaggggagtccaaaagaaaaggaagaggaggaaaaacaagtgtgtgttggggggaacagggggaaaagcatttttggtggatggtatgaagccagccatggaaactgcagccgaggaaaatactgaacaaagccaagagagaaaaggctgctttgaatgctgcatcaagtgtctgggaggagtcccctacgcctccctggtggccaccatcctctgcttctccggggtggccttattctgcggctgtgggcatgtggctctcgcaggcaccgtggcgattcttgagcaacacttctccaccaacgccagtgaccatgccttgctgagcgaggtgatacaactgatgcagtatgtcatctatggaattgcgtcctttttcttcttgtatgggatcattctgttggcagaaggcttttacaccacaagtgcagtgaaagaactgcacggtgagtttaaaacaaccgcttgtggccgatgcatcagtggaatgttcgttttcctcacctatgtgcttggagtggcctggctgggtgtgtttggtttctcagcggtgcccgtgtttatgttctacaacatatggtcaacttgtgaagtcatcaagtcaccgcagaccaacgggaccacgggtgtggagcagatctgtgtggatatccgacaatacggtatcattccttggaatgctttccccggaaaaatatgtggctctgccctggagaacatctgcaacacaaacgagttctacatgtcctatcacctgttcattgtggcctgtgcaggagctggtgccaccgtcattgccctgctgatctacatgatggctactacatataactatgcggttttgaagtttaagagtcgggaagattgctgcactaaattctaaattgcataaggagttttagagagctatgctctgtagcatgaaatatcactgacactccagactaaagcagagtctaggtttctgcaattttgttacagtaatttgtaaatagctttagtaaactcaccttgcatggtagattaataagatgacttactgtacatgaattacacaataatgagatctggtggctatttccacattttgaaaaggattcagttatttactgacagtggtgagcatcctttttaaaataatgttctcatacttaaacattagagagcagtatctttaaatgaattattaacactttggaatacttacattttctgttatttttgattgcctgataaccagtttcaatgatgaaaatgaaaacaagtgctgaagatgaaatggaagagaaccgttttaatctggattttgttttgtcacacctggaaaatactttgcaaatatgttctaaattgaaaacaatttttttatgatcacatggttcactaccaaatgaccctcaaataagccagatgaaaatttgaagaaaaaggtcacccagttctctggaaaaaaaaaaaaaaaaaaaaaaaaaa

SEQ ID NO: 12599 - DNA, 1033 bp, Homo sapiens
  source 1..1033: mol_type = unassigned DNA
gctcaggtggcgcctcctcggccacctctgcgacgaagccgggacgctggaggtgggaggggcgcggcgcaggtgtccggaacgcccaggctgctttgaatgctgcatcaagtgtctgggaggagtcccctacgcctccctggtggccaccatcctctgcttctccggggtggccttattctgcggctgtgggcatgtggctctcgcaggcaccgtggcgattcttgagcaacacttctccaccaacgccagtgaccatgccttgctgagcgaggtgatacaactgatgcagtatgtcatctatggaattgcgtcctttttcttcttgtatgggatcattctgttggcagaaggcttttacaccacaagtgcagtgaaagaactgcacggtgagtttaaaacaaccgcttgtggccgatgcatcagtggaatgttcgttttcctcacctatgtgcttggagtggcctggctgggtgtgtttggtttctcagcggtgcccgtgtttatgttctacaacatatggtcaacttgtgaagtcatcaagtcaccgcagaccaacgggaccacgggtgtggagcagatctgtgtggatatccgacaatacggtatcattccttggaatgctttccccggaaaaatatgtggctctgccctggagaacatctgcaacacaaacgagttctacatgtcctatcacctgttcattgtggcctgtgcaggagctggtgccaccgtcattgccctgctgatctacatgatggctactacatataactatgcggttttgaagtttaagagtcgggaagattgctgcactaaattctaaattgcataaggagttttagagagctatgctctgtagcatgaaatatcactgacactccagactaaagcagagtctaggtttctgcaattttgttacagtaatttgtaaatagctttagtaaactcaccttgcatggtagattaataagatgacttactgtacatgaattacacaataatgagatctggtggctatttccacattttg

SEQ ID NO: 12600 - DNA, 3957 bp, Homo sapiens
  source 1..3957: mol_type = unassigned DNA
agcgcagcccgcagaagcccggtcagcgcacgtgcccgcgagacctgcaaacttgtgccaccggctctgcccgtccccggggagcccgaacgccccgcagccctcacccctcccgccagtctccagccatgggctgctttgaatgctgcatcaagtgtctgggaggagtcccctacgcctccctggtggccaccatcctctgcttctccggggtggccttattctgcggctgtgggcatgtggctctcgcaggcaccgtggcgattcttgagcaacacttctccaccaacgccagtgaccatgccttgctgagcgaggtgatacaactgatgcagtatgtcatctatggaattgcgtcctttttcttcttgtatgggatcattctgttggcagaaggcttttacaccacaagtgcagtgaaagaactgcacggtgagtttaaaacaaccgcttgtggccgatgcatcagtggaatgttcgttttcctcacctatgtgcttggagtggcctggctgggtgtgtttggtttctcagcggtgcccgtgtttatgttctacaacatatggtcaacttgtgaagtcatcaagtcaccgcagaccaacgggaccacgggtgtggagcagatctgtgtggatatccgacaatacggtatcattccttggaatgctttccccggaaaaatatgtggctctgccctggagaacatctgcaacacaaacgagttctacatgtcctatcacctgttcattgtggcctgtgcaggagctggtgccaccgtcattgccctgctgatctacatgatggctactacatataactatgcggttttgaagtttaagagtcgggaagattgctgcactaaattctaaattgcataaggagttttagagagctatgctctgtagcatgaaatatcactgacactccagactaaagcagagtctaggtttctgcaattttgttacagtaatttgtaaatagctttagtaaactcaccttgcatggtagattaataagatgacttactgtacatgaattacacaataatgagatctggtggctatttccacattttgaaaaggattcagttatttactgacagtggtgagcatcctttttaaaataatgttctcatacttaaacattagagagcagtatctttaaatgaattattaacactttggaatacttacattttctgttatttttgattgcctgataaccagtttcaatgatgaaaatgaaaacaagtgctgaagatgaaatggaagagaaccgttttaatctggattttgttttgtcacacctggaaaatactttgcaaatatgttctaaattgaaaacaatttttttatgatcacatggttcactaccaaatgaccctcaaataagccagatgaaaatttgaagaaaaaggtcacccagttctctggaaaaaaaaaaaaaaaaaaaaaaaaaaggatttatatgtgggtagttttttttttggtacaacacaatcattctgttagagcccacaaaattggtaaccttaaattgtgtgttttggtaagtaataactaactgtttcctcatagctagttctcaagctgcatgtaagattttaacgggaagagaaaataggcctggacctgaaggtctcaaatatgttgagaagaaagtatgaactataaggaacttgagatgtagatttattttgcaggaaatacgaggaaaataggaaagaagtgtttgccgcatcaagtgtaaagaatgatactgaggatttttacattttatgaaatgaaataatggcatttacaaaatgaaaaatgtagtttcacaactaagttttgttaacagagactgcatgctttgcttatagttcttaattttggttttgacattcatttaattttttccatgttaaatatgtagtttaattatttactcaaaataaacattgttcatgcttttaggcctttgggggaattgatttttatccacaggtagaaaatggtctttgcacacactacacttatttcaaatatacaatgtgctcccgaactttcgcattagtctttaaaattactctcaaaatggtattaaaaaaaaaaaaaaaagcaccctctcgtatttcatttttgctttttcttaacaatacctttggccatttttttccagttcactatgtttgtatactaacttttcttcagccttttaatgcgaagccaactagtagagcatgctttcaggatctgacagctctgctagtagagcgagtatttattaatacagaattaaccttcgcccctttaaagtcaagtctgtctaatctaactagcgcctcgctttgccttctcacaatgctcactagccatcatgctcacccttctcttccagatccacttcctcatgatactgtcttctaactgggcttacttaaaggatgcgagcaaaatgcaggcttaccaggatatcaaagcaaaggaagaacaggaactgcaagatatccagtctcggtcaaaagaacaactcaattcttacacataaatgtttgccagagtgtttcggccgacgtatttacagctctgacaaatcatcagacagctgctctgcagtacagatgtgtatcccaccaaactaatgtagatgtacaaacacttcactgtctgtctcaagctgctgggatgtatctctaggaaaaccttccagtgggtaaatctttttctttagaacaaatattggaggtttcatgttagccattttaaaaggcaacactttgacaaaatgatcgttcatactttgggaatttgtggcatgttcacatttattgctagggcaattctaccaagacactcaatggaatatgtcacactccttaatagggacctgtgactccttaataaggacctgtgacatgcccagcatcaagggataagaccgtaaattcacatatatgccatctgtcctcaagtgttatctacataggaaataaaatggaattgatgtaaagttccatttctgacagctgacatttattaaactttggatcaaagataatgtgattcttatgattgatttctcaaactagcttttccctcccaagtccaggacccattaatttcctgagccaatcagaaatatatttttcaataatgctaaaattagctacaattctgctgaccctactattaaagaatctggatgctggactcactgacaagctttccagaagcaattttataacagatttcattttaacaaaatactgatccaattttcattattcttgagaaatgtcagctttgccttaatgagtatttgctttaaatttctaagaatttatatcataactagagacccaaatatctttcacagaattttgttccataaatgtttttcttaattattaagaagtgttaccttattaaaatgaccaccattctaaaccatttttcagtggtctggatacgaagtttacagtttcataccaactatctaaaacctaattgcaaattgaccacagacctctaacctcctacttttatagacttgaatacttaagtaatttaaattagggttggtatttcatttttttcttatctaaatcttagtttcctggaataataaagtttgatgttcagcaagagaactgcttgagtttaagccattttcaaaagaaacttgccttttacattattgtgttccagaacattaagtgactgtaggtactgggtattagtgatggtaaactttgtgttgctctttatgaaatgatccatataactgttgggtgcatcagtgcttttcaaaggggctgcttactatagggttaactatgtatattcattgttaagagttaacttgtggtttggctgtttcctggattttataacatacatgtgcagaaatgtattcaaatgaaaggaagcatacctttatcaagatgctattaaaattgaacatcaagtataa

SEQ ID NO: 12601 - DNA, 678 bp, Homo sapiens
  source 1..678: mol_type = unassigned DNA
gaaagagagagagagagagagatcgagattgagatcttaagaaagagagcaaggaggaagagcccgactgtaggcaccaccgggcgccgaatggctgttttctaactgggatcctcggtgacgtatggctgcctgccccttggcagctgtctttatggaccagtaggcagagcgaaattgacgctgacaagacttttgcatcttggaagggactgtaatctactgtagtgaagaacagagcctctcaatcagacgggtgtaaataagagacggaggggagtccaaaagaaaaggaagaggaggaaaaacaagtgtgtgttggggggaacagggggaaaagcatttttggtggatggtatgaagccagccatggaaactgcagccgaggaaaatactgaacaaagccaagagagaaaaggctgctttgaatgctgcatcaagtgtctgggaggagtcccctacgcctccctggtggccaccatcctctgcttctccggggtggccttattctgcggctgtgggcatgtggctctcgcaggcaccgtggcgattcttgagcaacacttctccaccaacgccagtgaccatgccttgctgagcgaggtgatacaactgatgcagtatgtcatctatggaattgcgtcctttttcttcttgtatgggatcattctgttggca

SEQ ID NO: 12602 - DNA, 1372 bp, Homo sapiens
  source 1..1372: mol_type = unassigned DNA
cttttgcatcttggaagggactgtaatctactgtagtgaagaacagagcctctcaatcagacgggtgtaaataagagacggaggggagtccaaaagaaaaggaagaggaggaaaaacaagtgtgtgttggggggaacagggggaaaagcatttttggtggatggtatgaagccagccatggaaactgcagccgaggaaaatactgaacaaagccaagagagaaaagaacatttaaatgtggaaaagatctcaacgagccatttgtgaacagcagagctgaaatggaaattggcaggtaccactggatgtacccaggctcaaagaaccaccagtaccatcccgtgccaaccctgggggacagggctagccccttgagcagtccaggctgctttgaatgctgcatcaagtgtctgggaggagtcccctacgcctccctggtggccaccatcctctgcttctccggggtggccttattctgcggctgtgggcatgtggctctcgcaggcaccgtggcgattcttgagcaacacttctccaccaacgccagtgaccatgccttgctgagcgaggtgatacaactgatgcagtatgtcatctatggaattgcgtcctttttcttcttgtatgggatcattctgttggcagaaggcttttacaccacaagtgcagtgaaagaactgcacggtgagtttaaaacaaccgcttgtggccgatgcatcagtggaatgttcgttttcctcacctatgtgcttggagtggcctggctgggtgtgtttggtttctcagcggtgcccgtgtttatgttctacaacatatggtcaacttgtgaagtcatcaagtcaccgcagaccaacgggaccacgggtgtggagcagatctgtgtggatatccgacaatacggtatcattccttggaatgctttccccggaaaaatatgtggctctgccctggagaacatctgcaacacaaacgagttctacatgtcctatcacctgttcattgtggcctgtgcaggagctggtgccaccgtcattgccctgatccacttcctcatgatactgtcttctaactgggcttacttaaaggatgcgagcaaaatgcaggcttaccaggatatcaaagcaaaggaagaacaggaactgcaagatatccagtctcggtcaaaagaacaactcaattcttacacataaatgtttgccagagtgtttcggccgacgtatttacagctctgacaaatcatcagacagctgctctgcagtacagatgtgtatcccaccaaactaatgtagatgtacaaacacttcactgtctgtctcaagctgctgggatgtatctctaggaaaaccttccagtgggtaaatctttttcttta

SEQ ID NO: 12603 - DNA, 2268 bp, Homo sapiens
  source 1..2268: mol_type = unassigned DNA
acagagctcaggacagggctgaggaaccatgtctccatccccgaccgccctcttctgtcttgggctgtgtctggggcgtgtgccagcgcagagtggaccgctccccaagccctccctccaggctctgcccagctccctggtgcccctggagaagccagtgaccctccggtgccagggacctccgggcgtggacctgtaccgcctggagaagctgagttccagcaggtaccaggatcaggcagtcctcttcatcccggccatgaagagaagtctggctggacgctaccgctgctcctaccagaacggaagcctctggtccctgcccagcgaccagctggagctcgttgccacgggagtttttgccaaaccctcgctctcagcccagcccggcccggcggtgtcgtcaggaggggacgtaaccctacagtgtcagactcggtatggctttgaccaatttgctctgtacaaggaaggggaccctgcgccctacaagaatcccgagagatggtacagggctagttttcccatcatcacggtgaccgccgcccacagcggaacctaccgatgctacagcttctccagcagggacccatacctgtggtcagcccccagcgaccccctggagcttgtggtcacaggaacctctgtgacccccagccggttaccaacagaaccaccttccccggtagcagaattctcagaagccaccgctgaactgaccgtctcattcacaaacgaagtcttcacaactgagacttctaggagtatcaccgccagtccaaaggagtcagactctccagctggtgagtcctgcccgccagtactacaccaagggcaacctggtccggatatgcctcggggctgtgatcctaataatcctggcggggtttctggcagaggactggcacagccggaggaagcgcctgcggcacaggggcagggctgtgcagaggccgcttccgcccctcccgcccctcccgctgacccggaaatcaaacgggggtcaggatggaggccgacaggatgttcacagccgcgggttatgttcatgaccgctgaaccccaggcacggtcgtatccaagggagggatcatggcatgggaggcgactcaaagactggcgtgtgtggagcgtggaagcaggagggcagaggctacagctgtggaaacgaggccatgctgcctcctcctggtgttccatcagggagccgttcggccagtgtctgtctgtctgtctgcctctctgtctgagggcaccctccatttgggatggaaggaatctgtggagaccccatcctcctccctgcacactgtggatgacatggtaccctggctggaccacatactggcctctttcttcaacctctctaatatgggctccagacggatctctaaggttcccagctctcagggttgactctgttccatcctctgtgcaaaatcctcccgtgcttccctttggccctctgtgctcttgtctggttttccccagaaactctcaccctcactccatctcccactgcggtctaacaaatctcctttcgtctctcagaacgggtcttgcaggcagtttgggtatgtcattcattttccttagtgtaaaactagcacgttgcccgcttcccttcacattagaaaacaagatcagcctgtgcaacatggtgaaacctcatctctaccaacaaaacaaaaaaacacaaaaattagccaggtgtggtggtgcatccctatactcccagcaactcagggggctgaggtgggagaatggcttgagcctgggaggcagaggttgcagtgagctgagatcacaccactgcactctagctcgggtgacgaagcctgactttgtctcaaaaaatacagggatgaatatgtcaattaccctgatttgatcatagcacgttgtatacatgtactgcaatattgctgtccaccccataaatatgtacaattctgtatacatttttaaaatcataaaaataagataatgcaccgtctccacccctctcatatttactttctgaaggaaatgttaggtcttctcaaggtaaagttctatatttattatagcgtttaggcatttcttgaccatctaatgagtgtaaaactgtaccactgggccaagtgcagtggatcatgtctgtaatcctagcactgtgggaggccaaggcaggaggatcgcttgagcccaggagttcaagaccagcctgggcaacatagtgagaccccatctctacttaaaataaagaagataaaaattgttttaaaa

SEQ ID NO: 12604 - DNA, 2210 bp, Homo sapiens
  source 1..2210: mol_type = unassigned DNA
acagagctcaggacagggctgaggaaccatgtctccatccccgaccgccctcttctgtcttgggctgtgtctggggcgtgtgccagcgcagagtggaccgctccccaagccctccctccaggctctgcccagctccctggtgcccctggagaagccagtgaccctccggtgccagggacctccgggcgtggacctgtaccgcctggagaagctgagttccagcaggtaccaggatcaggcagtcctcttcatcccggccatgaagagaagtctggctggacgctaccgctgctcctaccagaacggaagcctctggtccctgcccagcgaccagctggagctcgttgccacgggagtttttgccaaaccctcgctctcagcccagcccggcccggcggtgtcgtcaggaggggacgtaaccctacagtgtcagactcggtatggctttgaccaatttgctctgtacaaggaaggggaccctgcgccctacaagaatcccgagagatggtacagggctagttttcccatcatcacggtgaccgccgcccacagcggaacctaccgatgctacagcttctccagcagggacccatacctgtggtcagcccccagcgaccccctggagcttgtggtcacagaattctcagaagccaccgctgaactgaccgtctcattcacaaacgaagtcttcacaactgagacttctaggagtatcaccgccagtccaaaggagtcagactctccagctggtcctgcccgccagtactacaccaagggcaacctggtccggatatgcctcggggctgtgatcctaataatcctggcggggtttctggcagaggactggcacagccggaggaagcgcctgcggcacaggggcagggctgtgcagaggccgcttccgcccctcccgcccctcccgctgacccggaaatcaaacgggggtcaggatggaggccgacaggatgttcacagccgcgggttatgttcatgaccgctgaaccccaggcacggtcgtatccaagggagggatcatggcatgggaggcgactcaaagactggcgtgtgtggagcgtggaagcaggagggcagaggctacagctgtggaaacgaggccatgctgcctcctcctggtgttccatcagggagccgttcggccagtgtctgtctgtctgtctgcctctctgtctgagggcaccctccatttgggatggaaggaatctgtggagaccccatcctcctccctgcacactgtggatgacatggtaccctggctggaccacatactggcctctttcttcaacctctctaatatgggctccagacggatctctaaggttcccagctctcagggttgactctgttccatcctctgtgcaaaatcctcccgtgcttccctttggccctctgtgctcttgtctggttttccccagaaactctcaccctcactccatctcccactgcggtctaacaaatctcctttcgtctctcagaacgggtcttgcaggcagtttgggtatgtcattcattttccttagtgtaaaactagcacgttgcccgcttcccttcacattagaaaacaagatcagcctgtgcaacatggtgaaacctcatctctaccaacaaaacaaaaaaacacaaaaattagccaggtgtggtggtgcatccctatactcccagcaactcagggggctgaggtgggagaatggcttgagcctgggaggcagaggttgcagtgagctgagatcacaccactgcactctagctcgggtgacgaagcctgactttgtctcaaaaaatacagggatgaatatgtcaattaccctgatttgatcatagcacgttgtatacatgtactgcaatattgctgtccaccccataaatatgtacaattctgtatacatttttaaaatcataaaaataagataatgcaccgtctccacccctctcatatttactttctgaaggaaatgttaggtcttctcaaggtaaagttctatatttattatagcgtttaggcatttcttgaccatctaatgagtgtaaaactgtaccactgggccaagtgcagtggatcatgtctgtaatcctagcactgtgggaggccaaggcaggaggatcgcttgagcccaggagttcaagaccagcctgggcaacatagtgagaccccatctctacttaaaataaagaagataaaaattgttttaaaa

SEQ ID NO: 12605 - DNA, 2264 bp, Homo sapiens
  source 1..2264: mol_type = unassigned DNA
acagagctcaggacagggctgaggaaccatgtctccatccccgaccgccctcttctgtcttgggctgtgtctggggcgtgtgccagcgcagagtggaccgctccccaagccctccctccaggctctgcccagctccctggtgcccctggagaagccagtgaccctccggtgccagggacctccgggcgtggacctgtaccgcctggagaagctgagttccagcaggtaccaggatcaggcagtcctcttcatcccggccatgaagagaagtctggctggacgctaccgctgctcctaccagaacggaagcctctggtccctgcccagcgaccagctggagctcgttgccacgggagtttttgccaaaccctcgctctcagcccagcccggcccggcggtgtcgtcaggaggggacgtaaccctacagtgtcagactcggtatggctttgaccaatttgctctgtacaaggaaggggaccctgcgccctacaagaatcccgagagatggtacagggctagttttcccatcatcacggtgaccgccgcccacagcggaacctaccgatgctacagcttctccagcagggacccatacctgtggtcagcccccagcgaccccctggagcttgtggtcacaggaacctctgtgacccccagccggttaccaacagaaccaccttccccggtagcagaattctcagaagccaccgctgaactgaccgtctcattcacaaacgaagtcttcacaactgagacttctaggagtatcaccgccagtccaaaggagtcagactctccagctggtcctgcccgccagtactacaccaagggcaacctggtccggatatgcctcggggctgtgatcctaataatcctggcggggtttctggcagaggactggcacagccggaggaagcgcctgcggcacaggggcagggctgtgcagaggccgcttccgcccctcccgcccctcccgctgacccggaaatcaaacgggggtcaggatggaggccgacaggatgttcacagccgcgggttatgttcatgaccgctgaaccccaggcacggtcgtatccaagggagggatcatggcatgggaggcgactcaaagactggcgtgtgtggagcgtggaagcaggagggcagaggctacagctgtggaaacgaggccatgctgcctcctcctggtgttccatcagggagccgttcggccagtgtctgtctgtctgtctgcctctctgtctgagggcaccctccatttgggatggaaggaatctgtggagaccccatcctcctccctgcacactgtggatgacatggtaccctggctggaccacatactggcctctttcttcaacctctctaatatgggctccagacggatctctaaggttcccagctctcagggttgactctgttccatcctctgtgcaaaatcctcccgtgcttccctttggccctctgtgctcttgtctggttttccccagaaactctcaccctcactccatctcccactgcggtctaacaaatctcctttcgtctctcagaacgggtcttgcaggcagtttgggtatgtcattcattttccttagtgtaaaactagcacgttgcccgcttcccttcacattagaaaacaagatcagcctgtgcaacatggtgaaacctcatctctaccaacaaaacaaaaaaacacaaaaattagccaggtgtggtggtgcatccctatactcccagcaactcagggggctgaggtgggagaatggcttgagcctgggaggcagaggttgcagtgagctgagatcacaccactgcactctagctcgggtgacgaagcctgactttgtctcaaaaaatacagggatgaatatgtcaattaccctgatttgatcatagcacgttgtatacatgtactgcaatattgctgtccaccccataaatatgtacaattctgtatacatttttaaaatcataaaaataagataatgcaccgtctccacccctctcatatttactttctgaaggaaatgttaggtcttctcaaggtaaagttctatatttattatagcgtttaggcatttcttgaccatctaatgagtgtaaaactgtaccactgggccaagtgcagtggatcatgtctgtaatcctagcactgtgggaggccaaggcaggaggatcgcttgagcccaggagttcaagaccagcctgggcaacatagtgagaccccatctctacttaaaataaagaagataaaaattgttttaaaa

SEQ ID NO: 12606 - DNA, 2078 bp, Homo sapiens
  source 1..2078: mol_type = unassigned DNA
gtctctgggaccggaagtgcgggcgagcgcgggtccccgggtctgacaggagcagcctgtgggcaccgcggcggtagttggaggcgggagagggtccgtagccgcgccgccctgccccgccatgggcctcctgtcggacccggttcgccggcgcgcgctcgcccgcctagtgctgcgcctcaacgcgccgttgtgcgtgctgagctacgtggcgggcatcgcctggttcttggcgctggttttcccgccgctgacccagcgcacttacatgtcggagaacgccatgggctccaccatggtggaggagcagtttgcgggcggagaccgtgcccgggcttttgcccgggacttcgccgcccaccgcaagaagtcgggggctctgccagtggcctggcttgaacggacgatgcggtcagtagggctggaggtctacacgcagagtttctcccggaaactgcccttcccagatgagacccacgagcgctatatggtgtcgggcaccaacgtgtacggcatcctgcgggccccgcgtgctgccagcaccgagtcgcttgtgctcaccgtgccctgtggctctgactctaccaacagccaggctgtggggctgctgctggcactggctgcccacttccgggggcagatttattgggccaaagatatcgtcttcctggtaacagaacatgaccttctgggcactgaggcttggcttgaagcctaccacgatgtcaatgtcactggcatgcagtcgtctcccctgcagggccgagctggggccattcaggcagccgtggccctggagctgagcagtgatgtggtcaccagcctcgatgtggccgtggaggggcttaacgggcagctgcccaaccttgacctgctcaatctcttccagaccttctgccagaaagggggcctgttgtgcacgcttcagggcaagctgcagcccgaggactggacatcattggatggaccgctgcagggcctgcagacactgctgctcatggttctgcggcaggcctccggccgcccccacggctcccatggcctcttcctgcgctaccgtgtggaggccctaaccctgcgtggcatcaatagcttccgccagtacaagtatgacctggtggcagtgggcaaggctttggagggcatgttccgcaagctcaaccacctcctggagcgcctgcaccagtccttcttcctctacttgctccccggcctctcccgcttcgtctccatcggcctctacatgcccgctgtcggcttcttgctcctggtccttggtctcaaggctctggaactgtggatgcagctgcatgaggctggaatgggccttgaggagcccgggggtgcccctggccccagtgtaccccttcccccatcacagggtgtggggctggcctcgctcgtggcacctctgctgatctcacaggccatgggactggccctctatgtcctgccagtgctgggccaacacgttgccacccagcacttcccagtggcagaggctgaggctgtggtgctgacactgctggcgatttatgcagctggcctggccctgccccacaatacccaccgggtggtaagcacacaggccccagacaggggctggatggcactgaagctggtagccctgatctacctagcactgcagctgggctgcatcgccctcaccaacttctcactgggcttcctgctggccaccaccatggtgcccactgctgcgcttgccaagcctcatgggccccggaccctctatgctgccctgctggtgctgaccagcccggcagccacgctccttggcagcctgttcctgtggcgggagctgcaggaggcgccactgtcactggccgagggctggcagctcttcctggcagcgctagcccagggtgtgctggagcaccacacctacggcgccctgctcttcccactgctgtccctgggcctctacccctgctggctgcttttctggaatgtgctcttctggaagtgagatctgcctgtccgggctgggacagagactccccaaggaccccattctgcctccttctggggaaataaatgagtgtctgtttcagcagcta

SEQ ID NO: 12607 - DNA, 1840 bp, Homo sapiens
  source 1..1840: mol_type = unassigned DNA
gtgggcaccgcggcggtagttggaggcgggagagggtccgtagccgcgccgccctgccccgccatgggcctcctgtcggacccggttcgccggcgcgcgctcgcccgcctagtgctgcgcctcaacgcgccgttgtgggctctgccagtggcctggcttgaacggacgatgcggtcagtagggctggaggtctacacgcagagtttctcccggaaactgcccttcccagatgagacccacgagcgctatatggtgtcgggcaccaacgtgtacggcatcctgcgggccccgcgtgctgccagcaccgagtcgcttgtgctcaccgtgccctgtggctctgactctaccaacagccaggctgtggggctgctgctggcactggctgcccacttccgggggcagatttattgggccaaagatatcgtcttcctggtaacagaacatgaccttctgggcactgaggcttggcttgaagcctaccacgatgtcaatgtcactggcatgcagtcgtctcccctgcagggccgagctggggccattcaggcagccgtggccctggagctgagcagtgatgtggtcaccagcctcgatgtggccgtggaggggcttaacgggcagctgcccaaccttgacctgctcaatctcttccagaccttctgccagaaagggggcctgttgtgcacgcttcagggcaagctgcagcccgaggactggacatcattggatggaccgctgcagggcctgcagacactgctgctcatggttctgcggcaggcctccggccgcccccacggctcccatggcctcttcctgcgctaccgtgtggaggccctaaccctgcgtggcatcaatagcttccgccagtacaagtatgacctggtggcagtgggcaaggctttggagggcatgttccgcaagctcaaccacctcctggagcgcctgcaccagtccttcttcctctacttgctccccggcctctcccgcttcgtctccatcggcctctacatgcccgctgtcggcttcttgctcctggtccttggtctcaaggctctggaactgtggatgcagctgcatgaggctggaatgggccttgaggagcccgggggtgcccctggccccagtgtaccccttcccccatcacagggtgtggggctggcctcgctcgtggcacctctgctgatctcacaggccatgggactggccctctatgtcctgccagtgctgggccaacacgttgccacccagcacttcccagtggcagaggctgaggctgtggtgctgacactgctggcgatttatgcagctggcctggccctgccccacaatacccaccgggtggtaagcacacaggccccagacaggggctggatggcactgaagctggtagccctgatctacctagcactgcagctgggctgcatcgccctcaccaacttctcactgggcttcctgctggccaccaccatggtgcccactgctgcgcttgccaagcctcatgggccccggaccctctatgctgccctgctggtgctgaccagcccggcagccacgctccttggcagcctgttcctgtggcgggagctgcaggaggcgccactgtcactggccgagggctggcagctcttcctggcagcgctagcccagggtgtgctggagcaccacacctacggcgccctgctcttcccactgctgtccctgggcctctacccctgctggctgcttttctggaatgtgctcttctggaagtgagatctgcctgtccgggctgggacagagactccccaaggaccccattctgcctccttctggggaaataaatgagtgtctgtttcagcagcta

SEQ ID NO: 12608 - DNA, 2281 bp, Homo sapiens
  source 1..2281: mol_type = unassigned DNA
ccttcatcccacttaccgcagctccagagccctgcgggaggactcagagtcagggacacagcagcgtccggcgagatgaaggcgctcggggctgtcctgcttgccctcttgctgtgcgggcggccagggagagggcagacacagcaggaggaagaggaagaggacgaggaccacgggccagatgactacgacgaggaagatgaggatgaggtggaagaggaggagaccaacaggctccctggtggcaggagcagagtgctgctgcggtgctacacctgcaagtccctgcccagggacgagcgctgcaacctgacgcagaactgctcacatggccagacctgcacaaccctcattgcccacgggaacaccgagtcaggcctcctgaccacccactccacgtggtgcacagacagctgccagcccatcaccaagacggtggaggggacccaggtgaccatgacctgctgccagtccagcctgtgcaatgtcccaccctggcaaagctcccgagtccaggacccaacaggcaagggggcaggcggcccccggggcagctccgaaactgtgggcgcagccctcctgctcaacctccttgccggccttggagcaatgggggccaggagaccctgacccacggcccctccccacccccacccggctcacccccggccctgccagcactctgtctggtaccttcccctcctgcccctgcaccagctttggagaatggatttggagtgtcttgggcgatccagccagcgcaggccccccggcccggttgcttcctcagttcccggctgtgtccttggtgtcctttctccaccacctgtgagcagcaagactgccgcacgtgggcgctgggtccagacctcggctgccacgccccaggacctgcagccctcatgggggctggggatccccatcagcacagccaggcagagatgatacccaccacacacctgggggcccccacacccagtcctcacccttaacttctgccatgggaattcctccatctgcagcggtcacacgggcccaccctgcccttccccaggtcggcctctccgctgtctggagggaaggggatttggagggaggctgtcgtcgcccccaggaaagacgggcctgggggaggcgggacagtgggagaggcgcgctgaggatgagagggcacagggaggtgggttggggtgaggccacatgcggaggggcggggcgggggggggctggggggacaggcaccaagtatgaagaggatggggccagcggggcctgtctggctctggcgtgagcaccgctatgggagaccctggcttggaaagtgaacttgcagccttggatggggaagggccagatgctgggtgggtgcctgtcaccttgaggtgaccatctagggcagtacctgctgggcttaggacagcgcctgaggctgggaatacctgtctctgctctagcagaggctaaagcaggctagagcagtggaggggtggagttgatgaaaggagaggagtagatgagatggaatttttccagcctcatcctggcctgccctctagactccagtccccaagccctcagcctagtgggtgtcatggatggatctgggggtgtcagacaggctaccctgtgccagggagggggcagaatgggcctgcagcttcctgcagaggaagcaggactgggtagcagagccgggaaggtgggtggcccattacaggggggtccccagggtgtcctctggcagggctgtgactgctgcaagctctgccttcaccagtagctggtgccaggacagagctctgggacagcaggcagaggccgagcctgggccacagctcagccactgacttgggtatcagtttccccttctgagaagtacagagtgagacttaaagaacccctagatccccaccagttcaacactccattaactgggaagcccagagtcctgtccggcctgccaagttcatcctggtggacagcgggaggcctccgctaactgttctcttcttttccttattaataaaacacacaatgcctagctggggggtcggaaggcaaatgccctagatggtggggtcacgtctttctccttctccttcctccttctgctggctgaagtgatgactggagctcagcaaccactttgcaccatgaggcagcactgagcacggtagggcagcctggtgagaggggcctagctcgctgccgacagaagtcactgcctacctcagggtccccttacctgggtgggaaataaatttctgctgtgttgaagcta

SEQ ID NO: 12609 - DNA, 723 bp, Homo sapiens
  source 1..723: mol_type = unassigned DNA
gtcggcgcgggaggctcagatggctggaggcggcgggcacgcacactgcggggctccgaggggcacaggtccaggctcctgcgtgaagtgatgctcctctttgccttactcctagccatggagctcccattggtggcagccagtgccaccatgcgcgctcagtggacttacagtttgagatgccatgactgtgcggtcataaatgacttcaactgtcccaacattagagtatgtccgtatcatattaggcgctgtatgacaatctccattcgcataaattctcgtgaactacttgtttataagaactgtacaaacaactgcacatttgtatatgcagctgaacagcctcctgaagccccaggaaaaatcttcaaaactaatagcttctactgggtttgttgttgtaatagcatggtttgcaatgcaggaggacctactaatcttgaaagggacatgttacccgatgaagtaactgaggaggagcttccagaaggaactgtgaggctgggggtatcaaaactgttgctgagttttgcctctatcatagtcagcaatatattgccatgaggaccccaccttggagggtctgaccatcttcacctgttccgcagagaaatgttgctctccattattcccttctaagccagagacccttatccactgctcctctaggtggcccatttatggtttgttgtaagagaaaaattaaaaaaatattgttta

SEQ ID NO: 12610 - DNA, 3489 bp, Homo sapiens
  source 1..3489: mol_type = unassigned DNA
gtgacctgcttagagagaagcggtgggtctgcacctggattttggagtcccagtgctgctgcagctctgagcattcccacgtcaccagagaagccggtgggcaatgagatcatgtctgctttcaggttgtggcctggcctgctgatcatgttgggttctctctgccatagaggttcaccgtgtggcctttcaacacacgtagaaataggacacagagctctggagtttcttcagcttcacaatgggcgtgttaactacagagagctgttactagaacaccaggatgcgtatcaggctggaatcgtgtttcctgattgtttttaccctagcatctgcaaaggaggaaaattccatgatgtgtctgagagcactcactggactccgtttcttaatgcaagcgttcattatatccgagagaactatccccttccctgggagaaggacacagagaaactggtagctttcttgtttggaattacttctcacatggcggcagatgtcagctggcatagtctgggccttgaacaaggattccttaggaccatgggagctattgattttcacggctcctattcagaggctcattcggctggtgattttggaggagatgtgttgagccagtttgaatttaattttaattaccttgcacgacgctggtatgtgccagtcaaagatctactgggaatttatgagaaactgtatggtcgaaaagtcatcaccgaaaatgtaatcgttgattgttcacatatccagttcttagaaatgtatggtgagatgctagctgtttccaagttatatcccacttactctacaaagtccccgtttttggtggaacaattccaagagtattttcttggaggactggatgatatggcattttggtccactaatatttaccatctaacaagcttcatgttggagaatgggaccagtgactgcaacctgcctgagaaccctctgttcattgcatgtggcggccagcaaaaccacacccagggctcaaaaatgcagaaaaatgattttcacagaaatttgactacatccctaactgaaagtgttgacaggaatataaactatactgaaagaggagtgttctttagtgtaaattcctggaccccggattccatgtcctttatctacaaggctttggaaaggaacataaggacaatgttcataggtggctctcagttgtcacaaaagcacgtctccagccccttagcatcttacttcttgtcatttccttatgcgaggcttggctgggcaatgacctcagctgacctcaaccaggatgggcacggtgacctcgtggtgggcgcaccaggctacagccgccccggccacatccacatcgggcgcgtgtacctcatctacggcaatgacctgggcctgccacctgttgacctggacctggacaaggaggcccacaggatccttgaaggcttccagccctcaggtcggtttggctcggccttggctgtgttggactttaacgtggacggcgtgcctgacctggccgtgggagctccctcggtgggctccgagcagctcacctacaaaggtgccgtgtatgtctactttggttccaaacaaggaggaatgtcttcttcccctaacatcaccatttcttgccaggacatctactgtaacttgggctggactctcttggctgcagatgtgaatggagacagtgaacccgatctggtcatcggctccccttttgcaccaggtggagggaagcagaagggaattgtggctgcgttttattctggccccagcctgagcgacaaagaaaaactgaacgtggaggcagccaactggacggtgagaggcgaggaagacttctcctggtttggatattcccttcacggtgtcactgtggacaacagaaccttgctgttggttgggagcccgacctggaagaatgccagcaggctgggccatttgttacacatccgagatgagaaaaagagccttgggagggtgtatggctacttcccaccaaacggccaaagctggtttaccatttctggagacaaggcaatggggaaactgggtacttccctttccagtggccacgtactgatgaatgggactctgaaacaagtgctgctggttggagcccctacgtacgatgacgtgtctaaggtggcattcctgaccgtgaccctacaccaaggcggagccactcgcatgtacgcactcacatctgacgcgcagcctctgctgctcagcaccttcagcggagaccgccgcttctcccgatttggtggcgttctgcacttgagtgacctggatgatgatggcttagatgaaatcatcatggcagcccccctgaggatagcagatgtaacctctggactgattgggggagaagacggccgagtatatgtatataatggcaaagagaccacccttggtgacatgactggcaaatgcaaatcatggataactccatgtccagaagaaaaggcccaatatgtattgatttctcctgaagccagctcaaggtttgggagctccctcatcaccgtgaggtccaaggcaaagaaccaagtcgtcattgctgctggaaggagttctttgggagcccgactctccggggcacttcacgtctatagccttggctcagattgaagatttcactgcatttccccactctgcccacctctctcatgctgaatcacatccatggtgagcattttgatggacaaagtggcacatccagtggagcggtggtagatcctgatagacatggggctcctgggagtagagagacacactaacagccacaccctctggaaatctgatacagtaaatatatgactgcaccagaaatatgtgaaatagcagacattctgcttactcatgtctccttccacagtttacttcctcgctccctttgcatctaaacctttcttctttcccaacttattgcctgtagtcagacctgctgtacaacctatttcctcttcctcttgaatgtctttccaatggctggaaaggtccctctgtggttatctgttagaacagtctctgtacacaattcctcctaaaaacatccttttttaaaaaaagaattgttcagccataaagaaagaacaagatcatgccctttgcagggacatggatggagctggaggccattatccttcataaactattgcaggaacagaaaaccaaacactccatattctcacttgtaagtgggagctaaatgagaacacgtggacacatagagggaaacaacacacactggggcctatgagagggcggaaggtgggaggagggagagatcaggaaaaataactaatggatacttagggtgatgaaataatctgtgtaacaaacccccatgacacacctttatgtatgtaacaaaccagcacttcctgcgcatgtacccctgaacttaaaagttaaaaaaaagttgaacttaaaaataacagattggcccatgccaatcaaagtataatagaaagcatagtatac

SEQ ID NO: 12611 - DNA, 1090 bp, Homo sapiens
  source 1..1090: mol_type = unassigned DNA
agtgctgctgcagctctgagcattcccacgtcaccagagaagccggtgggcaatgagatcatgtctgctttcaggttgtggcctggcctgctgatcatgttgggttctctctgccatagaggttcaccgtgtggcctttcaacacacgtagaaataggacacagagctctggagtttcttcagcttcacaatgggcgtgttaactacagagagctgttactagaacaccaggatgcgtatcaggctggaatcgtgtttcctgattgtttttaccctagcatctgcaaaggaggaaaattccatgatgtgtctgagagcactcactggactccgtttcttaatgcaagcgttcattatatccgagagaactatccccttccctgggagaaggacacagagaaactggtagctttcttgtttggaattacttctcacatggcggcagatgtcagctggcatagtctgggccttgaacaaggattccttaggaccatgggagctattgattttcacggctcctattcagaggctcattcggctggtgattttggtactgtttatttacatttgctaaattttctcgtggtatagttcacttataatgacatcactactgtgctttaaatatgtgtgtctttaatattttgctggttgcatgtattttctatttaatgttgcagttcatttagagtagagatgtacctcatttaacatagagatgtatttctaaaaacttgtgtctatatgtatttttttgttaaaaaattctacactttgttgttgacatgtcataattttagaaaaactttacttatacattgggttaaaattcattagctagtgtctcctactttcctaatactttagctttaaactagtaaactccaccttttgcctgtagtagtaaattgcttttaaatatttaaactaggtggtgaatggtgtttattaaacccttatggtcgatatttccttaaagtaaaacaaaaaacacctttggttatatggccagttctttcttaatttatatgtttcactaactaagatttttaaaagataattttttcttaaaaaaaaaaaaaaaaaaaaa

SEQ ID NO: 12612 - DNA, 1526 bp, Homo sapiens
  source 1..1526: mol_type = unassigned DNA
attctcctagatcaagaagacttcctcatcaagacctcattctatttgcacagccctgcagtggagagatttattgcgtttctttcatgcaatcaacgcagactttgatgtgaacacggggagagacagtgcacgtgcagctgacccacggggaacagtcagccccgggcacttgaaggagaacagaggcttccctaactcaagtcgctgtctcctgccagctgaacattctagaagcaacctctaaggagagaatgaattctaaaagaatgctgttattggttttatttgctttttcactgatgttggttgagcgttatttcaggaatcaccaagtagaagaacttcggctctcagactggtttcatcctagaaaacgccctgatgttataacgaaaacagactggctcgctcctgtcctatgggaagggactttcgacaggcgggtcctggaaaaacattacagaaggcggaatatcactgtgggcctggccgtctttgctactggcaggtttgcagaggagtacctgaggccgttcctacactccgcaaataagcacttcatgacaggctaccgagtgatcttctacatcatggtggacgccttcttcaagctgcctgacatagagcccagtcctcttcgaacgttcaaagcatttaaagtgggcaccgagaggtggtggctcgatggccccctggtgcatgtgaagagcctgggtgaacacatcgccagtcacatccaggacgaggtggacttcctcttcagcatggctgccaaccaggtcttccagaatgagttcggggtggagaccctgggcccgttggtggcccagctccacgcctggtggtatttcagaaacaccaagaacttcccttatgagaggaggccgacctcagcagcttgcatcccgtttggacagggagatttctattatggcaacttgatggttggtggcacaccccataatattttagacttcatcaaagaatatctgaacggagttattcatgacatcaaaaatggactcaatagcacttatgaaaagcaccttaacaaatatttttacctcaataaacccacctagctgttatcaccagcatacagctgggatcttgcattttctcctcctccacagatccaatacgtcaaggtcgcacatgattcccagaggaaattatgaattacgccatgaggtttatgacgaataaatgaatcacggcaatttcttataaatgagggaagtcttaagaccttccattttttagagacatacaaatttacatccttcccaaataaatgtttcttcttgccattttgagccatcttatttggctaatgtaggataaagaataaaaggataattacttaatgttaatacacagtaatgttattatctatgtattgtagacaatgtgaaaatacatttgacatagaatgaatatttttaatggagaaagactctagttgagaaaaaacattcataaaatggaaaagtagttcacgcaaaggaaaaaataaatgccag

SEQ ID NO: 12613 - DNA, 2522 bp, Homo sapiens
  source 1..2522: mol_type = unassigned DNA
gccgcccagggctgagtctcccatctcgcccctcggtccgcagggcctgcgatggagcctgcagccccgggtcgcgtccctccctgagcgcccccgtcggcggccatgctgccccgagggcgcccccgggcgctgggggccgccgcgctgttgctgctgctgctgctgctcggattcctcctgttcggtggggacctggggtgtgagcgccgcgagcctggcgggcgagcgggggccccgggatgcttccccggcccgctcatgccacgtgtccccccagacgggaggctgcggagagccgccgccctcgacggagacccgggggccggccccggggaccacaaccgctccgactgcggcccgcagccgccgccgccgcccaagtgcgagctcttgcatgtggccatcgtgtgtgcggggcataactccagccgagacgtcatcaccctggtgaagtccatgctcttctacaggaaaaatccactgcacctccacttggtgactgacgccgtggccagaaacatcctggagacgctcttccacacatggatggtgcctgctgtccgtgtcagcttttatcatgccgaccagctcaagccccaggtctcctggatccccaacaagcactactccggcctctatgggctaatgaagctggtgctgcccagtgccttgcctgctgagctggcccgcgtcattgtcctggacacggatgtcaccttcgcctctgacatctcggagctctgggccctctttgctcacttttctgacacgcaggcgatcggtcttgtggagaaccagagtgactggtacctgggcaacctctggaagaaccacaggccctggcctgccttgggccggggatttaacacaggtgtgatcctgctgcggctggaccggctccggcaggctggctgggagcagatgtggaggctgacagccaggcgggagctccttagcctgcctgccacctcactggctgaccaggacatcttcaacgctgtgatcaaggagcacccggggctagtgcagcgtctgccttgtgtctggaatgtgcagctgtcagatcacacactggccgagcgctgctactctgaggcgtctgacctcaaggtgatccactggaactcaccaaagaagcttcgggtgaagaacaagcatgtggaattcttccgcaatttctacctgaccttcctggagtacgatgggaacctgctgcggagagagctctttgtgtgccccagccagcccccacctggtgctgagcagttgcagcaggccctggcacaactggacgaggaagacccctgctttgagttccggcagcagcagctcactgtgcaccgtgtgcatgtcactttcctgccccatgaaccgccacccccccggcctcacgatgtcacccttgtggcccagctgtccatggaccggctgcagatgttggaagccctgtgcaggcactggcctggccccatgagcctggccttgtacctgacagacgcagaagctcagcagttcctgcatttcgtcgaggcctcaccagtgcttgctgcccggcaggacgtggcctaccatgtggtgtaccgtgaggggcccctataccccgtcaaccagcttcgcaacgtggccttggcccaggccctcacgccttacgtcttcctcagtgacattgacttcctgcctgcctattctctctacgactacctcagggcctccattgagcagctggggctgggcagccggcgcaaggcagcactggtggtgccggcattcgagaccctgcgctaccgcttcagcttcccccattccaaggtggagctgttggccttgctggatgcgggcactctctacaccttcaggtaccacgagtggccccgaggccacgcacccacagactatgcccgctggcgggaggctcaggccccgtaccgtgtgcaatgggcggccaactatgaaccctacgtggtggtgccacgagactgtccccgctatgatcctcgctttgtgggcttcggctggaacaaagtggcccacattgtggagctggatgcccaggaatatgagctcctggtgctgcccgaggccttcaccatccatctgccccacgctccaagcctggacatctcccgcttccgctccagccccacctatcgtgactgcctccaggccctcaaggacgaattccaccaggacttgtcccgccaccatggggctgctgccctcaaatacctcccagccctgcagcagccccagagccctgcccgaggctgaggctgggccggcgctgcccctcatcttagcattgggcagacaccagggcaacctgccctccgccatccctgctatttaaattatttaaggtctctgggaagggctggggcagagcatctgtggggtggggtcttccccttgctgctattgtatggctggggactggtctctctctgccccagccagtttggggctggttcccccatcttgaattgtttatccctttttcataattaaagttttaaaacatc

SEQ ID NO: 12614 - DNA, 1788 bp, Homo sapiens
  source 1..1788: mol_type = unassigned DNA
gcgagcgcagggcccagcccgggagccgctggagcagggcctgcgatggagcctgcagccccgggtcgcgtccctccctgagcgcccccgtcggcggccatgctgccccgagggcgcccccgggcgctgggggccgccgcgctgttgctgctgctgctgctgctcggattcctcctgttcggtggggacctggggtgtgagcgccgcgagcctggcgggcgagcgggggccccgggatgcttccccggcccgctcatgccacgtgtccccccagacgggaggctgcggagagccgccgccctcgacggagacccgggggccggccccggggaccacaaccgctccgactgcggcccgcagccgccgccgccgcccaagtgcgagctcttgcatgtggccatcgtgtgtgcggggcataactccagccgagacgtcatcaccctggtgaagtccatgctcttctacaggaaaaatccactgcacctccacttggtgactgacgccgtggccagaaacatcctggagacgctcttccacacatggatggtgcctgctgtccgtgtcagcttttatcatgccgaccagctcaagccccaggtctcctggatccccaacaagcactactccggcctctatgggctaatgaagctggtgctgcccagtgccttgcctgctgagctggcccgcgtcattgtcctggacacggatgtcaccttcgcctctgacatctcggagctctgggccctctttgctcacttttctgacacgcaggcgatcggtcttgtggagaaccagagtgactggtacctgggcaacctctggaagaaccacaggccctggcctgccttgggccggggatttaacacaggtgtgatcctgctgcggctggaccggctccggcaggctggctgggagcagatgtggaggctgacagccaggcgggagctccttagcctgcctgccacctcactggctgaccaggacatcttcaacgctgtgatcaaggagcacccggggctagtgcagcgtctgccttgtgtctggaatgtgcagctgtcagatcacacactggccgagcgctgctactctgaggcgtctgacctcaaggtgatccactggaactcaccaaagaagcttcgggtgaagaacaagcatgtggaattcttccgcaatttctacctgaccttcctggagtacgatgggaacctgctgcggagagagctctttgtgtgccccagccagcccccacctggtgctgagcagttgcagcaggccctggcacaactggacgaggaagacccctgctttgagttccggcagcagcagctcactgtgcaccgtgtgcatgtcactttcctgccccatgaaccgccacccccccggcctcacgatgtcacccttgtggcccagctgtccatggaccggctgcagatgttggaagccctgtgcaggcactggcctggccccatgagcctggccttgtacctgacagacgcagaagctcagcagttcctgcatttcgtcgaggcctcaccagtgcttgctgcccggcaggacgtggcctaccatgtggtgtaccgtgaggggcccctataccccgtcaaccagcttcgcaacgtggccttggcccaggccctcacgccttacgtcttcctcagtgacattgacttcctgcctgcctattctctctacgactacctcagggaggccagggccggcttcaacagcagctccacctgtggttgtgcccacccgtcgcatcaggcaagatggcccatggtggtctag

SEQ ID NO: 12615 - DNA, 2516 bp, Homo sapiens
  source 1..2516: mol_type = unassigned DNA
gcgagcgcagggcccagcccgggagccgctggagcagggcctgcgatggagcctgcagccccgggtcgcgtccctccctgagcgcccccgtcggcggccatgctgccccgagggcgcccccgggcgctgggggccgccgcgctgttgctgctgctgctgctgctcggattcctcctgttcggtggggacctggggtgtgagcgccgcgagcctggcgggcgagcgggggccccgggatgcttccccggcccgctcatgccacgtgtccccccagacgggaggctgcggagagccgccgccctcgacggagacccgggggccggccccggggaccacaaccgctccgactgcggcccgcagccgccgccgccgcccaagtgcgagctcttgcatgtggccatcgtgtgtgcggggcataactccagccgagacgtcatcaccctggtgaagtccatgctcttctacaggaaaaatccactgcacctccacttggtgactgacgccgtggccagaaacatcctggagacgctcttccacacatggatggtgcctgctgtccgtgtcagcttttatcatgccgaccagctcaagccccaggtctcctggatccccaacaagcactactccggcctctatgggctaatgaagctggtgctgcccagtgccttgcctgctgagctggcccgcgtcattgtcctggacacggatgtcaccttcgcctctgacatctcggagctctgggccctctttgctcacttttctgacacgcaggcgatcggtcttgtggagaaccagagtgactggtacctgggcaacctctggaagaaccacaggccctggcctgccttgggccggggatttaacacaggtgtgatcctgctgcggctggaccggctccggcaggctggctgggagcagatgtggaggctgacagccaggcgggagctccttagcctgcctgccacctcactggctgaccaggacatcttcaacgctgtgatcaaggagcacccggggctagtgcagcgtctgccttgtgtctggaatgtgcagctgtcagatcacacactggccgagcgctgctactctgaggcgtctgacctcaaggtgatccactggaactcaccaaagaagcttcgggtgaagaacaagcatgtggaattcttccgcaatttctacctgaccttcctggagtacgatgggaacctgctgcggagagagctctttgtgtgccccagccagcccccacctggtgctgagcagttgcagcaggccctggcacaactggacgaggaagacccctgctttgagttccggcagcagcagctcactgtgcaccgtgtgcatgtcactttcctgccccatgaaccgccacccccccggcctcacgatgtcacccttgtggcccagctgtccatggaccggctgcagatgttggaagccctgtgcaggcactggcctggccccatgagcctggccttgtacctgacagacgcagaagctcagcagttcctgcatttcgtcgaggcctcaccagtgcttgctgcccggcaggacgtggcctaccatgtggtgtaccgtgaggggcccctataccccgtcaaccagcttcgcaacgtggccttggcccaggccctcacgccttacgtcttcctcagtgacattgacttcctgcctgcctattctctctacgactacctcagggcctccattgagcagctggggctgggcagccggcgcaaggcagcactggtggtgccggcattcgagaccctgcgctaccgcttcagcttcccccattccaaggtggagctgttggccttgctggatgcgggcactctctacaccttcaggtaccacgagtggccccgaggccacgcacccacagactatgcccgctggcgggaggctcaggccccgtaccgtgtgcaatgggcggccaactatgaaccctacgtggtggtgccacgagactgtccccgctatgatcctcgctttgtgggcttcggctggaacaaagtggcccacattgtggagctggatgcccaggaatatgagctcctggtgctgcccgaggccttcaccatccatctgccccacgctccaagcctggacatctcccgcttccgctccagccccacctatcgtgactgcctccaggccctcaaggacgaattccaccaggacttgtcccgccaccatggggctgctgccctcaaatacctcccagccctgcagcagccccagagccctgcccgaggctgaggctgggccggcgctgcccctcatcttagcattgggcagacaccagggcaacctgccctccgccatccctgctatttaaattatttaaggtctctgggaagggctggggcagagcatctgtggggtggggtcttccccttgctgctattgtatggctggggactggtctctctctgccccagccagtttggggctggttcccccatcttgaattgtttatccctttttcataattaaagttttaaaacatc

SEQ ID NO: 12616 - DNA, 2528 bp, Homo sapiens
  source 1..2528: mol_type = unassigned DNA
gagtgctagccagccctgggaggctccgctgccagaaggaacgtcaaggggcctgcgatggagcctgcagccccgggtcgcgtccctccctgagcgcccccgtcggcggccatgctgccccgagggcgcccccgggcgctgggggccgccgcgctgttgctgctgctgctgctgctcggattcctcctgttcggtggggacctggggtgtgagcgccgcgagcctggcgggcgagcgggggccccgggatgcttccccggcccgctcatgccacgtgtccccccagacgggaggctgcggagagccgccgccctcgacggagacccgggggccggccccggggaccacaaccgctccgactgcggcccgcagccgccgccgccgcccaagtgcgagctcttgcatgtggccatcgtgtgtgcggggcataactccagccgagacgtcatcaccctggtgaagtccatgctcttctacaggaaaaatccactgcacctccacttggtgactgacgccgtggccagaaacatcctggagacgctcttccacacatggatggtgcctgctgtccgtgtcagcttttatcatgccgaccagctcaagccccaggtctcctggatccccaacaagcactactccggcctctatgggctaatgaagctggtgctgcccagtgccttgcctgctgagctggcccgcgtcattgtcctggacacggatgtcaccttcgcctctgacatctcggagctctgggccctctttgctcacttttctgacacgcaggcgatcggtcttgtggagaaccagagtgactggtacctgggcaacctctggaagaaccacaggccctggcctgccttgggccggggatttaacacaggtgtgatcctgctgcggctggaccggctccggcaggctggctgggagcagatgtggaggctgacagccaggcgggagctccttagcctgcctgccacctcactggctgaccaggacatcttcaacgctgtgatcaaggagcacccggggctagtgcagcgtctgccttgtgtctggaatgtgcagctgtcagatcacacactggccgagcgctgctactctgaggcgtctgacctcaaggtgatccactggaactcaccaaagaagcttcgggtgaagaacaagcatgtggaattcttccgcaatttctacctgaccttcctggagtacgatgggaacctgctgcggagagagctctttgtgtgccccagccagcccccacctggtgctgagcagttgcagcaggccctggcacaactggacgaggaagacccctgctttgagttccggcagcagcagctcactgtgcaccgtgtgcatgtcactttcctgccccatgaaccgccacccccccggcctcacgatgtcacccttgtggcccagctgtccatggaccggctgcagatgttggaagccctgtgcaggcactggcctggccccatgagcctggccttgtacctgacagacgcagaagctcagcagttcctgcatttcgtcgaggcctcaccagtgcttgctgcccggcaggacgtggcctaccatgtggtgtaccgtgaggggcccctataccccgtcaaccagcttcgcaacgtggccttggcccaggccctcacgccttacgtcttcctcagtgacattgacttcctgcctgcctattctctctacgactacctcagggcctccattgagcagctggggctgggcagccggcgcaaggcagcactggtggtgccggcattcgagaccctgcgctaccgcttcagcttcccccattccaaggtggagctgttggccttgctggatgcgggcactctctacaccttcaggtaccacgagtggccccgaggccacgcacccacagactatgcccgctggcgggaggctcaggccccgtaccgtgtgcaatgggcggccaactatgaaccctacgtggtggtgccacgagactgtccccgctatgatcctcgctttgtgggcttcggctggaacaaagtggcccacattgtggagctggatgcccaggaatatgagctcctggtgctgcccgaggccttcaccatccatctgccccacgctccaagcctggacatctcccgcttccgctccagccccacctatcgtgactgcctccaggccctcaaggacgaattccaccaggacttgtcccgccaccatggggctgctgccctcaaatacctcccagccctgcagcagccccagagccctgcccgaggctgaggctgggccggcgctgcccctcatcttagcattgggcagacaccagggcaacctgccctccgccatccctgctatttaaattatttaaggtctctgggaagggctggggcagagcatctgtggggtggggtcttccccttgctgctattgtatggctggggactggtctctctctgccccagccagtttggggctggttcccccatcttgaattgtttatccctttttcataattaaagttttaaaacatc

SEQ ID NO: 12617 - DNA, 2429 bp, Homo sapiens
  source 1..2429: mol_type = unassigned DNA
gccgcccagggctgagtctcccatctcgcccctcggtccgcagggcctgcgatggagcctgcagccccgggtcgcgtccctccctgagcgcccccgtcggcggccatgctgccccgagggcgcccccgggcgctgggggccgccgcgctgttgctgctgctgctgctgctcggattcctcctgttcgacgggaggctgcggagagccgccgccctcgacggagacccgggggccggccccggggaccacaaccgctccgactgcggcccgcagccgccgccgccgcccaagtgcgagctcttgcatgtggccatcgtgtgtgcggggcataactccagccgagacgtcatcaccctggtgaagtccatgctcttctacaggaaaaatccactgcacctccacttggtgactgacgccgtggccagaaacatcctggagacgctcttccacacatggatggtgcctgctgtccgtgtcagcttttatcatgccgaccagctcaagccccaggtctcctggatccccaacaagcactactccggcctctatgggctaatgaagctggtgctgcccagtgccttgcctgctgagctggcccgcgtcattgtcctggacacggatgtcaccttcgcctctgacatctcggagctctgggccctctttgctcacttttctgacacgcaggcgatcggtcttgtggagaaccagagtgactggtacctgggcaacctctggaagaaccacaggccctggcctgccttgggccggggatttaacacaggtgtgatcctgctgcggctggaccggctccggcaggctggctgggagcagatgtggaggctgacagccaggcgggagctccttagcctgcctgccacctcactggctgaccaggacatcttcaacgctgtgatcaaggagcacccggggctagtgcagcgtctgccttgtgtctggaatgtgcagctgtcagatcacacactggccgagcgctgctactctgaggcgtctgacctcaaggtgatccactggaactcaccaaagaagcttcgggtgaagaacaagcatgtggaattcttccgcaatttctacctgaccttcctggagtacgatgggaacctgctgcggagagagctctttgtgtgccccagccagcccccacctggtgctgagcagttgcagcaggccctggcacaactggacgaggaagacccctgctttgagttccggcagcagcagctcactgtgcaccgtgtgcatgtcactttcctgccccatgaaccgccacccccccggcctcacgatgtcacccttgtggcccagctgtccatggaccggctgcagatgttggaagccctgtgcaggcactggcctggccccatgagcctggccttgtacctgacagacgcagaagctcagcagttcctgcatttcgtcgaggcctcaccagtgcttgctgcccggcaggacgtggcctaccatgtggtgtaccgtgaggggcccctataccccgtcaaccagcttcgcaacgtggccttggcccaggccctcacgccttacgtcttcctcagtgacattgacttcctgcctgcctattctctctacgactacctcagggcctccattgagcagctggggctgggcagccggcgcaaggcagcactggtggtgccggcattcgagaccctgcgctaccgcttcagcttcccccattccaaggtggagctgttggccttgctggatgcgggcactctctacaccttcaggtaccacgagtggccccgaggccacgcacccacagactatgcccgctggcgggaggctcaggccccgtaccgtgtgcaatgggcggccaactatgaaccctacgtggtggtgccacgagactgtccccgctatgatcctcgctttgtgggcttcggctggaacaaagtggcccacattgtggagctggatgcccaggaatatgagctcctggtgctgcccgaggccttcaccatccatctgccccacgctccaagcctggacatctcccgcttccgctccagccccacctatcgtgactgcctccaggccctcaaggacgaattccaccaggacttgtcccgccaccatggggctgctgccctcaaatacctcccagccctgcagcagccccagagccctgcccgaggctgaggctgggccggcgctgcccctcatcttagcattgggcagacaccagggcaacctgccctccgccatccctgctatttaaattatttaaggtctctgggaagggctggggcagagcatctgtggggtggggtcttccccttgctgctattgtatggctggggactggtctctctctgccccagccagtttggggctggttcccccatcttgaattgtttatccctttttcataattaaagttttaaaacatc

SEQ ID NO: 12618 - DNA, 2404 bp, Homo sapiens
  source 1..2404: mol_type = unassigned DNA
gggcacggcgtcagcgcgtcgccggctgggccgcgccggtggccaggagggagagacaaggaggaggaggaggaggaggtatctctgcattagccagattggacatatgtaaagggacatcagtatatctggatcatcaggaatcatctttcttccagattgtgcttcaagaagaccatagggaagaacgcattttcatcttgctgcaaaagttgcaatagaagatctgaaggtttgaatgggccaatgagtatcctcatcattgaagcattctatggaggctcccataaacagctggtggatcttcttcaagaagagttaggagactgtgtcgtttatacccttcctgcaaagaaatggcattggagagcccggacatctgctttatatttctctcagaccattcccatcagtgagcattacaggaccctctttgcaagttcagtgcttaacctgaccgaactggctgcccttcggcctgaccttgggaaactgaaaaagattctgtattttcacgagaaccagttgatatatcctgtcaagaaatgtcaggagagggatttccaatatggatacaaccaaattctttcatgcctggtggctgatgtggttgtattcaactcagtttttaatatggaatcatttctcacttccatgggaaaatttatgaagctgattcctgatcacagacccaaggatctggaaagcatcatcagacccaagtgccaagttatttactttcccatcaggtttcctgatgtgagcagattcatgcccaagcacaaaacaacccatttaaagaagatgctcggccttaaaggaaatggcggtgcggttctgtccatggcccttccttttcagccagagcagagagattcagaggatttattgaagaattttaattcagagtgtgatacacactgtggccttgatactgcacgacaagaatatttgggtaactcattaagacaggaatcagacttgaaaaaatccacctcgtcagataattcaagctctcatcatggtgaaaataaacaaaatctgactgttgatccctgtgacattttgggtggagttgataatcagcaaagactgctacacattgtctggcctcacaggtggttggaagctgtgtactgtgggtgttacccactttgtcctaaagatttggtttatcccgaaatatttccagctgaatatctgtattctacacctgaacagctttcaaaaaggctccagaatttctgcaagagaccagatattataagaaaacatctctataagggtgaaatcgctccgttttcttgggcagccctacatggtaaattcaggtctctgcttacaacagaacctagggaagatttgtgacagatggggctaagtcacaaacttgcagcctaaggcagaatctgaagaactttccagagtgtgcccatatttacctgatcagagagaaaagaaaatctgcagaggaagctgagcctggctgcttgtcatagctgacacagagccatctgccacaaacctgtggcggcttcagatctccaatccctgccaccaccccaactcaaattaaatacagattcctagagacgttatgatggttacacatgtcctcggcatcacatgtaggagactgttcaaaaaaaatatgtggcctgttgtataaccgcactcatgtatcccatatgtggtgccacattgaatttccggttgaatccgtttttatcctttgtactggatgacatggtgcctgaattctttcttttcgccgacacgatggcagccaaactgcagcttcaaacgctcacacttggctgggtttctacctaggttgccaggttatcatcggagccttcttgtgtcctcaaagggccacgaggcctgaaaggaggatcagaatgctttgggattaattgggcagccatcgcagaattgtttgtgggcaaagggctgctttagcacttttcttttagcaaattaatgactctcaggcacagggggttttaagtgaaggtattaataagaggtctggcaggtattcccatgattcacagagttacatttgcatttaattaatcttaaagttgcaagataaacagctgtaattcggacaaacatgacaaacacagtgaagccaactatcccataaaatgaacactgacatacttgttttaatttttttcccagcgtaaaaatagaaaaatcaaaatactcctaacaaaaccagtgattttgatagaaatatttctccaatatacttgcatccacctacaaatataaccttttcaagataaatcgcttatgatttcaatagtcaaactgctgtgtttgttgatgtaaagatgttttgaatggctagatggtaaaataaattcttaataaagtacccactgcaattttt

SEQ ID NO: 12619 - DNA, 2607 bp, Homo sapiens
  source 1..2607: mol_type = unassigned DNA
atatggttgtctgagagcatcagaaaagaacctgctctggtcaggtatctctgcattagccagattggacatatgtaaagggacatcagtatatctggatcatcagattgtgcttcaagaagaccatagggaagaacgcattttcatcttgctgcaaaagttgcaatagaagatctgaaggtttgaatgggccaatgagtatcctcatcattgaagcattctatggaggctcccataaacagctggtggatcttcttcaagaagagttaggagactgtgtcgtttatacccttcctgcaaagaaatggcattggagagcccggacatctgctttatatttctctcagaccattcccatcagtgagcattacaggaccctctttgcaagttcagtgcttaacctgaccgaactggctgcccttcggcctgaccttgggaaactgaaaaagattctgtattttcacgagaaccagttgatatatcctgtcaagaaatgtcaggagagggatttccaatatggatacaaccaaattctttcatgcctggtggctgatgtggttgtattcaactcagtttttaatatggaatcatttctcacttccatgggaaaatttatgaagctgattcctgatcacagacccaaggatctggaaagcatcatcagacccaagtgccaagttatttactttcccatcaggtttcctgatgtgagcagattcatgcccaagcacaaaacaacccatttaaagaagatgctcggccttaaaggaaatggcggtgcggttctgtccatggcccttccttttcagccagagcagagagattcagaggatttattgaagaattttaattcagagtgtgatacacactgtggccttgatactgcacgacaagaatatttgggtaactcattaagacaggaatcagacttgaaaaaatccacctcgtcagataattcaagctctcatcatggtgaaaataaacaaaatctgactgttgatccctgtgacattttgggtggagttgataatcagcaaagactgctacacattgtctggcctcacaggtgggagcatgataaagatccagaaagcttttttaaggtattaatgcatcttaaagacttaggactcaatttccacgtgtctgtacttggagaaaccttcacagatgtcccagatattttttcagaggccaaaaaggcattgggatcttctgtcttacactggggctacttacccagcaaagatgactatttccaagtactgtgcatggctgatgttgtcatctcaacagctaagcatgaattctttggagtggcaatgttggaagctgtgtactgtgggtgttacccactttgtcctaaagatttggtttatcccgaaatatttccagctgaatatctgtattctacacctgaacagctttcaaaaaggctccagaatttctgcaagagaccagatattataagaaaacatctctataagggtgaaatcgctccgttttcttgggcagccctacatggtaaattcaggtctctgcttacaacagaacctagggaagatttgtgacagatggggctaagtcacaaacttgcagcctaaggcagaatctgaagaactttccagagtgtgcccatatttacctgatcagagagaaaagaaaatctgcagaggaagctgagcctggctgcttgtcatagctgacacagagccatctgccacaaacctgtggcggcttcagatctccaatccctgccaccaccccaactcaaattaaatacagattcctagagacgttatgatggttacacatgtcctcggcatcacatgtaggagactgttcaaaaaaaatatgtggcctgttgtataaccgcactcatgtatcccatatgtggtgccacattgaatttccggttgaatccgtttttatcctttgtactggatgacatggtgcctgaattctttcttttcgccgacacgatggcagccaaactgcagcttcaaacgctcacacttggctgggtttctacctaggttgccaggttatcatcggagccttcttgtgtcctcaaagggccacgaggcctgaaaggaggatcagaatgctttgggattaattgggcagccatcgcagaattgtttgtgggcaaagggctgctttagcacttttcttttagcaaattaatgactctcaggcacagggggttttaagtgaaggtattaataagaggtctggcaggtattcccatgattcacagagttacatttgcatttaattaatcttaaagttgcaagataaacagctgtaattcggacaaacatgacaaacacagtgaagccaactatcccataaaatgaacactgacatacttgttttaatttttttcccagcgtaaaaatagaaaaatcaaaatactcctaacaaaaccagtgattttgatagaaatatttctccaatatacttgcatccacctacaaatataaccttttcaagataaatcgcttatgatttcaatagtcaaactgctgtgtttgttgatgtaaagatgttttgaatggctagatggtaaaataaattcttaataaagtacccactgcaattttt

SEQ ID NO: 12620 - DNA, 2408 bp, Homo sapiens
  source 1..2408: mol_type = unassigned DNA
aggtctggctagctgtccctaacgtcatttcctggtctcaactctttaagaccctgacatactctgagattggagtgaagatttctgtgacatgctgggtatctctgcattagccagattggacatatgtaaagggacatcagtatatctggatcatcagattgtgcttcaagaagaccatagggaagaacgcattttcatcttgctgcaaaagttgcaatagaagatctgaaggtttgaatgggccaatgagtatcctcatcattgaagcattctatggaggctcccataaacagctggtggatcttcttcaagaagagttaggagactgtgtcgtttatacccttcctgcaaagaaatggcattggagagcccggacatctgctttatatttctctcagaccattcccatcagtgagcattacaggaccctctttgcaagttcagtgcttaacctgaccgaactggctgcccttcggcctgaccttgggaaactgaaaaagattctgtattttcacgagaaccagttgatatatcctgtcaagaaatgtcaggagagggatttccaatatggatacaaccaaattctttcatgcctggtggctgatgtggttgtattcaactcagtttttaatatggaatcatttctcacttccatgggaaaatttatgaagctgattcctgatcacagacccaaggatctggaaagcatcatcagacccaagtgccaagttatttactttcccatcaggtttcctgatgtgagcagattcatgcccaagcacaaaacaacccatttaaagaagatgctcggccttaaaggaaatggcggtgcggttctgtccatggcccttccttttcagccagagcagagagattcagaggatttattgaagaattttaattcagagtgtgatacacactgtggccttgatactgcacgacaagaatatttgggtaactcattaagacaggaatcagacttgaaaaaatccacctcgtcagataattcaagctctcatcatggtgaaaataaacaaaatctgactgttgatccctgtgacattttgggtggagttgataatcagcaaagactgctacacattgtctggcctcacaggtggttggaagctgtgtactgtgggtgttacccactttgtcctaaagatttggtttatcccgaaatatttccagctgaatatctgtattctacacctgaacagctttcaaaaaggctccagaatttctgcaagagaccagatattataagaaaacatctctataagggtgaaatcgctccgttttcttgggcagccctacatggtaaattcaggtctctgcttacaacagaacctagggaagatttgtgacagatggggctaagtcacaaacttgcagcctaaggcagaatctgaagaactttccagagtgtgcccatatttacctgatcagagagaaaagaaaatctgcagaggaagctgagcctggctgcttgtcatagctgacacagagccatctgccacaaacctgtggcggcttcagatctccaatccctgccaccaccccaactcaaattaaatacagattcctagagacgttatgatggttacacatgtcctcggcatcacatgtaggagactgttcaaaaaaaatatgtggcctgttgtataaccgcactcatgtatcccatatgtggtgccacattgaatttccggttgaatccgtttttatcctttgtactggatgacatggtgcctgaattctttcttttcgccgacacgatggcagccaaactgcagcttcaaacgctcacacttggctgggtttctacctaggttgccaggttatcatcggagccttcttgtgtcctcaaagggccacgaggcctgaaaggaggatcagaatgctttgggattaattgggcagccatcgcagaattgtttgtgggcaaagggctgctttagcacttttcttttagcaaattaatgactctcaggcacagggggttttaagtgaaggtattaataagaggtctggcaggtattcccatgattcacagagttacatttgcatttaattaatcttaaagttgcaagataaacagctgtaattcggacaaacatgacaaacacagtgaagccaactatcccataaaatgaacactgacatacttgttttaatttttttcccagcgtaaaaatagaaaaatcaaaatactcctaacaaaaccagtgattttgatagaaatatttctccaatatacttgcatccacctacaaatataaccttttcaagataaatcgcttatgatttcaatagtcaaactgctgtgtttgttgatgtaaagatgttttgaatggctagatggtaaaataaattcttaataaagtacccactgcaatttttaa

SEQ ID NO: 12621 - DNA, 2828 bp, Homo sapiens
  source 1..2828: mol_type = unassigned DNA
caggtatctctgcattagccagattggacatatgtaaagggacatcagtatatctggatcatcagattgtgcttcaagaagaccatagggaagaacgcattttcatcttgctgcaaaagttgcaatagaagatctgaaggtttgaatgggccaatgagtatcctcatcattgaagcattctatggaggctcccataaacagctggtggatcttcttcaagaagagttaggagactgtgtcgtttatacccttcctgcaaagaaatggcattggagagcccggacatctgctttatatttctctcagaccattcccatcagtgagcattacaggaccctctttgcaagttcagtgcttaacctgaccgaactggctgcccttcggcctgaccttgggaaactgaaaaagattctgtattttcacgagaaccagttgatatatcctgtcaagaaatgtcaggagagggatttccaatatggatacaaccaaattctttcatgcctggtggctgatgtggttgtattcaactcagtttttaatatggaatcatttctcacttccatgggaaaatttatgaagctgattcctgatcacagacccaaggatctggaaagcatcatcagacccaagtgccaagttatttactttcccatcaggtttcctgatgtgagcagattcatgcccaagcacaaaacaacccatttaaagaagatgctcggccttaaaggaaatggcggtgcggttctgtccatggcccttccttttcagccagagcagagagattcagaggatttattgaagaattttaattcagagtgtgatacacactgtggccttgatactgcacgacaagaatatttgggtaactcattaagacaggaatcagacttgaaaaaatccacctcgtcagataattcaagctctcatcatggtgaaaataaacaaaatctgactgttgatccctgtgacattttgggtggagttgataatcagcaaagactgctacacattgtctggcctcacaggtgggagcatgataaagatccagaaagcttttttaaggtattaatgcatcttaaagacttaggactcaatttccacgtgtctgtacttggagaaaccttcacagatgtcccagatattttttcagaggccaaaaaggcattgggatcttctgtcttacactggggctacttacccagcaaagatgactatttccaagtactgtgcatggctgatgttgtcatctcaacagctaagcatgaattctttggagtggcaatgttggaagctgtgtactgtgggtgttacccactttgtcctaaagatttggtttatcccgaaatatttccagctgaatatctgtattctacacctgaacagctttcaaaaaggctccagaatttctgcaagagaccagatattataagaaaacatctctataagggtgaaatcgctccgttttcttgggcagccctacatggtaaattcaggtctctgcttacaacagaacctagggaagatttgtgacagatggggctaagtcacaaacttgcagcctaaggcagaatctgaagaactttccagagtgtgcccatatttacctgatcagagagaaaagaaaatctgcagaggaagctgagcctggctgcttgtcatagctgacacagagccatctgccacaaacctgtggcggcttcagatctccaatccctgccaccaccccaactcaaattaaatacagattcctagagacgttatgatggttacacatgtcctcggcatcacatgtaggagactgttcaaaaaaaatatgtggcctgttgtataaccgcactcatgtatcccatatgtggtgccacattgaatttccggttgaatccgtttttatcctttgtactggatgacatggtgcctgaattctttcttttcgccgacacgatggcagccaaactgcagcttcaaacgctcacacttggctgggtttctacctaggttgccaggttatcatcggagccttcttgtgtcctcaaagggccacgaggcctgaaaggaggatcagaatgctttgggattaattgggcagccatcgcagaattgtttgtgggcaaagggctgctttagcacttttcttttagcaaattaatgactctcaggcacagggggttttaagtgaaggtattaataagaggtctggcaggtattcccatgattcacagagttacatttgcatttaattaatcttaaagttgcaagataaacagctgtaattcggacaaacatgacaaacacagtgaagccaactatcccataaaatgaacactgacatacttgttttaatttttttcccagcgtaaaaatagaaaaatcaaaatactcctaacaaaaccagtgattttgatagaaatatttctccaatatacttgcatccacctacaaatataaccttttcaagataaatcgcttatgatttcaatagtcaaactgctgtgtttgttgatgtaaagatgttttgaatggctagatggtaaaataaattcttaataaagtacccactgcaatttttaattagcatattcatttacatatagatgtatacatctacctatgtgtttctcactgaacgttttccttgtgacagagacaacaaatacaattgtttcttttccggatgaacaaggatctgttttgcaaatgtttgtaagatattatgacatttccaagattttctttgcattctggaaagcaggaggtaaacatttgtagtcattaaggtaaagtctgttgataaaccatcttctgtttactgacaggtaaattgtaacttt

SEQ ID NO: 12622 - DNA, 2954 bp, Homo sapiens
  source 1..2954: mol_type = unassigned DNA
ggacttgctggagatatagaaagggacctgacacagtttctggccttaaggagctctcattccagtggggaagaaaaaaactaaaataatgatgtccgagagcatcagaaaagaacctgctctggtcaggtatctctgcattagccagattggacatatgtaaagggacatcagtatatctggatcatcagattgtgcttcaagaagaccatagggaagaacgcattttcatcttgctgcaaaagttgcaatagaagatctgaaggtttgaatgggccaatgagtatcctcatcattgaagcattctatggaggctcccataaacagctggtggatcttcttcaagaagagttaggagactgtgtcgtttatacccttcctgcaaagaaatggcattggagagcccggacatctgctttatatttctctcagaccattcccatcagtgagcattacaggaccctctttgcaagttcagtgcttaacctgaccgaactggctgcccttcggcctgaccttgggaaactgaaaaagattctgtattttcacgagaaccagttgatatatcctgtcaagaaatgtcaggagagggatttccaatatggatacaaccaaattctttcatgcctggtggctgatgtggttgtattcaactcagtttttaatatggaatcatttctcacttccatgggaaaatttatgaagctgattcctgatcacagacccaaggatctggaaagcatcatcagacccaagtgccaagttatttactttcccatcaggtttcctgatgtgagcagattcatgcccaagcacaaaacaacccatttaaagaagatgctcggccttaaaggaaatggcggtgcggttctgtccatggcccttccttttcagccagagcagagagattcagaggatttattgaagaattttaattcagagtgtgatacacactgtggccttgatactgcacgacaagaatatttgggtaactcattaagacaggaatcagacttgaaaaaatccacctcgtcagataattcaagctctcatcatggtgaaaataaacaaaatctgactgttgatccctgtgacattttgggtggagttgataatcagcaaagactgctacacattgtctggcctcacaggtgggagcatgataaagatccagaaagcttttttaaggtattaatgcatcttaaagacttaggactcaatttccacgtgtctgtacttggagaaaccttcacagatgtcccagatattttttcagaggccaaaaaggcattgggatcttctgtcttacactggggctacttacccagcaaagatgactatttccaagtactgtgcatggctgatgttgtcatctcaacagctaagcatgaattctttggagtggcaatgttggaagctgtgtactgtgggtgttacccactttgtcctaaagatttggtttatcccgaaatatttccagctgaatatctgtattctacacctgaacagctttcaaaaaggctccagaatttctgcaagagaccagatattataagaaaacatctctataagggtgaaatcgctccgttttcttgggcagccctacatggtaaattcaggtctctgcttacaacagaacctagggaagatttgtgacagatggggctaagtcacaaacttgcagcctaaggcagaatctgaagaactttccagagtgtgcccatatttacctgatcagagagaaaagaaaatctgcagaggaagctgagcctggctgcttgtcatagctgacacagagccatctgccacaaacctgtggcggcttcagatctccaatccctgccaccaccccaactcaaattaaatacagattcctagagacgttatgatggttacacatgtcctcggcatcacatgtaggagactgttcaaaaaaaatatgtggcctgttgtataaccgcactcatgtatcccatatgtggtgccacattgaatttccggttgaatccgtttttatcctttgtactggatgacatggtgcctgaattctttcttttcgccgacacgatggcagccaaactgcagcttcaaacgctcacacttggctgggtttctacctaggttgccaggttatcatcggagccttcttgtgtcctcaaagggccacgaggcctgaaaggaggatcagaatgctttgggattaattgggcagccatcgcagaattgtttgtgggcaaagggctgctttagcacttttcttttagcaaattaatgactctcaggcacagggggttttaagtgaaggtattaataagaggtctggcaggtattcccatgattcacagagttacatttgcatttaattaatcttaaagttgcaagataaacagctgtaattcggacaaacatgacaaacacagtgaagccaactatcccataaaatgaacactgacatacttgttttaatttttttcccagcgtaaaaatagaaaaatcaaaatactcctaacaaaaccagtgattttgatagaaatatttctccaatatacttgcatccacctacaaatataaccttttcaagataaatcgcttatgatttcaatagtcaaactgctgtgtttgttgatgtaaagatgttttgaatggctagatggtaaaataaattcttaataaagtacccactgcaatttttaattagcatattcatttacatatagatgtatacatctacctatgtgtttctcactgaacgttttccttgtgacagagacaacaaatacaattgtttcttttccggatgaacaaggatctgttttgcaaatgtttgtaagatattatgacatttccaagattttctttgcattctggaaagcaggaggtaaacatttgtagtcattaaggtaaagtctgttgataaaccatcttctgtttactgacaggtaaattgtaacttt

SEQ ID NO: 12623 - DNA, 601 bp, Homo sapiens
  source 1..601: mol_type = unassigned DNA
aggtgacactgatgataaaaatccatccaagaatttatatgtgacatctgcagcaggttcaaatctctcagctatgagacaaactggatacttcctaaggattgccatctattatgcacagagagccaaaatccgttactgaaattgtctgggtatctctgcattagccagattggacatatgtaaagggacatcagtatatctggatcatcagattgtgcttcaagaagaccatagggaagaacgcattttcatcttgctgcaaaagttgcaatagaagatctgaaggtttgaatgggccaatgagtatcctcatcattgaagcattctatggaggctcccataaacagctggtggatcttcttcaagaagagttaggagactgtgtcgtttatacccttcctgcaaagaaatggcattggagagcccggacatctgctttatatttctctcagaccattcccatcagtgagcattacaggaccctctttgcaagttcagtgcttaacctgaccgaactggctgcccttcggcctgaccttgggaaactgaaaaagattctgtattttcacgagaaccagttgatatatcctgtcaagaa

SEQ ID NO: 12624 - DNA, 753 bp, Homo sapiens
  source 1..753: mol_type = unassigned DNA
gtatctctgcattagccagattggacatatgtaaagggacatcagtatatctggatcatcagtggtataatgtgttatagaggtggacaagcctgcagattgaagtggggatcgtccagattgttcccttccctggaccatatgattgtgcttcaagaagaccatagggaagaacgcattttcatcttgctgcaaaagttgcaatagaagatctgaaggtttgaatgggccaatgagtatcctcatcattgaagcattctatggaggctcccataaacagctggtggatcttcttcaagaagagttaggagactgtgtcgtttatacccttcctgcaaagaaatggcattggagagcccggacatctgctttatatttctctcagaccattcccatcagtgagcattacaggaccctctttgcaagttcagtgcttaacctgaccgaactggctgcccttcggcctgaccttgggaaactgaaaaagattctgtattttcacgagaaccagttgatatatcctgtcaagaaatgtcaggagagggatttccaatatggatacaaccaaattctttcatgcctggtggctgatgtggttgtattcaactcagtttttaatatggaatcatttctcacttccatgggaaaatttatgaagctgattcctgatcacagacccaaggatctggaaagcatcatcagacccaagtgccaagttatttactttcccatcaggtttcctgatgtgagcag

SEQ ID NO: 12625 - DNA, 2659 bp, Homo sapiens
  source 1..2659: mol_type = unassigned DNA
gggcacggcgtcagcgcgtcgccggctgggccgcgccggtggccaggagggagagacaaggaggaggaggaggaggaggtatctctgcattagccagattggacatatgtaaagggacatcagtatatctggatcatcaggaatcatctttcttccagattgtgcttcaagaagaccatagggaagaacgcattttcatcttgctgcaaaagttgcaatagaagatctgaaggtttgaatgggccaatgagtatcctcatcattgaagcattctatggaggctcccataaacagctggtggatcttcttcaagaagagttaggagactgtgtcgtttatacccttcctgcaaagaaatggcattggagagcccggacatctgctttatatttctctcagaccattcccatcagtgagcattacaggaccctctttgcaagttcagtgcttaacctgaccgaactggctgcccttcggcctgaccttgggaaactgaaaaagattctgtattttcacgagaaccagttgatatatcctgtcaagaaatgtcaggagagggatttccaatatggatacaaccaaattctttcatgcctggtggctgatgtggttgtattcaactcagtttttaatatggaatcatttctcacttccatgggaaaatttatgaagctgattcctgatcacagacccaaggatctggaaagcatcatcagacccaagtgccaagttatttactttcccatcaggtttcctgatgtgagcagattcatgcccaagcacaaaacaacccatttaaagaagatgctcggccttaaaggaaatggcggtgcggttctgtccatggcccttccttttcagccagagcagagagattcagaggatttattgaagaattttaattcagagtgtgatacacactgtggccttgatactgcacgacaagaatatttgggtaactcattaagacaggaatcagacttgaaaaaatccacctcgtcagataattcaagctctcatcatggtgaaaataaacaaaatctgactgttgatccctgtgacattttgggtggagttgataatcagcaaagactgctacacattgtctggcctcacaggtgggagcatgataaagatccagaaagcttttttaaggtattaatgcatcttaaagacttaggactcaatttccacgtgtctgtacttggagaaaccttcacagatgtcccagatattttttcagaggccaaaaaggcattgggatcttctgtcttacactggggctacttacccagcaaagatgactatttccaagtactgtgcatggctgatgttgtcatctcaacagctaagcatgaattctttggagtggcaatgttggaagctgtgtactgtgggtgttacccactttgtcctaaagatttggtttatcccgaaatatttccagctgaatatctgtattctacacctgaacagctttcaaaaaggctccagaatttctgcaagagaccagatattataagaaaacatctctataagggtgaaatcgctccgttttcttgggcagccctacatggtaaattcaggtctctgcttacaacagaacctagggaagatttgtgacagatggggctaagtcacaaacttgcagcctaaggcagaatctgaagaactttccagagtgtgcccatatttacctgatcagagagaaaagaaaatctgcagaggaagctgagcctggctgcttgtcatagctgacacagagccatctgccacaaacctgtggcggcttcagatctccaatccctgccaccaccccaactcaaattaaatacagattcctagagacgttatgatggttacacatgtcctcggcatcacatgtaggagactgttcaaaaaaaatatgtggcctgttgtataaccgcactcatgtatcccatatgtggtgccacattgaatttccggttgaatccgtttttatcctttgtactggatgacatggtgcctgaattctttcttttcgccgacacgatggcagccaaactgcagcttcaaacgctcacacttggctgggtttctacctaggttgccaggttatcatcggagccttcttgtgtcctcaaagggccacgaggcctgaaaggaggatcagaatgctttgggattaattgggcagccatcgcagaattgtttgtgggcaaagggctgctttagcacttttcttttagcaaattaatgactctcaggcacagggggttttaagtgaaggtattaataagaggtctggcaggtattcccatgattcacagagttacatttgcatttaattaatcttaaagttgcaagataaacagctgtaattcggacaaacatgacaaacacagtgaagccaactatcccataaaatgaacactgacatacttgttttaatttttttcccagcgtaaaaatagaaaaatcaaaatactcctaacaaaaccagtgattttgatagaaatatttctccaatatacttgcatccacctacaaatataaccttttcaagataaatcgcttatgatttcaatagtcaaactgctgtgtttgttgatgtaaagatgttttgaatggctagatggtaaaataaattcttaataaagtacccactgcaattttt

SEQ ID NO: 12626 - DNA, 2634 bp, Homo sapiens
  source 1..2634: mol_type = unassigned DNA
gcaaatctgttcgctcgcaaccctacctacctctctcccgaaccggagaaaaccttcggcggggtccttccgggttttgtgtcgaatctgcggcggcgacccggcgccgcgtcacgcggtggtgaatgtgcggcagcacgcgcgccgcgtcgtttacgcggcgatttcatcatgctccgagccgggcggcgcgcgccgcttccgtcgccaccctctctggacagcccagggccgcaggctcatgccctctccgcgtccagtgctgcttagaggtgctcgcgccgctctgctgctgctgctgccgccccggctcttagcccgaccctcgctcctgctccgccggtccctcagcgcggcctcctgccccccgatctccttgcccgccgccgcctcccggagcagcatggacggcgcgggggctgaggaggtgctggcacctctgaggctagcagtgcgccagcagggagatcttgtgcgaaaactcaaagaagataaagcaccccaagtagacgtagacaaagcagtggctgagctcaaagcccgcaagagggttctggaagcaaaggagctggcgttacagcccaaagatgatattgtagaccgagcaaaaatggaagataccctgaagaggaggtttttctatgatcaagcttttgctatttatggaggtgttagtggtctgtatgactttgggccagttggctgtgctttgaagaacaatattattcagacctggaggcagcactttatccaagaggaacagatcctggagatcgattgcaccatgctcacccctgagccagttttaaagacctctggccatgtagacaaatttgctgacttcatggtgaaagacgtaaaaaatggagaatgttttcgtgctgaccatctattaaaagctcatttacagaaattgatgtctgataagaagtgttctgtcgaaaagaaatcagaaatggaaagtgttttggcccagcttgataactatggacagcaagaacttgcggatctttttgtgaactataatgtaaaatctcccattactggaaatgatctatcccctccagtgtcttttaacttaatgttcaagactttcattgggcctggaggaaacatgcctgggtacttgagaccagaaactgcacaggggattttcttgaatttcaaacgacttttggagttcaaccaaggaaagttgccttttgctgctgcccagattggaaattcttttagaaatgagatctcccctcgatctggactgatcagagtcagagaattcacaatggcagaaattgagcactttgtagatcccagtgagaaagaccaccccaagttccagaatgtggcagaccttcacctttatttgtattcagcaaaagcccaggtcagcggacagtccgctcggaaaatgcgcctgggagatgctgttgaacagggtgtgattaataacacagtattaggctatttcattggccgcatctacctctacctcacgaaggttggaatatctccagataaactccgcttccggcagcacatggagaatgagatggcccattatgcctgtgactgttgggatgcagaatccaaaacatcctacggttggattgagattgttggatgtgctgatcgttcctgttatgacctctcctgtcatgcacgagccaccaaagtcccacttgtagctgagaaacctctgaaagaacccaaaacagtcaatgttgttcagtttgaacccagtaagggagcaattggtaaggcatataagaaggatgcaaaactggtgatggagtatcttgccatttgtgatgagtgctacattacagaaatggagatgctgctgaatgagaaaggggaattcacaattgaaactgaagggaaaacatttcagttaacaaaagacatgatcaatgtgaagagattccagaaaacactatatgtggaagaagttgttccgaatgtaattgaaccttccttcggcctgggtaggatcatgtatacggtatttgaacatacattccatgtacgagaaggagatgaacagagaacattcttcagtttccctgctgtagttgctccattcaaatgttccgtcctcccactgagccaaaaccaggagttcatgccatttgtcaaggaattatcggaagccctgaccaggcatggagtatctcacaaagtagacgattcctctgggtcaatcggaaggcgctatgccaggactgatgagattggcgtggcttttggtgtcaccattgactttgacacagtgaacaagaccccccacactgcaactctgagggaccgtgactcaatgcggcagataagagcagagatctctgagctgcccagcatagtccaagacctagccaatggcaacatcacatgggctgatgtggaggccaggtatcctctgtttgaagggcaagagactggtaaaaaagagacaatcgaggaatgaggacaattttgacaacttttgaccacttgcgctaataaaaaaaaaaaaaaactactcttatgtccactttacaaaagaaaacagcattgtgattactcccagggaccgtattttatcttcagtggctgcctgattttacccccacaattaaagttgaaggaatcctgaacaaa

SEQ ID NO: 12627 - DNA, 1994 bp, Homo sapiens
  source 1..1994: mol_type = unassigned DNA
ctagttaaggcggcacagggccgaggcgtagtgtgggtgactcctccgttccttgggtcccgtcgtctgtgatactgcagcgcagccatggcagaaccgcagcccccgtccggcggcctcacggacgaggccgccctcagttgctgctccgacgcggaccccagtaccaaggattttctattgcagcagaccatgctacgagtgaaggatcctaagaagtcactggatttttatactagagttcttggaatgacgctaatccaaaaatgtgattttcccattatgaagttttcactctacttcttggcttatgaggataaaaatgacatccctaaagaaaaagatgaaaaaatagcctgggcgctctccagaaaagctacacttgagctgacacacaattggggcactgaagatgatgagacccagagttaccacaatggcaattcagaccctcgaggattcggtcatattggaattgctgttcctgatgtatacagtgcttgtaaaaggtttgaagaactgggagtcaaatttgtgaagaaacctgatgatggtaaaatgaaaggcctggcatttattcaagatcctgatggctactggattgaaattttgaatcctaacaaaatggcaaccttaatgtagtgctgtgagaattctcctttgagatttcagaagaaaggaaacaatgtgattcaagatatttacataccagaagcatctaggactgatggatcactgtcccgattcaaattattcttcagtccatttccccttcctatttcagctgttccttttcacctaactgttcagtcattctggttttcaagcagtgctttatctcatgtccttgaatatagttgtgtaactttattttttaggtaataattagaacagttcccttcagaggctgcatttgccttcttctgccacctaaatattacttcccttcaaatctgcctttgaatcatcatttttaaaaaaaaattaacatgtttttgttgtagttatcttctggggtttcaattcctcagaaacaacttttttcacaacggaaaggaaagaacactagtgttctttcagtaaagtacaaagtgtttattttacaaaagagtaggtactcttgagagcaattcaaatcatgctgacaaggatactgatagaaaaagtgatttcttcttattataaagtacatttaaagttcaaggactaaccttatttatttgggaaaggggaggaggaaggaaatgatatggtacccagacactgggctaggctgcaactttatctcatttaatactcccagctgtcatgtgagaaagaaagcaggctaggcatgtgaaatcactttcatggattattaatggatttaagagggcatcaatcagctcaactcaagatttcataatcatttttagtatttagattgtgcctcaaagttgtagtacctcacaatacctccactggtttcctgttgtaaaaaccttcagtgagtttgaccattgtgctcttggctcttgggctggagtaccgtggtgagggagtaaacactagaagtctttagtacaaaactgctctagggacacctggtgattcctacacaagtgatgtttatatttctcataaagagtcttccctatcccaaggtcttcatgatgccagtagccatatatgataaattatgttcagtgataacttagttatcagaaatcagctcagtggtcttccccgccatgattcacatttgatgagtttttaaaaatcaaagtgattttgaaaatctctaatggctcagaaaataaaaacatccagtttgtggatgactatatttagatttctctagactctagtggaagacctttggaaaggccatgccaaccgtgcttgtactgctagaagcactttatgtttcctttttgggtgaaatggatttatgtgagtgctttaaacaaatagcaatacttatagactgaaataaaatgaaacttcaaataaga

SEQ ID NO: 12628 - DNA, 1280 bp, Homo sapiens
  source 1..1280: mol_type = unassigned DNA
actccagcctggccccgccccggcccagctacattcccgggccagcttctgtactgccaggtccgggtcggcggctgcactgcggatgagaccggtgcgactcatgaaggtgttcgtcacccgcaggatacccgccgagggtagggtcgcgctcgcccgggcggcagactgtgaggtggagcagtgggactcggatgagcccatccctgccaaggagctagagcgaggtgtggcgggggcccacggcctgctctgcctcctctccgaccacgtggacaagaggatcctggatgctgcaggggccaatctcaaagtcatcagcaccatgtctgtgggcatcgaccacttggctttggatgaaatcaagaagcgtgggatccgagttggctacaccccagatgtcctgacagataccaccgccgaactcgcagtctccctgctacttaccacctgccgccggttgccggaggccatcgaggaagtgaagaatggtggctggacctcgtggaagcccctctggctgtgtggctatggactcacgcagagcactgtcggcatcatcgggctggggcgcataggccaggccattgctcggcgtctgaaaccattcggtgtccagagatttctgtacacagggcgccagcccaggcctgaggaagcagcagaattccaggcagagtttgtgtctacccctgagctggctgcccaatctgatttcatcgtcgtggcctgctccttaacacctgcaaccgagggactctgcaacaaggacttcttccagaagatgaaggaaacagctgtgttcatcaacatcagcaggggcgacgtcgtaaaccaggacgacctgtaccaggccttggccagtggtaagattgcagctgctggactggatgtgacgagcccagaaccactgcctacaaaccaccctctcctgaccctgaagaactgtgtgattctgccccacattggcagtgccacccacagaacccgcaacaccatgtccttgttggcagctaacaacttgctggctggcctgagaggggagccgatgcctagtgaactcaagctgtagccaaacagtagagatggagggccgggaagcaaaccgtgccctggtattgtcagacacacccaggcttgatttggatccacaggcagagccaagggaaggtgtgattctctgaggaaagagtgattctgatatatgtacttgtcacattggtgttggacacatttgcgccaaaagtatggtaattctattattaaataattctctgaga

SEQ ID NO: 12629 - DNA, 2187 bp, Homo sapiens
  source 1..2187: mol_type = unassigned DNA
actccagcctggccccgccccggcccagctacattcccgggccagcttctgtactgccaggtccgggtcggcggctgcactgcggatgagaccggtgcgactcatgaaggtgttcgtcacccgcaggatacccgccgagggtagggtcgcgctcgcccgggcggcagactgtgaggtggagcagtgggactcggatgagcccatccctgccaaggagctagagcgaggtgtggcgggggcccacggcctgctctgcctcctctccgaccacgtggacaagaggatcctggatgctgcaggggccaatctcaaagtcatcagcaccatgtctgtgggcatcgaccacttggctttggatgaaatcaagaagcgtgggatccgagttggctacaccccagatgtcctgacagataccaccgccgaactcgcagtctccctgctacttaccacctgccgccggttgccggaggccatcgaggaagtgaagaatggtggctggacctcgtggaagcccctctggctgtgtggctatggactcacgcagagcactgtcggcatcatcgggctggggcgcataggccaggccattgctcggcgtctgaaaccattcggtgtccagagatttctgtacacagggcgccagcccaggcctgaggaagcagcagaattccaggcagagtttgtgtctacccctgagctggctgcccaatctgatttcatcgtcgtggcctgctccttaacacctgcaaccgagggactctgcaacaaggacttcttccagaagatgaaggaaacagctgtgttcatcaacatcagcaggtatcctagggccaccttacccagcaagcctggagaggagccatccccactgctgccatctggagattttcttccccgtgggttgttggtgagaccccaggctgagcttgctggtttccataaaccaaacaaccaactcagaaattcgtgggaatacacgagacctccgtacagggaagaagagccgtcagagtgggcctggcctgtctgcttctcagcagtggcccccacccggcggggcctggcacacagcagcgtggcttcagggagtgttcccagggagcctctgcaggcccattatcctccaccacaaagggctggacttgaggatctgaagggccctctggaggccgcctcccacactgctgagcctggctttgtctggctgtggttcagtgatactttgaaccttatgctcctgggcggacagaccctaaaactcacgtggtcgtagctcctcacactgtccctaggggtgccttcaggccactgggcatgtatggaggtcagaccttccttctctgccactccaagcccttcctagctggtgccccttgagcctgtttacatcagtttaggggaagggggattgggtgaggtcatcctgaggactcgtccaccccaaaggtacctgtaattaccaacatttagctacaaaacaggtgacctgggaatggaagagtgaaacatgcaggaccacagggctcgcactgctggctggcagcagtcacagctgccgtgtactgggtgcctgcatgtacccaggacagcccaggaccgtgtattactcattagtgcacaagtattacttagtgcacaatatacagtctctagaagatgacttcttgccttcagtcgccgctccctttgatggctgtggttaggggtgtgctcgttcctctgccctggtttagacaggtacctgatagcacactgtggtgcttctcagtgggggtctgggggtcaaccagatcagaaacacttggatggggcctaacacagatgcccttctgggccctgttcatgcagtagagcatgtaagaaagctttaatcctcccaacatgcctgggagttaggtggtattctccttatctcacagagtagataatttgagacacagataattcgaggcacagagaatttgagacacttgcccaaggtcacacagctagaaggaggcagggctggagttctctgagtatataagacttacagacatactgtaagtatacctaagacttactgctttaaaagtcagtgccaagtgagtggaaaaattcattctgtaggttgttctgcctcaaaggtggcctgggcggagggatcttcggggtacccatgtcaccactgtcattcccaggggcgac

SEQ ID NO: 12630 - DNA, 1590 bp, Homo sapiens
  source 1..1590: mol_type = unassigned DNA
ttctgcagatgaggcagagacacttttcttccagtggcccttatttggagaagcctggcagaagggcgtgagcctagccaagcagctatctattggtggttctctgtcatcctgcctggtgcaggggtgcgggtgagggtggagagtgtggagaacctgtctagccaacgaacagccctgcctctcactagagagttgcttggaggaacccaacagctttggggcacgttctgagcctgaaaatccaactgtacaaatctgtctcagcagcagcttacatgaaaattgtaagtttggggtgagctggcagtttggcagtgccaccaaaaagtcaaatggggtctgagactgcattcacagaagcagagggtccaggacaaaggaggggactgcttgaccaggtgtctcccttgtgaaaacctctccagttctcagaggttaggaaaaacctgagtggctttccagatggcttggaccatgtgaggacagcatcagccagtcacagcctcaggggagctgaggtgctgtctccagatccctggggcagtgtgggctggctgggggctagttacagtggggcagccagccccccacccgctttggaggagacaggagcaggcaactcgggctgtgctgatgaaaagggtctgccctgagggccgctgttccagaaatgctgggtggtgtccctaccctttgcgggactgggaacgagacatggactctccttgctctaggccaggccattgctcggcgtctgaaaccattcggtgtccagagatttctgtacacagggcgccagcccaggcctgaggaagcagcagaattccaggcagagtttgtgtctacccctgagctggctgcccaatctgatttcatcgtcgtggcctgctccttaacacctgcaaccgagggactctgcaacaaggacttcttccagaagatgaaggaaacagctgtgttcatcaacatcagcaggtatcctagggccaccttacccagcaagcctggagaggagccatccccactgctgccatctggagattttcttccccgtgggttgttggtgagaccccaggctgagcttgctggtttccataaaccaaacaaccaactcagaaattcgtgggaatacacgagacctccgtacagggaagaagagccgtcagagtgggcctggcctgtctgcttctcagcagtggcccccacccggcggggcctggcacacagcagcgtggcttcagggagtgttcccagggagcctctgcaggcccattatcctccaccacaaagggctggacttgaggatctgaagggccctctggaggccgcctcccacactgctgagcctggctttgtctggctgtggttcagtgatactttgaaccttatgctcctgggcggacagaccctaaaactcacgtggtcgtagctcctcacactgtccctaggggtgccttcaggccactgggcatgtatgaaggtgtgattctctgaggaaagagtgattctgatatatgtacttgtcacattggtgttggacacatttgcgccaaaagtatggtaattctattattaaataattctctg

SEQ ID NO: 12631 - DNA, 3711 bp, Homo sapiens
  source 1..3711: mol_type = unassigned DNA
gggactgcgctagcccgccgcgctctgggctgcccgagcgagcgttcggacctcgcaccccgcgcgccccgcgccgccgccgccgccggcttttgttgtctccgcctcctcggccgccgccgcctctggaccgcgagccgcgcgcgccgggaccttggctctgcccttcgcgggcgggaactgcgcaggacccggccaggatccgagagaggcgcgggcgggtggccgggggcgccgccggccccgccatggagctccgggcccgaggctggtggctgctatgtgcggccgcagcgctggtcgcctgcgcccgcggggacccggccagcaagagccggagctgcggcgaggtccgccagatctacggagccaagggcttcagcctgagcgacgtgccccaggcggagatctcgggtgagcacctgcggatctgtccccagggctacacctgctgcaccagcgagatggaggagaacctggccaaccgcagccatgccgagctggagaccgcgctccgggacagcagccgcgtcctgcaggccatgcttgccacccagctgcgcagcttcgatgaccacttccagcacctgctgaacgactcggagcggacgctgcaggccaccttccccggcgccttcggagagctgtacacgcagaacgcgagggccttccgggacctgtactcagagctgcgcctgtactaccgcggtgccaacctgcacctggaggagacgctggccgagttctgggcccgcctgctcgagcgcctcttcaagcagctgcacccccagctgctgctgcctgatgactacctggactgcctgggcaagcaggccgaggcgctgcggcccttcggggaggccccgagagagctgcgcctgcgggccacccgtgccttcgtggctgctcgctcctttgtgcagggcctgggcgtggccagcgacgtggtccggaaagtggctcaggtccccctgggcccggagtgctcgagagctgtcatgaagctggtctactgtgctcactgcctgggagtccccggcgccaggccctgccctgactattgccgaaatgtgctcaagggctgccttgccaaccaggccgacctggacgccgagtggaggaacctcctggactccatggtgctcatcaccgacaagttctggggtacatcgggtgtggagagtgtcatcggcagcgtgcacacgtggctggcggaggccatcaacgccctccaggacaacagggacacgctcacggccaaggtcatccagggctgcgggaaccccaaggtcaacccccagggccccgggcctgaggagaagcggcgccggggcaagctggccccgcgggagaggccaccttcaggcacgctggagaagctggtctccgaagccaaggcccagctccgcgacgtccaggacttctggatcagcctcccagggacactgtgcagtgagaagatggccctgagcactgccagtgatgaccgctgctggaacgggatggccagaggccggtacctccccgaggtcatgggtgacggcctggccaaccagatcaacaaccccgaggtggaggtggacatcaccaagccggacatgaccatccggcagcagatcatgcagctgaagatcatgaccaaccggctgcgcagcgcctacaacggcaacgacgtggacttccaggacgccagtgacgacggcagcggctcgggcagcggtgatggctgtctggatgacctctgcagccggaaggtcagcaggaagagctccagctcccggacgcccttgacccatgccctcccaggcctgtcagagcaggaaggacagaagacctcggctgccagctgcccccagcccccgaccttcctcctgcccctcctcctcttcctggcccttacagtagccaggccccggtggcggtaactgccccaaggccccagggacagaggccaaggactgactttgccaaaaatacaacacagacgatatttaattcacctcagcctggagaggcctggggtgggacagggagggccggcggctctgagcaggggcaggcgcagaggtcccagccccaggcctggcctcgcctgcctttctgccttttaattttgtatgaggtcctcaggtcagctgggagccagtgtgcccaaaagccatgtatttcagggacctcaggggcacctccggctgcctagccctccccccagctccctgcaccgccgcagaagcagcccctcgaggcctacagaggaggcctcaaagcaacccgctggagcccacagcgagcctgtgccttcctccccgcctcctcccactgggactcccagcagagcccaccagccagccctggcccaccccccagcctccagagaagccccgcacgggctgtctgggtgtccgccatccagggtctggcagagcctctgagatgatgcatgatgccctcccctcagcgcaggctgcagagcccggccccacctccctgcgcccttgaggggccccagcgtctgcagggtgacgcctgagacagcaccactgctgaggagtctgaggactgtcctcccacagacctgcagtgaggggccctccatgcgcagatgaggggccactgacccacctgcgcttctgctggaggaggggaagctgggcccaaaggcccagggaggcagcgtgggctctgccaatgtgggctgcccctcgcacacagggctcacagggcaggccttgctggggtccagggctgttggaggaccccgagggctgaggagcagccaggacccgcctgctcccatcctcacccagatcaggaaccagggcctccctgttcacggtgacacaggtcagggctcagagtgaccctcagctgtcacctgctcacagggatgctggtggctggtgagaccccgcactgcagacgggaatgcctaggtcccttcccgacccagccagctgcagggcacggggacctggatagttaagggcttttccaaacatgcatccatttactgacacttcctgtccttgttcatggagagctgttcgctcctcccagatggcttcggagggccgcagggcccaccttggaccctggtgacctcctgtcactcactgaggccatcagggccctgccccaggcctggacgggccctccttccctcctgtgccccagctgccaggcggccctggggaggggtggtgtggtgttgggaaggggtcctgcagggggaggaggacttggagggtctgggggcagctgtcctgaaccgactgaccctgaggaggccgcttagtgctgctttgcttttcatcaccgtcccgcacagtggacggaggtccccggttgctggtcaggtccccatggcttgttctctggaacctgactttagatgttttgggatcaggagcccccaacacaggcaagtccaccccataataaccctgccagtgccagggtgggctggggactctggcacagtgatgccgggcgccaggacagcagcactcccgctgcacacagacggcctaggggtggcgctcagaccccaccctacgctcatctctggaaggggcagccctgagtggtcactggtcagggcagtggccaagcctgctgtgtccttcctccacaaggtccccccaccgctcagtgtcagcgggtgacgtgtgttcttttgagtccttgtatgaataaaaggctggaaaccta

SEQ ID NO: 12632 - DNA, 2568 bp, Homo sapiens
  source 1..2568: mol_type = unassigned DNA
cgccctgtgtagagcggctgcgagcgggcagctgggctcggctgccgggagccaccgcgcgggctccgcaccctcctctcgcactgccttcgcccggtccccgcgccgcggtgccccagtggcccccgccgcgctccacgccgcgcccccgcaccccgccggctaccggccgcacaaccgccaccgccccctggccgcgcggctcgcctcgccccgccccgtccctcctcgccccgccccaccccagtcagccccgccctgccccgcgccgccaagcggttcccgccctcgcccagcgcccaggtagctgcgaggaaacttttgcagcggctgggtagcagcacgtctcttgctcctcagggccactgccaggcttgccgagtcctgggactgctctcgctccggctgccactctcccgcgctctcctagctccctgcgaagcaggatggccgggaccgtgcgcaccgcgtgcttggtggtggcgatgctgctcagcttggacttcccgggacaggcgcagcccccgccgccgccgccggacgccacctgtcaccaagtccgctccttcttccagagactgcagcccggactcaagtgggtgccagaaactcccgtgccaggatcagatttgcaagtatgtctccctaagggcccaacatgctgctcaagaaagatggaagaaaaataccaactaacagcacgattgaacatggaacagctgcttcagtctgcaagtatggagctcaagttcttaattattcagaatgctgcggttttccaagaggcctttgaaattgttgttcgccatgccaagaactacaccaatgccatgttcaagaacaactacccaagcctgactccacaagcttttgagtttgtgggtgaatttttcacagatgtgtctctctacatcttgggttctgacatcaatgtagatgacatggtcaatgaattgtttgacagcctgtttccagtcatctatacccagctaatgaacccaggcctgcctgattcagccttggacatcaatgagtgcctccgaggagcaagacgtgacctgaaagtatttgggaatttccccaagcttattatgacccaggtttccaagtcactgcaagtcactaggatcttccttcaggctctgaatcttggaattgaagtgatcaacacaactgatcacctgaagttcagtaaggactgtggccgaatgctcaccagaatgtggtactgctcttactgccagggactgatgatggttaaaccctgtggcggttactgcaatgtggtcatgcaaggctgtatggcaggtgtggtggagattgacaagtactggagagaatacattctgtcccttgaagaacttgtgaatggcatgtacagaatctatgacatggagaacgtactgcttggtctcttttcaacaatccatgattctatccagtatgtccagaagaatgcaggaaagctgaccaccactattggcaagttatgtgcccattctcaacaacgccaatatagatctgcttattatcctgaagatctctttattgacaagaaagtattaaaagttgctcatgtagaacatgaagaaaccttatccagccgaagaagggaactaattcagaagttgaagtctttcatcagcttctatagtgctttgcctggctacatctgcagccatagccctgtggcggaaaacgacaccctttgctggaatggacaagaactcgtggagagatacagccaaaaggcagcaaggaatggaatgaaaaaccagttcaatctccatgagctgaaaatgaagggccctgagccagtggtcagtcaaattattgacaaactgaagcacattaaccagctcctgagaaccatgtctatgcccaaaggtagagttctggataaaaacctggatgaggaagggtttgaaagtggagactgcggtgatgatgaagatgagtgcattggaggctctggtgatggaatgataaaagtgaagaatcagctccgcttccttgcagaactggcctatgatctggatgtggatgatgcgcctggaaacagtcagcaggcaactccgaaggacaacgagataagcacctttcacaacctcgggaacgttcattccccgctgaagcttctcaccagcatggccatctcggtggtgtgcttcttcttcctggtgcactgactgcctggtgcccagcacatgtgctgccctacagcaccctgtggtcttcctcgataaagggaaccactttcttatttttttctatttttttttttttgttatcctgtatacctcctccagccatgaagtagaggactaaccatgtgttatgttttcgaaaatcaaatggtatcttttggaggaagatacattttagtggtagcatatagattgtccttttgcaaagaaagaaaaaaaaccatcaagttgtgccaaattattctcctatgtttggctgctagaacatggttaccatgtctttctctctcactccctccctttctatcgttctctctttgcatggatttctttgaaaaaaaataaattgctcaaataaaaa

SEQ ID NO: 12633 - DNA, 2379 bp, Homo sapiens
  source 1..2379: mol_type = unassigned DNA
agccccgccctgccccgcgccgccaagcggttcccgccctcgcccagcgcccaggtagctgcgaggaaacttttgcagcggctgggtagcagcacgtctcttgctcctcagggccactgccaggcttgccgagtcctgggactgctctcgctccggctgccactctcccgcgctctcctagctccctgcgaagcaggatggccgggaccgtgcgcaccgcgtgcttggtggtggcgatgctgctcagcttggacttcccgggacaggcgcagcccccgccgccgccgccggacgccacctgtcaccaagtccgctccttcttccagagactgcagcccggactcaagtgggtgccagaaactcccgtgccaggatcagatttgcaagtatgtctccctaagggcccaacatgctgctcaagaaagatggaagaaaaataccaactaacagcacgattgaacatggaacagctgcttcagtctgcaagtatggagctcaagttcttaattattcagaatgctgcggttttccaagaggcctttgaaattgttgttcgccatgccaagaactacaccaatgccatgttcaagaacaactacccaagcctgactccacaagcttttgagtttgtgggtgaatttttcacagatgtgtctctctacatcttgggttctgacatcaatgtagatgacatggtcaatgaattgtttgacagcctgtttccagtcatctatacccagctaatgaacccaggcctgcctgattcagccttggacatcaatgagtgcctccgaggagcaagacgtgacctgaaagtatttgggaatttccccaagcttattatgacccaggtttccaagtcactgcaagtcactaggatcttccttcaggctctgaatcttggaattgaagtgatcaacacaactgatcacctgaagttcagtaaggactgtggccgaatgctcaccagaatgtggtactgctcttactgccagggactgatgatggttaaaccctgtggcggttactgcaatgtggtcatgcaaggctgtatggcaggtgtggtggagattgacaagtactggagagaatacattctgtcccttgaagaacttgtgaatggcatgtacagaatctatgacatggagaacgtactgcttggtctcttttcaacaatccatgattctatccagtatgtccagaagaatgcaggaaagctgaccaccactgaaactgagaagaaaatatggcacttcaaatatcctatcttcttcctgtgtatagggctagacttacagattggcaagttatgtgcccattctcaacaacgccaatatagatctgcttattatcctgaagatctctttattgacaagaaagtattaaaagttgctcatgtagaacatgaagaaaccttatccagccgaagaagggaactaattcagaagttgaagtctttcatcagcttctatagtgctttgcctggctacatctgcagccatagccctgtggcggaaaacgacaccctttgctggaatggacaagaactcgtggagagatacagccaaaaggcagcaaggaatggaatgaaaaaccagttcaatctccatgagctgaaaatgaagggccctgagccagtggtcagtcaaattattgacaaactgaagcacattaaccagctcctgagaaccatgtctatgcccaaaggtagagttctggataaaaacctggatgaggaagggtttgaaagtggagactgcggtgatgatgaagatgagtgcattggaggctctggtgatggaatgataaaagtgaagaatcagctccgcttccttgcagaactggcctatgatctggatgtggatgatgcgcctggaaacagtcagcaggcaactccgaaggacaacgagataagcacctttcacaacctcgggaacgttcattccccgctgaagcttctcaccagcatggccatctcggtggtgtgcttcttcttcctggtgcactgactgcctggtgcccagcacatgtgctgccctacagcaccctgtggtcttcctcgataaagggaaccactttcttatttttttctatttttttttttttgttatcctgtatacctcctccagccatgaagtagaggactaaccatgtgttatgttttcgaaaatcaaatggtatcttttggaggaagatacattttagtggtagcatatagattgtccttttgcaaagaaagaaaaaaaaccatcaagttgtgccaaattattctcctatgtttggctgctagaacatggttaccatgtctttctctctcactccctccctttctatcgttctctctttgcatggatttctttgaaaaaaaataaattgctc

SEQ ID NO: 12634 - DNA, 836 bp, Homo sapiens
  source 1..836: mol_type = unassigned DNA
ttaaaccctgtggcggttactgcaatgtggtcatgcaaggctgtatggcaggtgtggtggagattgacaagtactggagagaatacattctgtcccttgaagaacttgtgaatggcatgtacagaatctatgacatggagaacgtactgcttggtctcttttcaacaatccatgattctatccagtatgtccagaagaatgcaggaaagctgaccaccactattggcaagttatgtgcccattctcaacaacgccaatatagatctgcttattatcctgaagatctctttattgacaagaaagtattaaaagttgctcatgtagaacatgaagaaaccttatccagccgaagaagggaactaattcagaagttgaagtctttcatcagcttctatagtgctttgcctggctacatctgcagccatagccctgtggcggaaaacgacaccctttgctggaatggacaagaactcgtggagagatacagccaaaaggcagcaaggaatggaatgaaaaaccagttcaatctccatgagctgaaaatgaagggccctgagccagtggtcagtcaaattattgacaaactgaagcacattaaccagctcctgagaaccatgtctatgcccaaaggtagagttctggataaaaacctggatgaggaagggtttgaaagtggagactgcggtgatgatgaagatgagtgcattggaggctctggtgatggaatgataaaagtgaagaatcagctccgcttccttgcaggtaactgattagtgctgacccaaatgtaatctaaaaatggtgatgctcaggaattaaaaataaattgaacccgc

SEQ ID NO: 12635 - DNA, 1581 bp, Homo sapiens
  source 1..1581: mol_type = unassigned DNA
atggccgggaccgtgcgcaccgcgtgcttggtggtggcgatgctgctcagcttggacttcccgggacaggcgcagcccccgccgccgccgccggacgccacctgtcaccaagtccgctccttcttccagagactgcagcccggactcaagtgggtgccagaaactcccgtgccagaggcctttgaaattgttgttcgccatgccaagaactacaccaatgccatgttcaagaacaactacccaagcctgactccacaagcttttgagtttgtgggtgaatttttcacagatgtgtctctctacatcttgggttctgacatcaatgtagatgacatggtcaatgaattgtttgacagcctgtttccagtcatctatacccagctaatgaacccaggcctgcctgattcagccttggacatcaatgagtgcctccgaggagcaagacgtgacctgaaagtatttgggaatttccccaagcttattatgacccaggtttccaagtcactgcaagtcactaggatcttccttcaggctctgaatcttggaattgaagtgatcaacacaactgatcacctgaagttcagtaaggactgtggccgaatgctcaccagaatgtggtactgctcttactgccagggactgatgatggttaaaccctgtggcggttactgcaatgtggtcatgcaaggctgtatggcaggtgtggtggagattgacaagtactggagagaatacattctgtcccttgaagaacttgtgaatggcatgtacagaatctatgacatggagaacgtactgcttggtctcttttcaacaatccatgattctatccagtatgtccagaagaatgcaggaaagctgaccaccactattggcaagttatgtgcccattctcaacaacgccaatatagatctgcttattatcctgaagatctctttattgacaagaaagtattaaaagttgctcatgtagaacatgaagaaaccttatccagccgaagaagggaactaattcagaagttgaagtctttcatcagcttctatagtgctttgcctggctacatctgcagccatagccctgtggcggaaaacgacaccctttgctggaatggacaagaactcgtggagagatacagccaaaaggcagcaaggaatggaatgaaaaaccagttcaatctccatgagctgaaaatgaagggccctgagccagtggtcagtcaaattattgacaaactgaagcacattaaccagctcctgagaaccatgtctatgcccaaaggtagagttctggataaaaacctggatgaggaagggtttgaaagtggagactgcggtgatgatgaagatgagtgcattggaggctctggtgatggaatgataaaagtgaagaatcagctccgcttccttgcagaactggcctatgatctggatgtggatgatgcgcctggaaacagtcagcaggcaactccgaaggacaacgagataagcacctttcacaacctcgggaacgttcattccccgctgaagcttctcaccagcatggccatctcggtggtgtgcttcttcttcctggtgcactga

SEQ ID NO: 12636 - DNA, 4960 bp, Homo sapiens
  source 1..4960: mol_type = unassigned DNA
cagtcaatcagcggcagagctgagaagggcacagccgcgcggcggagggcagagtcagccgagccgagtccagccggacgagcggaccagcgcagggcagcccaagcagcgcgcagcgaacgcccgccgccgcccacaccctctgcggtccccgcggcgcctgccacccttccctccttccccgcgtccccgcctcgccggccagtcagcttgccgggttcgctgccccgcgaaaccccgaggtcaccagcccgcgcctctgcttccctgggccgcgcgccgcctccacgccctccttctcccctggcccggcgcctggcaccggggaccgttgcctgacgcgaggcccagctctacttttcgccccgcgtctcctccgcctgctcgcctcttccaccaactccaactccttctccctccagctccactcgctagtccccgactccgccagccctcggcccgctgccgtagcgccgcttcccgtccggtcccaaaggtgggaacgcgtccgccccggcccgcaccatggcacggttcggcttgcccgcgcttctctgcaccctggcagtgctcagcgccgcgctgctggctgccgagctcaagtcgaaaagttgctcggaagtgcgacgtctttacgtgtccaaaggcttcaacaagaacgatgcccccctccacgagatcaacggtgatcatttgaagatctgtccccagggttctacctgctgctctcaagagatggaggagaagtacagcctgcaaagtaaagatgatttcaaaagtgtggtcagcgaacagtgcaatcatttgcaagctgtctttgcttcacgttacaagaagtttgatgaattcttcaaagaactacttgaaaatgcagagaaatccctgaatgatatgtttgtgaagacatatggccatttatacatgcaaaattctgagctatttaaagatctcttcgtagagttgaaacgttactacgtggtgggaaatgtgaacctggaagaaatgctaaatgacttctgggctcgcctcctggagcggatgttccgcctggtgaactcccagtaccactttacagatgagtatctggaatgtgtgagcaagtatacggagcagctgaagcccttcggagatgtccctcgcaaattgaagctccaggttactcgtgcttttgtagcagcccgtactttcgctcaaggcttagcggttgcgggagatgtcgtgagcaaggtctccgtggtaaaccccacagcccagtgtacccatgccctgttgaagatgatctactgctcccactgccggggtctcgtgactgtgaagccatgttacaactactgctcaaacatcatgagaggctgtttggccaaccaaggggatctcgattttgaatggaacaatttcatagatgctatgctgatggtggcagagaggctagagggtcctttcaacattgaatcggtcatggatcccatcgatgtgaagatttctgatgctattatgaacatgcaggataatagtgttcaagtgtctcagaaggttttccagggatgtggaccccccaagcccctcccagctggacgaatttctcgttccatctctgaaagtgccttcagtgctcgcttcagaccacatcaccccgaggaacgcccaaccacagcagctggcactagtttggaccgactggttactgatgtcaaggagaaactgaaacaggccaagaaattctggtcctcccttccgagcaacgtttgcaacgatgagaggatggctgcaggaaacggcaatgaggatgactgttggaatgggaaaggcaaaagcaggtacctgtttgcagtgacaggaaatggattagccaaccagggcaacaacccagaggtccaggttgacaccagcaaaccagacatactgatccttcgtcaaatcatggctcttcgagtgatgaccagcaagatgaagaatgcatacaatgggaacgacgtggacttctttgatatcagtgatgaaagtagtggagaaggaagtggaagtggctgtgagtatcagcagtgcccttcagagtttgactacaatgccactgaccatgctgggaagagtgccaatgagaaagccgacagtgctggtgtccgtcctggggcacaggcctacctcctcactgtcttctgcatcttgttcctggttatgcagagagagtggagataattctcaaactctgagaaaaagtgttcatcaaaaagttaaaaggcaccagttatcacttttctaccatcctagtgactttgctttttaaatgaatggacaacaatgtacagtttttactatgtggccactggtttaagaagtgctgactttgttttctcattcagttttgggaggaaaagggactgtgcattgagttggttcctgctcccccaaaccatgttaaacgtggctaacagtgtaggtacagaactatagttagttgtgcatttgtgattttatcactctattatttgtttgtatgtttttttctcatttcgtttgtgggtttttttttccaactgtgatctcgccttgtttcttacaagcaaaccagggtcccttcttggcacgtaacatgtacgtatttctgaaatattaaatagctgtacagaagcaggttttatttatcatgttatcttattaaaagaaaaagcccaaaaagcagtaaaatttccatttctccctgttattttagttgccttatctggagagacgtggaggtgattttcttttttttaaattattattaagacagaatgtgagggcacaagcaggcttctgagccacttgtcagattgtattcaaagcatcaatccaagaaggaggttatgtgtacttcatttattggtgatagttggaagagactgcagactactgctttgaatgagttgaattacataagctaagatcactataggtccatttcttgaacccacttatacataaaatgtaacccatttagaaaaagattctggatatcatcccccttgaaagatagaaagcattcaggatgtcccagttatcacatgttcacacttgggtttaggggtgtttttttttaaaaccaggcaggttagctagcccaccctgtgctagttttcatgttcacactgaccctatttgaattaatatcctttgttagagtggtcgagatttcaaacccaattatgtacagggagctgtctgagagctagccagaactggggtacagcctgggctcagggaatagctgtcaacactcgggcaaagtttttgtctgtgcatgtgtatctccatttgttttgggatcccagtttttgttttaagagagtataaggtgtctcatttgagtctttttcttacctagccccctcttatcagtaaaacaaaggacttgccatggttcacagcaatgtgctacgatccaagatatcagccaaggagcccacttaggggagaactaggtgtccagatttttgtatgtgttgtttttcttgggggatggggtggggtgggagtaggtagagctgagaatactacatcttagtggtgacctttagccacgtgggtgaagtggcaaaggccatggccatatctgttgtcccaggccaaagactaacaactgccttgggaatcccttccttgtgtccttaccaaatgatagctcataaaactctgataatgtaacaaatcactttcaaaggagttcccagaagtcttcagaaagactaaaattctgtctcttcctgctttagacagccattaagatcccaactaattttaccgaacctaaaacccacaaagaggttgtttgtgttattgttcaatcttcagttgtaagagtaattctctatttttatattgaaacataattacttgatagctcagggtctacatttcattcaactttttacaccaaattctgcagagtggtcaaaatggaatattgggggctgttgtaaacagaggcttaattttattagaagtagccagttatttattaaagcatgatgttaataaaataggcatattctggctggtgtgtataagtggttttttttttaaaacaaatcagaagacataaaattgaaaaggcactccatttatatataagggaaaatagattgtaaatagctaaggggccttgtgagaacttggaaaatgtgctgatacttagtaactacctcagttgtgaggaatttcctttttagcttagactgctattacttttacttggtagaaatgaatctggtctccaaaatatggctcagagagttatccccatagaccttgttagattgtttttaatttaaaaccttgaactctgcccagctgttttcttccagtcaaattctctaaaccaataacattttccaaattaagtattcttgaaggttcttctgaactcttactgatttgttttctttctttgcattttttcctgttactcttttattatttaaattgtctcttgcttttgaacttcaactatgaaataaacaaatcatagatttttccattcaggtctgactggataactcttggcttctaagcagctggcaagctcacccccactccccaaaaaagaagaaaggcaagttgaatattttaaaaccttaagagtttggagtatgaagtagaataaaagccttgttaggagaagacctgacttttccaaagttaacagcatgtgaagggcttgtgttttacaaagtcatttataaattatttttctttaaaacacatcacctactctgtaccttaaagattttacaactcttagatttatattttatttcaaaaatcgtaactagcacctgttattttgattaaaagacactgcgaagaattgacgtaaatttctaaagtttagttactgagtgttcaaaacctaacagttcacatgaagtaaaaattgtcatttgtgattacagaatcaaaataaaaataggtatgaatggtgcta

SEQ ID NO: 12637 - DNA, 1835 bp, Homo sapiens
  source 1..1835: mol_type = unassigned DNA
agtgcgactgtcgcgctccgctccccgcctccgctcctcctctcccccctgcattattcgccgtcccgggaagcccctgaggactgtggccctcaaagtgatcatttgaagatctgtccccagggttctacctgctgctctcaagagatggaggagaagtacagcctgcaaagtaaagatgatttcaaaagtgtggtcagcgaacagtgcaatcatttgcaagctgtctttgcttcacgttacaagaagtttgatgaattcttcaaagaactacttgaaaatgcagagaaatccctgaatgatatgtttgtgaagacatatggccatttatacatgcaaaattctgagctatttaaagatctcttcgtagagttgaaacgttactacgtggtgggaaatgtgaacctggaagaaatgctaaatgacttctgggctcgcctcctggagcggatgttccgcctggtgaactcccagtaccactttacagatgagtatctggaatgtgtgagcaagtatacggagcagctgaagcccttcggagatgtccctcgcaaattgaagctccaggttactcgtgcttttgtagcagcccgtactttcgctcaaggcttagcggttgcgggagatgtcgtgagcaaggtctccgtggtaaaccccacagcccagtgtacccatgccctgttgaagatgatctactgctcccactgccggggtctcgtgactgtgaagccatgttacaactactgctcaaacatcatgagaggctgtttggccaaccaaggggatctcgattttgaatggaacaatttcatagatgctatgctgatggtggcagagaggctagagggtcctttcaacattgaatcggtcatggatcccatcgatgtgaagatttctgatgctattatgaacatgcaggataatagtgttcaagtgtctcagaaggttttccagggatgtggaccccccaagcccctcccagctggacgaatttctcgttccatctctgaaagtgccttcagtgctcgcttcagaccacatcaccccgaggaacgcccaaccacagcagctggcactagtttggaccgactggttactgatgtcaaggagaaactgaaacaggccaagaaattctggtcctcccttccgagcaacgtttgcaacgatgagaggatggctgcaggaaacggcaatgaggatgactgttggaatgggaaaggcaaaagcaggtacctgtttgcagtgacaggaaatggattagccaaccagggcaacaacccagaggtccaggttgacaccagcaaaccagacatactgatccttcgtcaaatcatggctcttcgagtgatgaccagcaagatgaagaatgcatacaatgggaacgacgtggacttctttgatatcagtgatgaaagtagtggagaaggaagtggaagtggctgtgagtatcagcagtgcccttcagagtttgactacaatgccactgaccatgctgggaagagtgccaatgagaaagccgacagtgctggtgtccgtcctggggcacaggcctacctcctcactgtcttctgcatcttgttcctggttatgcagagagagtggagataattctcaaactctgagaaaaagtgttcatcaaaaagttaaaaggcaccagttatcacttttctaccatcctagtgactttgctttttaaatgaatggacaacaatgtacagtttttactatgtggccactggtttaagaagtgctgactttgttttctcattcagttttgggaggaaaagggactgtgcattgagttggttcctgctcccccaaaccatgttaaacgt

SEQ ID NO: 12638 - DNA, 3696 bp, Homo sapiens
  source 1..3696: mol_type = unassigned DNA
gcctggcaccggggaccgttgcctgacgcgaggcccagctctacttttcgccccgcgtctcctccgcctgctcgcctcttccaccaactccaactccttctccctccagctccactcgctagtccccgactccgccagccctcggcccgctgccgtagcgccgcttcccgtccggtcccaaaggtgggaacgcgtccgccccggcccgcaccatggcacggttcggcttgcccgcgcttctctgcaccctggcagtgctcagcgccgcgctgctggctgccgagctcaagtcgaaaagttgctcggaagtgcgacgtctttacgtgtccaaaggcttcaacaagaacgatgcccccctccacgagatcaacggtgatcatgaagatctgtccccagggttctacctgctgctctcaagagatggaggatacagcctgcaaagtaaagatgatttcaaaagtgtggtcagcgaacagtgcaatcatttgcaagctgtctttgcttcacgttacaagaagtttgatgaattcttcaaagaactacttgaaaatgcagagaaatccctgaatgatatgtttgtgaagacatatggccatttatacatgcaaaattctgagctatttaaagatctcttcgtagagttgaaacgttactacgtggtgggaaatgtgaacctggaagaaatgctaaatgacttctgggctcgcctcctggagcggatgttccgcctggtgaactcccagtaccactttacagatgagtatctggaatgtgtgagcaagtatacggagcagctgaagcccttcggagatgtccctcgcaaattgaagctccaggttactcgtgcttttgtagcagcccgtactttcgctcaaggcttagcggttgcgggagatgtcgtgagcaaggtctccgtgccttcatgtacccatgccctgttgaagatgatctactgctcccactgccggggtctcgtgactgtgaagccatgttacaactactgctcaaacatcatgagaggctgtttggccaaccaaggggatctcgattttgaatggaacaatttcatagatgctatgctgatggtggcagagaggctagagggtcctttcaacattgaatcggtcatggatcccatcgatgtgaagatttctgatgctattatgaacatgcaggataatagtgttcaagtgtctcagaaggttttccagggatgtggaccccccaagcccctcccagctggacgaatttctcgttccatctctgaaagtgccttcagtgctcgcttcagaccacatcaccccgaggaacgcccaaccacagcagctggcactagtttggaccgactggttactgatgtcaaggagaaactgaaacaggccaagaaattctggtcctcccttccgagcaacgtttgcaacgatgagaggatggctgcaggaaacggcaatgaggatgactgttggaatgggaaaggcaaaagcaggtacctgtttgcagtgacaggaaatggattagccaaccagggcaacaacccagaggtccaggttgacaccagcaaaccagacatactgatccttcgtcaaatcatggctcttcgagtgatgaccagcaagatgaagaatgcatacaatgggaacgacgtggacttctttgatatcagtgatgaaagtagtggagaaggaagtggaagtggctgtgagtatcagcagtgcccttcagagtttgactacaatgccactgaccatgctgggaagagtgccaatgagaaagccgacagtgctggtgtccgtcctggggcacaggcctacctcctcactgtcttctgcatcttgttcctggttatgcagagagagtggagataattctcaaactctgagaaaaagtgttcatcaaaaagttaaaaggcaccagttatcacttttctaccatcctagtgactttgctttttaaatgaatggacaacaatgtacagtttttactatgtggccactggtttaagaagtgctgactttgttttctcattcagttttgggaggaaaagggactgtgcattgagttggttcctgctcccccaaaccatgttaaacgtggctaacagtgtaggtacagaactatagttagttgtgcatttgtgattttatcactctattatttgtttgtatgtttttttctcatttcgtttgtgggtttttttttccaactgtgatctcgccttgtttcttacaagcaaaccagggtcccttcttggcacgtaacatgtacgtatttctgaaatattaaatagctgtacagaagcaggttttatttatcatgttatcttattaaaagaaaaagcccaaaaagcagtaaaatttccatttctccctgttattttagttgccttatctggagagacgtggaggtgattttcttttttttaaattattattaagacagaatgtgagggcacaagcaggcttctgagccacttgtcagattgtattcaaagcatcaatccaagaaggaggttatgtgtacttcatttattggtgatagttggaagagactgcagactactgctttgaatgagttgaattacataagctaagatcactataggtccatttcttgaacccacttatacataaaatgtaacccatttagaaaaagattctggatatcatcccccttgaaagatagaaagcattcaggatgtcccagttatcacatgttcacacttgggtttaggggtgtttttttttaaaaccaggcaggttagctagcccaccctgtgctagttttcatgttcacactgaccctatttgaattaatatcctttgttagagtggtcgagatttcaaacccaattatgtacagggagctgtctgagagctagccagaactggggtacagcctgggctcagggaatagctgtcaacactcgggcaaagtttttgtctgtgcatgtgtatctccatttgttttgggatcccagtttttgttttaagagagtataaggtgtctcatttgagtctttttcttacctagccccctcttatcagtaaaacaaaggacttgccatggttcacagcaatgtgctacgatccaagatatcagccaaggagcccacttaggggagaactaggtgtccagatttttgtatgtgttgtttttcttgggggatggggtggggtgggagtaggtagagctgagaatactacatcttagtggtgacctttagccacgtgggtgaagtggcaaaggccatggccatatctgttgtcccaggccaaagactaacaactgccttgggaatcccttccttgtgtccttaccaaatgatagctcataaaactctgataatgtaacaaatcactttcaaaggagttcccagaagtcttcagaaagactaaaattctgtctcttcctgctttagacagccattaagatcccaactaattttaccgaacctaaaacccacaaagaggttgtttgtgttattgttcaatcttcagttgtaagagtaattctctatttttatattgaaacataattacttgatagctcagggtctacatttcattcaactttttacaccaaattctgcagagtggtcaaaatggaatattgggggctgttgtaaacagaggcttaattttattagaagtagccagttatttattaaagcatgatgttaataaaataggcatattc

SEQ ID NO: 12639 - DNA, 2889 bp, Homo sapiens
  source 1..2889: mol_type = unassigned DNA
ggcagtggcggcagtggcggcagtggcggcagcggcagcagttgcagcagtggtggccagagcggatgcttgcgggctccctgcggctccactagttttcttcgccccgcccagccgcccactcttctcggctagggaagaagaccagagggtgctcagctggaaaactctggtgtctcagcttagggcctcctccgggaagagctaactgctcccaggtgaagccggtgcccgcgggcggtccgtacaccccgcagccggctcgcaccgctcgagagcctcggccgctgtgtcttccacgtctgcagctcagccagggcgcgcagggcgagtggggtccactggcgggtaaaggggaccaggacggcgaggatggacgcacagacctggcccgtgggctttcgctgcctcctccttctggccctggttgggtccgcccgcagcgagggcgtgcagacctgcgaagaagttcggaaacttttccagtggcggctgctgggagctgtcagggggctgccggattcgccgcgggcaggacctgatcttcaggtttgcatatccaaaaagcctacatgttgcaccaggaagatggaggagagatatcagattgcggctcgccaggatatgcagcagtttcttcaaacgtccagctctacattaaagtttctaatatctcgaaatgcggctgcttttcaagaaacccttgaaactctcatcaaacaagcagaaaattacaccagtatacttttttgcagtacctacaggaacatggccttggaggctgctgcttcggttcaggagttcttcactgatgtggggctgtatttatttggtgcggatgttaatcctgaagaatttgtaaacagattttttgacagtctttttcctctggtctacaaccacctcattaaccctggtgtgactgacagttccctggaatactcagaatgcatccggatggctcgccgggatgtgagtccatttggtaatattccccaaagagtaatgggacagatggggaggtccctgctgcccagccgcacttttctgcaggcactcaatctgggcattgaagtcatcaacaccacagactatctgcacttctccaaagagtgcagcagagccctcctgaagatgcaatactgcccgcactgccaaggcctggcgctcactaagccttgtatgggatactgcctcaatgtcatgcgaggctgcctggcgcacatggcggagcttaatccacactggcatgcatatatccggtcgttggaagaactctcggatgcaatgcatggaacatacgacattggacacgtgctgctgaactttcacttgcttgttaatgatgctgtgttacaggctcacctcaatggacaaaaattattggaacaggtaaataggatttgtggccgccctgtaagaacacccacacaaagcccccgttgttcttttgatcagagcaaagagaagcatggaatgaagaccaccacaaggaacagtgaagagacgcttgccaacagaagaaaagaatttatcaacagccttcgactgtacaggtcattctatggaggtctagctgatcagctttgtgctaatgaattagctgctgcagatggacttccctgctggaatggagaagatatagtaaaaagttatactcagcgtgtggttggaaatggaatcaaagcccagtctggaaatcctgaagtcaaagtcaaaggaattgatcctgtgataaatcagattattgataaactgaagcatgttgttcagttgttacagggtagatcacccaaacctgacaagtgggaacttcttcagctgggcagtggtggaggcatggttgaacaagtcagtggggactgtgatgatgaagatggttgcgggggatcaggaagtggagaagtcaagaggacactgaagatcacagactggatgccagatgatatgaacttcagtgatgtaaagcaaatccatcaaacagacactggcagtactttagacacaacaggagcaggatgtgcagtggcgactgaatctatgacattcactctgataagtgtggtgatgttacttcccgggatttggtaactgaactcttctgtcctgacataccttactgaagtctcgatttcttctctctctgcatatgcctggaataagagatcctttttcaatgtaacaattatatttatgaaaagatatgttacactaacttctcagaagccaagctgaaatattcataaagtccctaaaactcaacgtttaaatgacacactttaaaaatatgtcttttttcaatctaactgaaaaccttcttaacttctaatatattaaatctgaagatgtgaagggcacagaagtgactttgaataagaagaatttagtgtatctgtaattttattatcaattccaagccccttcctttctaaattaaaaatgttttcatttgaaagtgtatttgccagacaatgaaaacagtatgcagtatttcttaaagtattgaaattagaatatcatgaaataaatcaaaacatacaatggcaagtagtatgcatgcatattcaagagactcttccatttttgcaagctgtagaaggaaatgtctgaatgtctataagttatggggtagattcttgagaagcatttcatataatttcactgaagaaccttgataattttgacccactgtaacttagccactgatgaaccttaaagctgagtattttattaacacctgatttgtattccattatattcaaaatgcatctttggtattgtgcctctgctcccatctctctctttgcctcatagatttagctatgttgggaagcacatgcttgctctaggaatatctccaataaagctgttaactatttggtggaaaaa

SEQ ID NO: 12640 - DNA, 2624 bp, Homo sapiens
  source 1..2624: mol_type = unassigned DNA
ccaggatttctctcttcctatttcaggaggactctcacaggctcccacagcctgtgttaagctgaggtttcccctagatctcgtatatccccaacacatacctccacgcacacacatccccaagaacctcgagctcacaccaacagacacacgcgcgcatacacactcgctctcgcttgtccatctccctcccgggggagccggcgcgcgctcccacctttgccgcacactccggcgagccgagcccgcagcgctccaggattctgcggctcggaactcggattgcagctctgaacccccatggtggttttttaaacacttcttttccttctcttcctcgttttgattgcaccgtttccatctgggggctagaggagcaaggcagcagccttcccagccagcccttgttggcttgccatcgtccatctggcttataaaagtttgctgagcgcagtccagagggctgcgctgctcgtcccctcggctggcagaagggggtgacgctgggcagcggcgaggagcgcgccgctgcctctggcgggctttcggcttgaggggcaaggtgaagagcgcaccggccgtggggtttaccgagctggatttgtatgttgcaccatgccttcttggatcggggctgtgattcttcccctcttggggctgctgctctccctccccgccggggcggatgtgaaggctcggagctgcggagaggtccgccaggcgtacggtgccaagggattcagcctggcggacatcccctaccaggagatcgcaggggaacacttaagaatctgtcctcaggaatatacatgctgcaccacagaaatggaagacaagttaagccaacaaagcaaactcgaatttgaaaaccttgtggaagagacaagccattttgtgcgcaccacttttgtgtccaggcataagaaatttgacgaatttttccgagagctcctggagaatgcagaaaagtcactaaatgatatgtttgtacggacctatggcatgctgtacatgcagaattcagaagtcttccaggacctcttcacagagctgaaaaggtactacactgggggtaatgtgaatctggaggaaatgctcaatgacttttgggctcggctcctggaacggatgtttcagctgataaaccctcagtatcacttcagtgaagactacctggaatgtgtgagcaaatacactgaccagctcaagccatttggagacgtgccccggaaactgaagattcaggttacccgcgccttcattgctgccaggacctttgtccaggggctgactgtgggcagagaagttgcaaaccgagtttccaaggtcagcccaaccccagggtgtatccgtgccctcatgaagatgctgtactgcccatactgtcgggggcttcccactgtgaggccctgcaacaactactgtctcaacgtcatgaagggctgcttggcaaatcaggctgacctcgacacagagtggaatctgtttatagatgcaatgctcttggtggcagagcgactggaggggccattcaacattgagtcggtcatggacccgatagatgtcaagatttctgaagccattatgaacatgcaagaaaacagcatgcaggtgtctgcaaaggtctttcagggatgtggtcagcccaaacctgctccagccctcagatctgcccgctcagctcctgaaaattttaatacacgtttcaggccctacaatcctgaggaaagaccaacaactgctgcaggcacaagcttggaccggctggtcacagacataaaagagaaattgaagctctctaaaaaggtctggtcagcattaccctacactatctgcaaggacgagagcgtgacagcgggcacgtccaacgaggaggaatgctggaacgggcacagcaaagccagatacttgcctgagatcatgaatgatgggctcaccaaccagatcaacaatcccgaggtggatgtggacatcactcggcctgacactttcatcagacagcagattatggctctccgtgtgatgaccaacaaactaaaaaacgcctacaatggcaatgatgtcaatttccaggacacaagtgatgaatccagtggctcagggagtggcagtgggtgcatggatgacgtgtgtcccacggagtttgagtttgtcaccacagaggcccccgcagtggatcccgaccggagagaggtggactcttctgcagcccagcgtggccactccctgctctcctggtctctcacctgcattgtcctggcactgcagagactgtgcagataatcttgggtttttggtcagatgaaactgcattttagctatctgaatggccaactcacttcttttcttacactcttggacaatggaccatgccacaaaaacttaccgttttctatgagaagagagcagtaatgcaatctgcctccctttttgttttcccaaagagtaccgggtgccagactgaactgcttcctctttccttcagctatctgtggggaccttgtttattctagagagaattcttactcaaatttttcgtaccaggagattttcttaccttcatttgcttttatgctgcagaagtaaaggaatctcacgttgtgagggttttttttttctcattt

SEQ ID NO: 12641 - DNA, 3896 bp, Homo sapiens
  source 1..3896: mol_type = unassigned DNA
gtgctaagctcccttccgttccagccgccttcagccccgccgcgctcagttccgcccctttctcttccaactccgcctacgccccagagagggaaggccttgacacctacgctagagagacaggctccaatgaaaagagcgagggggcggagccgggaggaatcggtccaattctcggccgggaagtctctggccgggacggggcagggcgaacctgccagtgactggactcagcttctttgcgtaaccaatactggaaggcatttaaaggcacctctgccgccacagaccttgcagttaactccgccctgacccacccttcccgatgcagtccctgatgcaggctcccctcctgatcgccctgggcttgcttctcgcggcccctgcgcaagcccacctgaaaaagccatcccagctcagtagcttttcctgggataactgtgatgaagggaaggaccctgcggtgatcagaagcctgactctggagcctgaccccatcatcgttcctggaaatgtgaccctcagtgtcatgggcagcaccagtgtccccctgagttctcctctgaaggtggatttagttttggagaaggaggtggctggcctctggatcaagatcccatgcacagactacattggcagctgtacctttgaacacttctgtgatgtgcttgacatgttaattcctactggggagccctgcccagagcccctgcgtacctatgggcttccttgccactgtcccttcaaagaaggaacctactcactgcccaagagcgaattcgttgtgcctgacctggagctgcccagttggctcaccaccgggaactaccgcatagagagcgtcctgagcagcagtgggaagcgtctgggctgcatcaagatcgctgcctctctaaagggcatataacatggcatctgccacagcagaatggagcggtgtgaggaaggtcccttttcctctgttttgtgtttgccaaggccaaactcccactctctgcccccctttaatcccctttctacagtgagtccactaccctcactgaaaatcattttgtaccacttacattttaggctggggcaagcagccctgacctaagggagaatgagttggacagttcttgatagcccagggcatctgctgggctgaccacgttactcatccccgttaacattctctctaaagagcctcgttcatttccaaagcagttaaggaatgggaaccagagtgttttaggacctgaagaatctttatgactctctctctttcactcttttttttttttgtcactaagttaaaagcgaagtgagagtattaacgtttttgttctcctccggccccctgttacaatgaaggggcaaaagtatttgctcttagtctattcctcccttaacttctgtgactaatttttatttcctttctagatttgcccaattaatactagggtgcagtgtatcctggagaggtagggtgtgtgggggaggaatcccttgggggagatattaggagtgctctgttgtttacaaactcaggtacccgcagggcctagcaagagacttaaatgactgataagaaccgtgagaaacatgttgcttccaggcttgatttcgatttttcgctttttttttttttgagacagaatctcactttgtcaccaggctggagtgcagtggtgcaatctcacctcactgcaacctccgcctcctgggttcaagcaattctcctgcctcagcctcccaagtagcttggactacaggccctgccaccacgcccggctaatttgtgtatttttagtagagatggggtttcaccatgttggccaggatggtctcgatctcttgacctcgtgatctgtccaccttggccttgcaaagcgctggattacaggcatgagccactacacccagccgatttttcctttttgattaaagatgctattacaatgtaaatatttcttacacagaaagtcacagcacatgtgcccattgatacaaggctgctgaggcctggtctccagttggaaatataattaagggtggcaaggactggagtcagttggagagtgcatagccagtctgtgaagacaactgccagatactggcaatactccagcctggtgacagagtgagactctgtctcaaaaaaaaagtttcaatgtttactcctagagaagccaaaaatccagatttgtatatgaaatcttaccattttaaaagattggcagctaattatttttttaaaaagctgtgcagtgtgatgtgtcccaaacggactggctcatgggtggccacgtcacaacctctgatctcagaccgtgcatgccttgtcctcttaagacaactcctgtggcaccgtttctccctccacagggccaaagccatagtgtccggtcccaaggacaaggctcttccagtgctaggagaggtatgagcagcctctcacctgtgagctgtggggatcacaaggctgcctgcctcagtcttggagtcctgttgggtgaatgaggcagatgggaaagagcctcaccagcagctgcttttggagcaggggtccaaggaagagagggtggcctcgacatcaaactgcctggatttttctaccaccctgttacatcataacaacttctgaaacacacaccagccctgagttctgggctcatttgaagcctggaatagcaataaatctttttaacttgcggacagtttccccttgccttggctgcatatttcactgatcacatctcaggatttcaaaagcatttttggggtggggctcttttggttggaagggtttgttggaacggtacaggtgagccgaggtgattccagggacggacccttctgcaggagcttgagcttgcttgttgtctctgcttcatcgccatccagctcccttgtttgctattttgctttccatcacatcatgactgcggagagcaaaaatcacctagtgaccattgaacaggtcccagagacaaaatctttttatctgaggaatttaaaagggagcaaagaccacctggtgactatcaggccatgcagaggcaaaacgccttatttggggaaaattaaaagtaattagactttcctattatctaaagcaggcatctggttccagatttcttttccccgaaaaaaaccttagaagtaactaaaatttctgtacatctccggaatgccatgctgaaactcactgcaaccccacggtcccgctttaaggtccataaatatccctaaggaaaaatccaccgtggtacattcagtcctctcaccgaggtgccccatggcagtcttctgcagcattcttctaatacctttcctttttcaaacctatactgttgttggtgaattctttttaccaacccacgagttgaccacttcccaatgccggggatctgacacctcacctggcaatgacctccacagccgtttccctctgttggatcttccagccttattctcaacagttcatttttagttcacattcttgaccgaatctcagtagctcagttaatctttttatgtctgctctgctcttgggtcatatgttccgtgaggtttcttaggggtgggggatgaggagttaaaggtggcatcttcaatcgcaggtcaaagcagactttaataaatggtgctgagccaactggaaagccccttggagaaagttgaagttagacctgtacttcacaccatatgcaagaatgaactccatctggatccaggatccaaatgtaagaaaatgaagccatataaatacagaaggaaacgtggtggaaatatccagtggcaacaaaatattgacacatttgactacatgaagataataaaaatgcttagtaaaaacacaataaaatcaaatgactgggagaaaaatttatccagcctatataatagacaaa

SEQ ID NO: 12642 - DNA, 1866 bp, Homo sapiens
  source 1..1866: mol_type = unassigned DNA
gggcggcggcgggggcccggccgaggcaataagagcggcggcggcggcagcggcggcagcagctcccgcagctcctgctctggtccgcctcggcccggcggcggccatcagccccctcggcctcggctcgaggggcggggagctgcgcgcgcccctcggtccgaccgacaccctccccttcccgcccgtccgcgcgccccgcggcccgcggcccgcagtccgccccgcgcgctccttgccgaggagccgagcccgcgcccggcccgcccgcccggcgctgccccggccctcccggcccgcgtgaggccgcccgcgcccgccgccgccgcagcccggccgcgccccgccgccgccgccgccgccatgggctgcctcgggaacagtaagaccgaggaccagcgcaacgaggagaaggcgcagcgtgaggccaacaaaaagatcgagaagcagctgcagaaggacaagcaggtctaccgggccacgcaccgcctgctgctgctgggtgctggagaatctggtaaaagcaccattgtgaagcagatgaggatcctgcatgttaatgggtttaatggagatgagaaggcaaccaaagtgcaggacatcaaaaacaacctgaaagaggcgattgaaaccattgtggccgccatgagcaacctggtgccccccgtggagctggccaaccccgagaaccagttcagagtggactacatcctgagtgtgatgaacgtgcctgactttgacttccctcccgaattctatgagcatgccaaggctctgtgggaggatgaaggagtgcgtgcctgctacgaacgctccaacgagtaccagctgattgactgtgcccagtacttcctggacaagatcgacgtgatcaagcaggctgactatgtgccgagcgatcaggacctgcttcgctgccgtgtcctgacttctggaatctttgagaccaagttccaggtggacaaagtcaacttccacatgtttgacgtgggtggccagcgcgatgaacgccgcaagtggatccagtgcttcaacgatgtgactgccatcatcttcgtggtggccagcagcagctacaacatggtcatccgggaggacaaccagaccaaccgcctgcaggaggctctgaacctcttcaagagcatctggaacaacagatggctgcgcaccatctctgtgatcctgttcctcaacaagcaagatctgctcgctgagaaagtccttgctgggaaatcgaagattgaggactactttccagaatttgctcgctacactactcctgaggatgctactcccgagcccggagaggacccacgcgtgacccgggccaagtacttcattcgagatgagtttctgaggatcagcactgccagtggagatgggcgtcactactgctaccctcatttcacctgcgctgtggacactgagaacatccgccgtgtgttcaacgactgccgtgacatcattcagcgcatgcaccttcgtcagtacgagctgctctaagaagggaacccccaaatttaattaaagccttaagcacaattaattaaaagtgaaacgtaattgtacaagcagttaatcacccaccatagggcatgattaacaaagcaacctttcccttcccccgagtgattttgcgaaacccccttttcccttcagcttgcttagatgttccaaatttagaaagcttaaggcggcctacagaaaaaggaaaaaaggccacaaaagttccctctcactttcagtaaaaataaataaaacagcagcagcaaacaaataaaatgaaataaaagaaacaaatgaaataaatattgtgttgtgcagcattaaaaaaaatcaaaataaaaattaaatgtgagcaaagaa

SEQ ID NO: 12643 - DNA, 1642 bp, Homo sapiens
  source 1..1642: mol_type = unassigned DNA
cagcggcggcagcagctcccgcagctcctgctctggtccgcctcggcccggcggcggccatcagccccctcggcctcggctcgaggggcggggagctgcgcgcgcccctcggtccgaccgacaccctccccttcccgcccccatgggctgcctcgggaacagtaagaccgaggaccagcgcaacgaggagaaggcgcagcgtgaggccaacaaaaagatcgagaagcagctgcagaaggacaagcaggtctaccgggccacgcaccgcctgctgctgctgggtgctggagaatctggtaaaagcaccattgtgaagcagatgaggatcctgcatgttaatgggtttaatggagacagtgagaaggcaaccaaagtgcaggacatcaaaaacaacctgaaagaggcgattgaaaccattgtggccgccatgagcaacctggtgccccccgtggagctggccaaccccgagaaccagttcagagtggactacatcctgagtgtgatgaacgtgcctgactttgacttccctcccgaattctatgagcatgccaaggctctgtgggaggatgaaggagtgcgtgcctgctacgaacgctccaacgagtaccagctgattgactgtgcccagtacttcctggacaagatcgacgtgatcaagcaggctgactatgtgccgagcgatcaggacctgcttcgctgccgtgtcctgacttctggaatctttgagaccaagttccaggtggacaaagtcaacttccacatgtttgacgtgggtggccagcgcgatgaacgccgcaagtggatccagtgcttcaacgatgtgactgccatcatcttcgtggtggccagcagcagctacaacatggtcatccgggaggacaaccagaccaaccgcctgcaggaggctctgaacctcttcaagagcatctggaacaacagatggctgcgcaccatctctgtgatcctgttcctcaacaagcaagatctgctcgctgagaaagtccttgctgggaaatcgaagattgaggactactttccagaatttgctcgctacactactcctgaggatgctactcccgagcccggagaggacccacgcgtgacccgggccaagtacttcattcgagatgagtttctgaggatcagcactgccagtggagatgggcgtcactactgctaccctcatttcacctgcgctgtggacactgagaacatccgccgtgtgttcaacgactgccgtgacatcattcagcgcatgcaccttcgtcagtacgagctgctctaagaagggaacccccaaatttaattaaagccttaagcacaattaattaaaagtgaaacgtaattgtacaagcagttaatcacccaccatagggcatgattaacaaagcaacctttcccttcccccgagtgattttgcgaaacccccttttcccttcagcttgcttagatgttccaaatttagaaagcttaaggcggcctacagaaaaaggaaaaaaggccacaaaagttccctctcactttcagtaaaaataaataaaacagcagcagcaaacaaataaaatgaaataaaagaaacaaatgaaataaatattgtgttgtgcagcattaaaaaaaatcaaaataaaaattaaatgtgagc

SEQ ID NO: 12644 - DNA, 2578 bp, Homo sapiens
  source 1..2578: mol_type = unassigned DNA
agaacctcactgcccgtccctcctcgcctcagtctcctctgtcctctcccaggcaagaggaccggcggaggcacctctctcgagtcttaggctgcggaatctaagactcagcgagaggagcccgggaggagacagaactttccccttttttcccatcccttcttcttgctcagagaggcaagcaaggcgcggagctttagaaagttcttaagtggtcaggaaggtaggtgcttccctttttctcctcacaaggaggtgaggctgggacctccgggccagcttctcacctcatagggtgtacctttcccggctccagcagccaatgtgcttcggagccactctctgcagagccagagggcaggccggcttctcggtgtgtgcctaagaggatggatcggaggtcccgggctcagcagtggcgccgagctcgccataattacaacgacctgtgcccgcccataggccgccgggcagccaccgcgctcctctggctctcctgctccatcgcgctcctccgcgcccttgccacctccaacgcccgtgcccagcagcgcgcggctgcccaacagcgccggagcttccttaacgcccaccaccgctccggcgcccaggtattccctgagtcccccgaatcggaatctgaccacgagcacgaggaggcagaccttgagctgtccctccccgagtgcctagagtacgaggaagagttcgactacgagaccgagagcgagaccgagtccgaaatcgagtccgagaccgacttcgagaccgagcctgagaccgcccccaccactgagcccgagaccgagcctgaagacgatcgcggcccggtggtgcccaagcactccaccttcggccagtccctcacccagcgtctgcacgctctcaagttgcgaagccccgacgcctccccaagtcgcgcgccgcccagcactcaggagccccagagccccagggaaggggaggagctcaagcccgaggacaaagatccaagggaccccgaagagtcgaaggagcccaaggaggagaagcagcggcgtcgctgcaagccaaagaagcccacccgccgtgacgcgtccccggagtccccttccaaaaagggacccatccccatccggcgtcactaatggaggacgccgtccagattctccttgttttcatggattcaggtgctggagaatctggtaaaagcaccattgtgaagcagatgaggatcctgcatgttaatgggtttaatggagagggcggcgaagaggacccgcaggctgcaaggagcaacagcgatggtgagaaggcaaccaaagtgcaggacatcaaaaacaacctgaaagaggcgattgaaaccattgtggccgccatgagcaacctggtgccccccgtggagctggccaaccccgagaaccagttcagagtggactacatcctgagtgtgatgaacgtgcctgactttgacttccctcccgaattctatgagcatgccaaggctctgtgggaggatgaaggagtgcgtgcctgctacgaacgctccaacgagtaccagctgattgactgtgcccagtacttcctggacaagatcgacgtgatcaagcaggctgactatgtgccgagcgatcaggacctgcttcgctgccgtgtcctgacttctggaatctttgagaccaagttccaggtggacaaagtcaacttccacatgtttgacgtgggtggccagcgcgatgaacgccgcaagtggatccagtgcttcaacgatgtgactgccatcatcttcgtggtggccagcagcagctacaacatggtcatccgggaggacaaccagaccaaccgcctgcaggaggctctgaacctcttcaagagcatctggaacaacagatggctgcgcaccatctctgtgatcctgttcctcaacaagcaagatctgctcgctgagaaagtccttgctgggaaatcgaagattgaggactactttccagaatttgctcgctacactactcctgaggatgctactcccgagcccggagaggacccacgcgtgacccgggccaagtacttcattcgagatgagtttctgaggatcagcactgccagtggagatgggcgtcactactgctaccctcatttcacctgcgctgtggacactgagaacatccgccgtgtgttcaacgactgccgtgacatcattcagcgcatgcaccttcgtcagtacgagctgctctaagaagggaacccccaaatttaattaaagccttaagcacaattaattaaaagtgaaacgtaattgtacaagcagttaatcacccaccatagggcatgattaacaaagcaacctttcccttcccccgagtgattttgcgaaacccccttttcccttcagcttgcttagatgttccaaatttagaaagcttaaggcggcctacagaaaaaggaaaaaaggccacaaaagttccctctcactttcagtaaaaataaataaaacagcagcagcaaacaaataaaatgaaataaaagaaacaaatgaaataaatattgtgttgtgcagcattaaaaaaaatcaaaataaaaattaaatgtgagcaaagaa

SEQ ID NO: 12645 - DNA, 1975 bp, Homo sapiens
  source 1..1975: mol_type = unassigned DNA
tcgccgccgccgcctcctcctccccccgcctccccccgcccgccgcggcgcttttggctcggggcggcggcgggggcccggccgaggcaataagagcggcggcggcggcagcggcggcagcagctcccgcagctcctgctctggtccgcctcggcccggcggcggccatcagccccctcggcctcggctcgaggggcggggagctgcgcgcgcccctcggtccgaccgacaccctccccttcccgcccgtccgcgcgccccgcggcccgcggcccgcagtccgccccgcgcgctccttgccgaggagccgagcccgcgcccggcccgcccgcccggcgctgccccggccctcccggcccgcgtgaggccgcccgcgcccgccgccgccgcagcccggccgcgccccgccgccgccgccgccgccatgggctgcctcgggaacagtaagaccgaggaccagcgcaacgaggagaaggcgcagcgtgaggccaacaaaaagatcgagaagcagctgcagaaggacaagcaggtctaccgggccacgcaccgcctgctgctgctgggtgctggagaatctggtaaaagcaccattgtgaagcagatgaggatcctgcatgttaatgggtttaatggagagggcggcgaagaggacccgcaggctgcaaggagcaacagcgatggcagtgagaaggcaaccaaagtgcaggacatcaaaaacaacctgaaagaggcgattgaaaccattgtggccgccatgagcaacctggtgccccccgtggagctggccaaccccgagaaccagttcagagtggactacatcctgagtgtgatgaacgtgcctgactttgacttccctcccgaattctatgagcatgccaaggctctgtgggaggatgaaggagtgcgtgcctgctacgaacgctccaacgagtaccagctgattgactgtgcccagtacttcctggacaagatcgacgtgatcaagcaggctgactatgtgccgagcgatcaggacctgcttcgctgccgtgtcctgacttctggaatctttgagaccaagttccaggtggacaaagtcaacttccacatgtttgacgtgggtggccagcgcgatgaacgccgcaagtggatccagtgcttcaacgatgtgactgccatcatcttcgtggtggccagcagcagctacaacatggtcatccgggaggacaaccagaccaaccgcctgcaggaggctctgaacctcttcaagagcatctggaacaacagatggctgcgcaccatctctgtgatcctgttcctcaacaagcaagatctgctcgctgagaaagtccttgctgggaaatcgaagattgaggactactttccagaatttgctcgctacactactcctgaggatgctactcccgagcccggagaggacccacgcgtgacccgggccaagtacttcattcgagatgagtttctgaggatcagcactgccagtggagatgggcgtcactactgctaccctcatttcacctgcgctgtggacactgagaacatccgccgtgtgttcaacgactgccgtgacatcattcagcgcatgcaccttcgtcagtacgagctgctctaagaagggaacccccaaatttaattaaagccttaagcacaattaattaaaagtgaaacgtaattgtacaagcagttaatcacccaccatagggcatgattaacaaagcaacctttcccttcccccgagtgattttgcgaaacccccttttcccttcagcttgcttagatgttccaaatttagaaagcttaaggcggcctacagaaaaaggaaaaaaggccacaaaagttccctctcactttcagtaaaaataaataaaacagcagcagcaaacaaataaaatgaaataaaagaaacaaatgaaataaatattgtgttgtgcagcattaaaaaaaatcaaaataaaaattaaatgtgagcaaagaa

SEQ ID NO: 12646 - DNA, 2551 bp, Homo sapiens
  source 1..2551: mol_type = unassigned DNA
agtctcctctgtcctctcccaggcaagaggaccggcggaggcacctctctcgagtcttaggctgcggaatctaagactcagcgagaggagcccgggaggagacagaactttccccttttttcccatcccttcttcttgctcagagaggcaagcaaggcgcggagctttagaaagttcttaagtggtcaggaaggtaggtgcttccctttttctcctcacaaggaggtgaggctgggacctccgggccagcttctcacctcatagggtgtacctttcccggctccagcagccaatgtgcttcggagccactctctgcagagccagagggcaggccggcttctcggtgtgtgcctaagaggatggatcggaggtcccgggctcagcagtggcgccgagctcgccataattacaacgacctgtgcccgcccataggccgccgggcagccaccgcgctcctctggctctcctgctccatcgcgctcctccgcgcccttgccacctccaacgcccgtgcccagcagcgcgcggctgcccaacagcgccggagcttccttaacgcccaccaccgctccggcgcccaggtattccctgagtcccccgaatcggaatctgaccacgagcacgaggaggcagaccttgagctgtccctccccgagtgcctagagtacgaggaagagttcgactacgagaccgagagcgagaccgagtccgaaatcgagtccgagaccgacttcgagaccgagcctgagaccgcccccaccactgagcccgagaccgagcctgaagacgatcgcggcccggtggtgcccaagcactccaccttcggccagtccctcacccagcgtctgcacgctctcaagttgcgaagccccgacgcctccccaagtcgcgcgccgcccagcactcaggagccccagagccccagggaaggggaggagctcaagcccgaggacaaagatccaagggaccccgaagagtcgaaggagcccaaggaggagaagcagcggcgtcgctgcaagccaaagaagcccacccgccgtgacgcgtccccggagtccccttccaaaaagggacccatccccatccggcgtcactaatggaggacgccgtccagattctccttgttttcatggattcaggtgctggagaatctggtaaaagcaccattgtgaagcagatgaggatcctgcatgttaatgggtttaatggagagggcggcgaagaggacccgcaggctgcaaggagcaacagcgatggcagtgagaaggcaaccaaagtgcaggacatcaaaaacaacctgaaagaggcgattgaaaccattgtggccgccatgagcaacctggtgccccccgtggagctggccaaccccgagaaccagttcagagtggactacatcctgagtgtgatgaacgtgcctgactttgacttccctcccgaattctatgagcatgccaaggctctgtgggaggatgaaggagtgcgtgcctgctacgaacgctccaacgagtaccagctgattgactgtgcccagtacttcctggacaagatcgacgtgatcaagcaggctgactatgtgccgagcgatcaggacctgcttcgctgccgtgtcctgacttctggaatctttgagaccaagttccaggtggacaaagtcaacttccacatgtttgacgtgggtggccagcgcgatgaacgccgcaagtggatccagtgcttcaacgatgtgactgccatcatcttcgtggtggccagcagcagctacaacatggtcatccgggaggacaaccagaccaaccgcctgcaggaggctctgaacctcttcaagagcatctggaacaacagatggctgcgcaccatctctgtgatcctgttcctcaacaagcaagatctgctcgctgagaaagtccttgctgggaaatcgaagattgaggactactttccagaatttgctcgctacactactcctgaggatgctactcccgagcccggagaggacccacgcgtgacccgggccaagtacttcattcgagatgagtttctgaggatcagcactgccagtggagatgggcgtcactactgctaccctcatttcacctgcgctgtggacactgagaacatccgccgtgtgttcaacgactgccgtgacatcattcagcgcatgcaccttcgtcagtacgagctgctctaagaagggaacccccaaatttaattaaagccttaagcacaattaattaaaagtgaaacgtaattgtacaagcagttaatcacccaccatagggcatgattaacaaagcaacctttcccttcccccgagtgattttgcgaaacccccttttcccttcagcttgcttagatgttccaaatttagaaagcttaaggcggcctacagaaaaaggaaaaaaggccacaaaagttccctctcactttcagtaaaaataaataaaacagcagcagcaaacaaataaaatgaaataaaagaaacaaatgaaataaatattgtgttgtgcagcattaaaaaaaatcaaaataaaaattaaatgtgagcaaagaa

SEQ ID NO: 12647 - DNA, 840 bp, Homo sapiens
  source 1..840: mol_type = unassigned DNA
atgggctgcctcgggaacagtaagaccgaggaccagcgcaacgaggagaaggcgcagcgtgaggccaacaaggaggacaaccagaccaaccgcctgcaggaggctctgaacctcttcaagagcatctggaacaacagatggctgcgcaccatctctgtgatcctgttcctcaacaagcaagatctgctcgctgagaaagtccttgctgggaaatcgaagattgaggactactttccagaatttgctcgctacactactcctgaggatgctactcccgagcccggagaggacccacgcgtgacccgggccaagtacttcattcgagatgagtttctgaggatcagcactgccagtggagatgggcgtcactactgctaccctcatttcacctgcgctgtggacactgagaacatccgccgtgtgttcaacgactgccgtgacatcattcagcgcatgcaccttcgtcagtacgagctgctctaagaagggaacccccaaatttaattaaagccttaagcacaattaattaaaagtgaaacgtaattgtacaagcagttaatcacccaccatagggcatgattaacaaagcaacctttcccttcccccgagtgattttgcgaaacccccttttcccttcagcttgcttagatgttccaaatttagaaagcttaaggcggcctacagaaaaaggaaaaaaggccacaaaagttccctctcactttcagtaaaaataaataaaacagcagcagcaaacaaataaaatgaaataaaagaaacaaatgaaataaatattgtgttgtgcagcattaaaaaaaatcaaaataaaaattaaatgtgagc

SEQ ID NO: 12648 - DNA, 1972 bp, Homo sapiens
  source 1..1972: mol_type = unassigned DNA
tcgccgccgccgcctcctcctccccccgcctccccccgcccgccgcggcgcttttggctcggggcggcggcgggggcccggccgaggcaataagagcggcggcggcggcagcggcggcagcagctcccgcagctcctgctctggtccgcctcggcccggcggcggccatcagccccctcggcctcggctcgaggggcggggagctgcgcgcgcccctcggtccgaccgacaccctccccttcccgcccgtccgcgcgccccgcggcccgcggcccgcagtccgccccgcgcgctccttgccgaggagccgagcccgcgcccggcccgcccgcccggcgctgccccggccctcccggcccgcgtgaggccgcccgcgcccgccgccgccgcagcccggccgcgccccgccgccgccgccgccgccatgggctgcctcgggaacagtaagaccgaggaccagcgcaacgaggagaaggcgcagcgtgaggccaacaaaaagatcgagaagcagctgcagaaggacaagcaggtctaccgggccacgcaccgcctgctgctgctgggtgctggagaatctggtaaaagcaccattgtgaagcagatgaggatcctgcatgttaatgggtttaatggagagggcggcgaagaggacccgcaggctgcaaggagcaacagcgatggtgagaaggcaaccaaagtgcaggacatcaaaaacaacctgaaagaggcgattgaaaccattgtggccgccatgagcaacctggtgccccccgtggagctggccaaccccgagaaccagttcagagtggactacatcctgagtgtgatgaacgtgcctgactttgacttccctcccgaattctatgagcatgccaaggctctgtgggaggatgaaggagtgcgtgcctgctacgaacgctccaacgagtaccagctgattgactgtgcccagtacttcctggacaagatcgacgtgatcaagcaggctgactatgtgccgagcgatcaggacctgcttcgctgccgtgtcctgacttctggaatctttgagaccaagttccaggtggacaaagtcaacttccacatgtttgacgtgggtggccagcgcgatgaacgccgcaagtggatccagtgcttcaacgatgtgactgccatcatcttcgtggtggccagcagcagctacaacatggtcatccgggaggacaaccagaccaaccgcctgcaggaggctctgaacctcttcaagagcatctggaacaacagatggctgcgcaccatctctgtgatcctgttcctcaacaagcaagatctgctcgctgagaaagtccttgctgggaaatcgaagattgaggactactttccagaatttgctcgctacactactcctgaggatgctactcccgagcccggagaggacccacgcgtgacccgggccaagtacttcattcgagatgagtttctgaggatcagcactgccagtggagatgggcgtcactactgctaccctcatttcacctgcgctgtggacactgagaacatccgccgtgtgttcaacgactgccgtgacatcattcagcgcatgcaccttcgtcagtacgagctgctctaagaagggaacccccaaatttaattaaagccttaagcacaattaattaaaagtgaaacgtaattgtacaagcagttaatcacccaccatagggcatgattaacaaagcaacctttcccttcccccgagtgattttgcgaaacccccttttcccttcagcttgcttagatgttccaaatttagaaagcttaaggcggcctacagaaaaaggaaaaaaggccacaaaagttccctctcactttcagtaaaaataaataaaacagcagcagcaaacaaataaaatgaaataaaagaaacaaatgaaataaatattgtgttgtgcagcattaaaaaaaatcaaaataaaaattaaatgtgagcaaagaa

SEQ ID NO: 12649 - DNA, 1931 bp, Homo sapiens
  source 1..1931: mol_type = unassigned DNA
ctcgccgccgccgcctcctcctccccccgcctccccccgcccgccgcggcgcttttggctcggggcggcggcgggggcccggccgaggcaataagagcggcggcggcggcagcggcggcagcagctcccgcagctcctgctctggtccgcctcggcccggcggcggccatcagccccctcggcctcggctcgaggggcggggagctgcgcgcgcccctcggtccgaccgacaccctccccttcccgcccgtccgcgcgccccgcggcccgcggcccgcagtccgccccgcgcgctccttgccgaggagccgagcccgcgcccggcccgcccgcccggcgctgccccggccctcccggcccgcgtgaggccgcccgcgcccgccgccgccgcagcccggccgcgccccgccgccgccgccgccgccatgggctgcctcgggaacagtaagaccgaggaccagcgcaacgaggagaaggcgcagcgtgaggccaacaaaaagatcgagaagcagctgcagaaggacaagcaggtctaccgggccacgcaccgcctgctgctgctgggtgctggagaatctggtaaaagcaccattgtgaagcagatgaggatcctgcatgttaatgggtttaatggagacagtgagaaggcaaccaaagtgcaggacatcaaaaacaacctgaaagaggcgattgaaaccattgtggccgccatgagcaacctggtgccccccgtggagctggccaaccccgagaaccagttcagagtggactacatcctgagtgtgatgaacgtgcctgactttgacttccctcccgaattctatgagcatgccaaggctctgtgggaggatgaaggagtgcgtgcctgctacgaacgctccaacgagtaccagctgattgactgtgcccagtacttcctggacaagatcgacgtgatcaagcaggctgactatgtgccgagcgatcaggacctgcttcgctgccgtgtcctgacttctggaatctttgagaccaagttccaggtggacaaagtcaacttccacatgtttgacgtgggtggccagcgcgatgaacgccgcaagtggatccagtgcttcaacgatgtgactgccatcatcttcgtggtggccagcagcagctacaacatggtcatccgggaggacaaccagaccaaccgcctgcaggaggctctgaacctcttcaagagcatctggaacaacagatggctgcgcaccatctctgtgatcctgttcctcaacaagcaagatctgctcgctgagaaagtccttgctgggaaatcgaagattgaggactactttccagaatttgctcgctacactactcctgaggatgctactcccgagcccggagaggacccacgcgtgacccgggccaagtacttcattcgagatgagtttctgaggatcagcactgccagtggagatgggcgtcactactgctaccctcatttcacctgcgctgtggacactgagaacatccgccgtgtgttcaacgactgccgtgacatcattcagcgcatgcaccttcgtcagtacgagctgctctaagaagggaacccccaaatttaattaaagccttaagcacaattaattaaaagtgaaacgtaattgtacaagcagttaatcacccaccatagggcatgattaacaaagcaacctttcccttcccccgagtgattttgcgaaacccccttttcccttcagcttgcttagatgttccaaatttagaaagcttaaggcggcctacagaaaaaggaaaaaaggccacaaaagttccctctcactttcagtaaaaataaataaaacagcagcagcaaacaaataaaatgaaataaaagaaacaaatgaaataaatattgtgttgtgcagcattaaaaaaaatcaaaataaaaattaaatgtgagcaaagaa

SEQ ID NO: 12650 - DNA, 1719 bp, Homo sapiens
  source 1..1719: mol_type = unassigned DNA
agtctcctctgtcctctcccaggcaagaggaccggcggaggcacctctctcgagtcttaggctgcggaatctaagactcagcgagaggagcccgggaggagacagaactttccccttttttcccatcccttcttcttgctcagagaggcaagcaaggcgcggagctttagaaagttcttaagtggtcaggaaggtaggtgcttccctttttctcctcacaaggaggtgaggctgggacctccgggccagcttctcacctcatagggtgtacctttcccggctccagcagccaatgtgcttcggagccactctctgcagagccagagggcaggccggcttctcggtgtgtgcctaagaggatggatcggaggtcccgggctcagcagtggcgccgagctcgccataattacaacgacctgtgcccgcccataggccgccgggcagccaccgcgctcctctggctctcctgctccatcgcgctcctccgcgcccttgccacctccaacgcccgtgcccagcagcgcgcggctgcccaacagcgccggagcttccttaacgcccaccaccgctccggcgcccaggtattccctgagtcccccgaatcggaatctgaccacgagcacgaggaggcagaccttgagctgtccctccccgagtgcctagagtacgaggaagagttcgactacgagaccgagagcgagaccgagtccgaaatcgagtccgagaccgacttcgagaccgagcctgagaccgcccccaccactgagcccgagaccgagcctgaagacgatcgcggcccggtggtgcccaagcactccaccttcggccagtccctcacccagcgtctgcacgctctcaagttgcgaagccccgacgcctccccaagtcgcgcgccgcccagcactcaggagccccagagccccagggaaggggaggagctcaagcccgaggacaaagatccaagggaccccgaagagtcgaaggagcccaaggaggagaagcagcggcgtcgctgcaagccaaagaagcccacccgccgtgacgcgtccccggagtccccttccaaaaagggacccatccccatccggcgtcactaatggaggacgccgtccagattctccttgttttcatggattcaggtgctggagaatctggtaaaagcaccattgtgaagcagatgaggatcctgcatgttaatgggtttaatggagagggcggcgaagaggacccgcaggctgcaaggagcaacagcgatggaatataatatccctagatgatggctacagtttctcatcttcccggctatgtcctatcacaatttgcatgctggaattgctcggtcttaggaacttctaataagaatactattctgttatctgaggggggaggggggatggggcccctgctacctgaccttaaacgatgattgaaaaaacgaaaaatgaactgaaatccttaattggcagaaatgtagtatgacaactatccaaaaaggcatctctataagaaatgactaattgacaatctgctgtaccaaaagttggcatttgagcaagatatgacaagtccttagtgagcaacctactgtgtactagatgtcctgctaaacccttgaaccctactaataccttggcctgcacgtctctctcactctgttctgcaagtcaatataagtattaacattcgtgataaataaaaattctctgcatgtttcagcaa

SEQ ID NO: 12651 - DNA, 3480 bp, Homo sapiens
  source 1..3480: mol_type = unassigned DNA
gttatgggcgtgcgcaactgcctctacggcaataatatgtcaggacaacgcgatatcccccctgaaatcggggaacagcccgagcaaccacctttggaggccccaggggcagctgcccccggtgctgggcctagcccagccgaagagatggagaccgaaccgcctcacaacgagcccatccccgtcgagaatgatggcgaggcctgtggacccccagaggtctccagacccaactttcaggtcctcaacccggcattcagggaagctggagcccatggaagctacagcccacctcctgaggaagcaatgcccttcgaggctgaacagcccagcttgggaggcttctggcctacactggagcagcctggattccccagtggggtccatgcaggccttgaggccttcggcccagcactcatggagcccggagccttcagtggtgccagaccaggcctgggaggatacagccctccaccagaagaagctatgccctttgagtttgaccagcctgcccagagaggctgcagtcaacttctcttacaggtcccagaccttgctccaggaggcccaggtgctgcaggggtccccggagctcctcccgaggagccccaagccctcaggcctgcaaaggctggctccagaggaggctacagccctccccctgaggagactatgccatttgagcttgatggagaaggatttggggacgacagcccacccccggggctttcccgagttatcgcacaagtcgacggcagcagccagttcgcggcagtcgcggcctcgagtgcggtccgcctcactcccgccgcgaacgcgcctcccctctgggtcccaggcgccatcggcagcccatcccaagaggctgtcagacctccttctaacttcacgggcagcagcccctggatggagatctccggacccccgttcgagattggcagcgcccccgctggggtcgacgacactcccgtcaacatggacagccccccaatcgcgcttgacggcccgcccatcaaggtctccggagccccagataagagagagcgagcagagagacccccagttgaggaggaagcagcagagatggaaggagccgctgatgccgcggagggaggaaaagtaccctctccggggtacggatcccctgccgccggggcagcctcagcggataccgctgccagggcagcccctgcagccccagccgatcctgactccggggcaaccccagaagatcccgactccgggacagcaccagccgatcctgactccggggcattcgcagccgatcccgactccggggcagcccctgccgccccagccgatcccgactccggggcggcccctgacgccccagccgatcccgactccggggcggcccctgacgccccagccgatccagatgccggggcggcccctgaggctcccgccgcccctgcggctgctgagacccgggcagcccatgtcgccccagctgcgccagacgcaggggctcccactgccccagccgcttctgccacccgggcagcccaagtccgccgggcggcctctgcagcccctgcctccggggccagacgcaagatccatctcagaccccccagccccgagatccaggctgccgatccgcctactccgcggcctactcgcgcgtctgcctggcggggcaagtccgagagcagccgcggccgccgcgtgtactacgatgaaggggtggccagcagcgacgatgactccagcggagacgagtccgacgatgggacctccggatgcctccgctggtttcagcatcggcgaaatcgccgccgccgaaagccccagcgcaacttactccgcaactttctcgtgcaagccttcgggggctgcttcggtcgatctgagagtccccagcccaaagcctcgcgctctctcaaggtcaagaaggtacccctggcggagaagcgcagacagatgcgcaaagaagccctggagaagcgggcccagaagcgcgcagagaagaaacgcagtaagctcatcgacaaacaactccaggacgaaaagatgggctacatgtgtacgcaccgcctgctgcttctaggtgctggagaatctggtaaaagcaccattgtgaagcagatgaggatcctgcatgttaatgggtttaatggagagggcggcgaagaggacccgcaggctgcaaggagcaacagcgatggtgagaaggcaaccaaagtgcaggacatcaaaaacaacctgaaagaggcgattgaaaccattgtggccgccatgagcaacctggtgccccccgtggagctggccaaccccgagaaccagttcagagtggactacatcctgagtgtgatgaacgtgcctgactttgacttccctcccgaattctatgagcatgccaaggctctgtgggaggatgaaggagtgcgtgcctgctacgaacgctccaacgagtaccagctgattgactgtgcccagtacttcctggacaagatcgacgtgatcaagcaggctgactatgtgccgagcgatcaggacctgcttcgctgccgtgtcctgacttctggaatctttgagaccaagttccaggtggacaaagtcaacttccacatgtttgacgtgggtggccagcgcgatgaacgccgcaagtggatccagtgcttcaacgatgtgactgccatcatcttcgtggtggccagcagcagctacaacatggtcatccgggaggacaaccagaccaaccgcctgcaggaggctctgaacctcttcaagagcatctggaacaacagatggctgcgcaccatctctgtgatcctgttcctcaacaagcaagatctgctcgctgagaaagtccttgctgggaaatcgaagattgaggactactttccagaatttgctcgctacactactcctgaggatgctactcccgagcccggagaggacccacgcgtgacccgggccaagtacttcattcgagatgagtttctgaggatcagcactgccagtggagatgggcgtcactactgctaccctcatttcacctgcgctgtggacactgagaacatccgccgtgtgttcaacgactgccgtgacatcattcagcgcatgcaccttcgtcagtacgagctgctctaagaagggaacccccaaatttaattaaagccttaagcacaattaattaaaagtgaaacgtaattgtacaagcagttaatcacccaccatagggcatgattaacaaagcaacctttcccttcccccgagtgattttgcgaaacccccttttcccttcagcttgcttagatgttccaaatttagaaagcttaaggcggcctacagaaaaaggaaaaaaggccacaaaagttccctctcactttcagtaaaaataaataaaacagcagcagcaaacaaataaaatgaaataaaagaaacaaatgaaataaatattgtgttgtgcagcattaaaaaaaatcaaaataaaaattaaatgtgagcaaagaa

SEQ ID NO: 12652 - DNA, 729 bp, Homo sapiens
  source 1..729: mol_type = unassigned DNA
ccaccactgagcccgagaccgagcctgaagacgatcgcggcccggtggtgcccaagcactccaccttcggccagtccctcacccagcgtctgcacgctctcaagttgcgaagccccgacgcctccccaagtcgcgcgccgcccagcactcaggagccccagagccccagggaaggggaggagctcaagcccgaggacaaagatccaagggaccccgaagagtcgaaggagcccaaggaggagaagcagcggcgtcgctgcaagccaaagaagcccacccgccgtgacgcgtccccggagtccccttccaaaaagggacccatccccatccggcgtcactaatggaggacgccgtccagattctccttgttttcatggattcaggtgctggagaatctggtaaaagcaccattgtgaagcagatgaggatcctgcatgttaatgggtttaatggagatgagaaggcaaccaaagtgcaggacatcaaaaacaacctgaaagaggcgattgaaaccattgtggccgccatgagcaacctggtgccccccgtggagctggccaaccccgagaaccagttcagagtggactacatcctgagtgtgatgaacgtgcctgactttgacttccctcccgaattctatgagcatgccaaggctctgtgggaggatgaaggagtgcgtgcctgctacgaacgctccaacgagtaccagctgattgactgtgcccagta

SEQ ID NO: 12653 - DNA, 632 bp, Homo sapiens
  source 1..632: mol_type = unassigned DNA
cccgaatcggaatctgaccacgagcacgaggaggcagaccttgagctgtccctccccgagtgcctagagtacgaggaagagttcgactacgagaccgagagcgagaccgagtccgaaatcgagtccgagaccgacttcgagaccgagcctgagaccgcccccaccactgagcccgagaccgagcctgaagacgatcgcggcccggtggtgcccaagcactccaccttcggccagtccctcacccagcgtctgcacgctctcaagttgcgaagccccgacgcctccccaagtcgcgcgccgcccagcactcaggagccccagagccccagggaaggggaggagctcaagcccgaggacaaagatccaagggaccccgaagagtcgaaggagcccaaggaggagaagcagcggcgtcgctgcaagccaaagaagcccacccgccgtgacgcgtccccggagtccccttccaaaaagggacccatccccatccggcgtcactaatggaggacgccgtccagattctccttgttttcatggattcaggtgctggagaatctggtaaaagcaccattgtgaagcagatgaggatcctgcatgttaatgggtttaatggagacagtgagaaggcaacc

SEQ ID NO: 12654 - DNA, 6403 bp, Homo sapiens
  source 1..6403: mol_type = unassigned DNA
agttaccacgtcagtgagctgacagggaaggtacccggctctactgcccgtcccggacgactcatcctggcggactgtgcagtcccaccctgacttcggcctcaatttccaggaaacaggctccttctcttctcccatctgctaccagagccgggagagctgctcggagacgcctccggggtgcgggctggacatgagcagcggctgccggtcctgggactaggccccgccattttggatccgctgacaggtttgccaagatggtggataagaatatttacatcattcaaggggagattaacattgtggttggggccatcaaacgaaatgcccgatggagcacccatacaccactggatgaagaacgggatcctctgctgcatagtttcggtcatctaaaggaggttttaaacagtataacagaactctcagaaattgagcccaatgtattccttcgaccttttctggaagtgattcgctctgaagataccactggccctatcactggactggcactcacctctgtcaacaagttcctgtcctatgcactcatagatcccacccatgagggcacagcagagggcatggagaacatggcagatgctgtcacccatgctcgttttgtgggcacggatcctgccagtgatgaagttgtcctgatgaaaatccttcaggttctacggactctgctgctaaccccagtgggtgcccacctaaccaatgaatctgtgtgtgagattatgcagtcttgcttccggatctgctttgaaatgaggctcagtgagttattgagaaaatccgcagagcacactctcgtagacatggtgcagctgctcttcacaaggttacctcagtttaaagaagaacccaagaactatgtggggaccaacatgaagaagctgaaaatgagagccggaggcatgagtgattcatccaaatggaagaaacagaagagatcccctcggcccccacgccatatgaccaaagtcacaccaggttcagagctgcccactcccaatggaaccaccttatcatctaacctcactggtggcatgcccttcattgatgtgcccactcccatctcctctgcaagttcagaagctgcctcagcagtggtcagtccctctacagacagtggcctggaattctcctcccaaaccacttccaaggaagaccttactgatctagagcaacctggctctccagggtacagcacagctacagagcctggaagcagtgagctaggtgttcccgagcagcctgacctccaggaagggacccatgtggaaaagtcccagtcagcatctgtggagtccatccctgaagtgttagaggagtgcacgtcccctgccgaccactctgactctgcctctgtccatgacatggattacgtcaatccccggggcgtgcgctttacacagtcctcccagaaagaaggcacagctttggtcccctatggtcttccctgcatccgcgagctcttccgcttcctcatctccctcaccaatccacacgaccgccataactcagaggttatgattcacatgggactgcatttgctgacagtggcccttgagtcagcccctgtagcccagtgccagaccctcttgggcctcatcaaggatgagatgtgccgtcacttattccagctactcagcatagagcgactaaacctttatgctgcttccctgcgagtatgcttcctactgtttgagagcatgcgagagcacctcaagttccaaatggagatgtacatcaaaaagcttatggagatcatcactgtggagaaccccaagatgccttatgagatgaaggagatggcactggaggccattgtgcagctctggcgcatccccagctttgtcacagagctctacatcaactatgattgtgactactactgttccaacctctttgaggaactcacaaagctgctgtccaagaatgccttccctgtgtctggtcaactctatacaacacacctactatctcttgatgccctattgacagtgattgacagcaccgaggcccactgccaggctaaagtcctcaacagcctcacccagcaagagaagaaggagacagccagaccaagctgtgagatagtagatggcacccgagaagctagcaatactgagagaactgccagcgatgggaaagctgtaggcatggcctcagacatcccaggcctgcatctgccaggtggagggcggctgccaccagaacatgggaaatcaggatgcagtgatctggaggaagctgttgactctggggctgacaaaaagtttgcccggaagccaccccgattttcctgtctcctgccagatccacgggaactaattgaaattaaaaacaaaaagaagctgctaatcactggcacagagcagttcaatcagaaaccaaagaaggggattcagtttctgcaagagaaaggcctcctcaccatcccaatggacaacacagaggttgctcagtggctccgagagaaccctcggctggacaagaagatgattggagagtttgtgagtgaccgcaaaaacattgacctgttggagagctttgtgagcaccttcagttttcagggtctgcgactggacgaagccctccgcctctacctggaagccttccgtttgcctggggaagcaccagtcatccagaggttgctggaggcattcacagagcgttggatgaattgtaatggctccccatttgccaatagcgatgcctgcttttccctggcctatgctgtcatcatgcttaatactgaccagcacaaccacaatgttcgtaaacagaatgcacccatgaccctggaggagtttcgcaaaaatctgaaaggtgtgaatggaggcaaggactttgagcaagacatcctggaggacatgtaccatgccatcaagaatgaggaaattgtaatgcctgaggagcagacaggcttggttcgggagaactatgtgtggaatgtgctgcttcatcgaggtgccacccctgagggcatattcctgcgtgtgcctactgccagctatgatcttgacctcttcaccatgacctggggccccactattgctgctctctcttatgtctttgacaaaagccttgaggagacaatcatccagaaagccatctcaggcttcaggaagtgcgccatgatctccgcccactatggcctcagcgatgtgtttgacaatctcatcatctctctatgcaaattcacagctctcagcagtgagtctattgagaacctgcccagtgtatttggaagcaaccctaaagcccatattgcagccaagacagtattccatttggcccatcgtcatggtgacatcctgcgggagggctggaagaatatcatggaggccatgctgcagctcttccgagcccaactactgcccaaggctatgatagaggtagaagatttcgtggatcccaatggcaagatctctctacagcgggaagagacaccatcaaaccgaggagagtcaacagtgctgagctttgtgagctggctaacactgagtggtcctgagcagtctagtgttcggggcccatccactgaaaaccaagaggccaagagagtggccttagagtgtataaagcaatgtgacccagaaaaaatgatcacagaaagcaagttcctccagctggagtcactacaggagctcatgaaggctctggtctcagtgacaccagatgaagagacatatgatgaggaagatgctgctttctgcctagagatgctgctaaggattgtgttggagaacagggatcgtgtgggctgtgtgtggcagactgttcgagaccatctataccacctctgtgttcaggcacaagatttctgcttccttgtggagcgggcagtggtggggttgctacgcctggccattcggcttctccggagagaagagatcagtgctcaggtgctgctctccctgcgcattttgctactgatgaagcccagtgtgctatcccgagtcagccaccaggttgcgtatgggctccatgaactcctgaagaccaatgcagccaacatccactcaggtgatgactgggccacactcttcacactgctggagtgcatcggctcaggtgtgaagcctccagctgctctgcaggccacagccagggcagatgcacctgatgccggggcccagtcagatagtgagctcccatcctaccatcagaatgacgtgagcctggatcgagggtacacttccgactcagaggtctacactgaccatggcaggccgggcaagatacaccgatcagccacagatgccgatgtggtcaacagtggttggttagtggttgggaaggatgacgttgataactccaagccagggcccagccgcccaggcccttcacccctgatcaatcaatacagcctaacagtgggactggatttggggccacacgacactaagtctctgcttaagtgtgtggaatcgctgtccttcattgtgcgtgatgctgcccacatcacacctgacaactttgagctctgcgtcaagactctccggatctttgtggaggccagtctgaatggcggatgcaagtcccaggagaaacgtggcaagagtcacaaatatgacagcaaagggaaccgcttcaagaagaaatccaaagagggatcaatgcttcgccggcctcgaacctccagccaacatgcctctcggggcgggcagagtgatgatgatgaggacgaaggcgtgcctgccagctaccatacggtgtctttacaggtcagtcaggacttgctagacctgatgcacaccctgcacacgcgggcagcctctatctacagctcatgggcggaggagcaacgccacctggagacaggtggccagaagattgaagctgattctcgcaccctctgggcccactgctggtgccctttactgcagggtattgcctgcctgtgctgcgatgcccggcgccaggtacggatgcaggcactgacctatctgcagcgagcactacttgtacatgatctgcaaaagctagatgccctggaatgggagtcctgttttaacaaggtgctgtttcctctacttaccaagctcttggagaacatcagccctgcagatgtgggtgggatggaggagacccggatgagggcttccacattgctctctaaggtcttcctgcagcacctgtctccactgctgtcactctctacctttgcggccctctggctcaccatcttggacttcatggacaagtacatgcacgcaggctccagcgacttactgtcagaggcgatccctgagtctctgaagaacatgcttctggtgatggacacagcggagattttccacagtgcagatgcacggggaggcggcccctcggccctctgggagatcacctgggaacgcattgactgttttctccctcacctacgagatgaactcttcaagcagaccgtcatccaggaccccatgcccatggagcctcaaggccaaaagcctctcgcctcagcccacctgacttccgctgctggcgacactaggacacctggccatccaccgcccccagagattccatctgagctgggggcctgtgactttgagaagcccgagagcccccgagccgccagcagcagctccccaggatcaccagtggcctcaagccccagcaggctgagccccacccccgacgggcctccacccttggctcagcccccactgatcctgcagcccttggcctccccactgcaggtgggcgtgccacctatgactctgcccatcatcctcaaccctgcgctcatcgaggccacctcaccagtgcccctcctggccacaccccgccccacagatcccatacccacctctgaggtcaactaaggcaggtcactcagagatcaggaccagtgcttcccaccaggctttccttgaccccacttctggctgtcctgcgggccacaagctcttcaggccaagtcagagctgctgttgctgccacttggatggggacctgaaaaagagaatgttgatagccccagctaagacccccaatcagctgtgggacctttttcctcctctgcgctccattcctgggggttcagcctgagagtgaactcagctgtcatctgcagcctctgcctccagcccggcagctctggggaggcatccgtgtgccggccctgcagtgcctgcccacggtcaggcattgaaaactaagcccaaccactctgcactttgtttcccactcccattagccctgggccacctcctccagttcttcctcttttactaattagttggtcagtttggagagttgactggcaccatggagggtaggcaggtgggggctgggtgggggactgcccacaggagcatgtacatatggaaaaacagaacaacagtggactttttatgatataataaatgtcttagtaccagcatca

SEQ ID NO: 12655 - DNA, 8288 bp, Homo sapiens
  source 1..8288: mol_type = unassigned DNA
atttaaatacgcggcgccggcgagtgcgtcgagctcgccgcggactcaagatggcggcgtgtggacgtgtacggaggatgttccgcttgtcggcggcgctgcatctgctgctgctattcgcggccggggccgagaaactccccggccagggcgtccacagccagggccagggtcccggggccaactttgtgtccttcgtagggcaggccggaggcggcggcccggcgggtcagcagctgccccagctgcctcagtcatcgcagcttcagcagcaacagcagcagcagcaacagcaacagcagcctcagccgccgcagccgcctttcccggcgggtgggcctccggcccggcggggaggagcgggggctggtgggggctggaagctggcggaggaagagtcctgcagggaggacgtgacccgcgtgtgccctaagcacacctggagcaacaacctggcggtgctcgagtgcctgcaggatgtgagggagcctgaaaatgaaatttcttcagactgcaatcatttgttgtggaattataagctgaacctaactacagatcccaaatttgaatctgtggccagagaggtttgcaaatctactataacagagattaaagaatgtgctgatgaaccggttggaaaaggttacatggtttcctgcttggtggatcaccgaggcaacatcactgagtatcagtgtcaccagtacattaccaagatgacggccatcatttttagtgattaccgtttaatctgtggcttcatggatgactgcaaaaatgacatcaacattctgaaatgtggcagtattcggcttggagaaaaggatgcacattcacaaggtgaggtggtatcatgcttggagaaaggcctggtgaaagaagcagaagaaagagaacccaagattcaagtttctgaactctgcaagaaagccattctccgggtggctgagctgtcatcggatgactttcacttagaccggcatttatattttgcttgccgagatgatcgggagcgtttttgtgaaaatacacaagctggtgagggcagagtgtataagtgcctctttaaccataaatttgaagaatccatgagtgaaaagtgtcgagaagcacttacaacccgccaaaagctgattgcccaggattataaagtcagttattcattggccaaatcctgtaaaagtgacttgaagaaataccggtgcaatgtggaaaaccttccgcgatcgcgtgaagccaggctctcctacttgttaatgtgcctggagtcagctgtacacagagggcgacaagtcagcagtgagtgccagggggagatgctggattaccgacgcatgttgatggaagacttttctctgagccctgagatcatcctaagctgtcggggggagattgaacaccattgttccggattacatcgaaaagggcggaccctacactgtctgatgaaagtagttcgaggggagaaggggaaccttggaatgaactgccagcaggcgcttcaaacactgattcaggagactgaccctggtgcagattaccgcattgatcgagctttgaatgaagcttgtgaatctgtaatccagacagcctgcaaacatataagatctggagacccaatgatcttgtcgtgcctgatggaacatttatacacagagaagatggtagaagactgtgaacaccgtctcttagagctgcagtatttcatctcccgggattggaagctggaccctgtcctgtaccgcaagtgccagggagacgcttctcgtctttgccacacccacggttggaatgagaccagtgaatttatgcctcagggagctgtgttctcttgtttatacagacacgcctaccgcactgaggaacagggaaggaggctctcacgggagtgccgagctgaagtccaaaggatcctacaccagcgtgccatggatgtcaagctggatcctgccctccaggataagtgcctgattgatctgggaaaatggtgcagtgagaaaacagagactggacaggagctggagtgccttcaggaccatctggatgacttggtggtggagtgtagagatatagttggcaacctcactgagttagaatcagaggatattcaaatagaagccttgctgatgagagcctgtgagcccataattcagaacttctgccacgatgtggcagataaccagatagactctggggacctgatggagtgtctgatacagaacaaacaccagaaggacatgaacgagaagtgtgccatcggagttacccacttccagctggtgcagatgaaggattttcggttttcttacaagtttaaaatggcctgcaaggaggacgtgttgaagctttgcccaaacataaaaaagaaggtggacgtggtgatctgcctgagcacgaccgtgcgcaatgacactctgcaggaagccaaggagcacagggtgtccctgaagtgccgcaggcagctccgtgtggaggagctggagatgacggaggacatccgcttggagccagatctatacgaagcctgcaagagtgacatcaaaaacttctgttccgctgtgcaatatggcaacgctcagattatcgaatgtctgaaagaaaacaagaagcagctaagcacccgctgccaccaaaaagtatttaagctgcaggagacagagatgatggacccagagctagactacaccctcatgagggtctgcaagcagatgataaagaggttctgtccggaagcagattctaaaaccatgttgcagtgcttgaagcaaaataaaaacagtgaattgatggatcccaaatgcaaacagatgataaccaagcgccagatcacccagaacacagattaccgcttaaaccccatgttaagaaaagcctgtaaagctgacattcctaaattctgtcacggtatcctgactaaggccaaggatgattcagaattagaaggacaagtcatctcttgcctgaagctgagatatgctgaccagcgcctgtcttcagactgtgaagaccagatccgaatcattatccaggagtccgccctggactaccgcctggatcctcagctccagctgcactgctcagacgagatctccagtctatgtgctgaagaagcagcagcccaagagcagacaggtcaggtggaggagtgcctcaaggtcaacctgctcaagatcaaaacagaattgtgtaaaaaggaagtgctaaacatgctgaaggaaagcaaagcagacatctttgttgacccggtacttcatactgcttgtgccctggacattaaacaccactgcgcagccatcacccctggccgcgggcgtcaaatgtcctgtctcatggaagcactggaggataagcgggtgaggttacagcccgagtgcaaaaagcgcctcaatgaccggattgagatgtggagttacgcagcaaaggtggccccagcagatggcttctctgatcttgccatgcaagtaatgacgtctccatctaagaactacattctctctgtgatcagtgggagcatctgtatattgttcctgattggcctgatgtgtggacggatcaccaagcgagtgacacgagagctcaaggacaggctacaatacaggtcagagacaatggcttataaaggtttagtgtggtctcaggatgtgacaggcagtccagcctgacctttctgcacactccagacaaacttcccagacaagctcctttgtgcctctacgtggagagggtgtggaaagttatcacattaaaagatggaggatttgctctgttttttttctttctgtccatttgctgcgtgtacccactctagtaggcattggctaaatgttgtattttggcgattcatcaacctttgcagaatatgggctttatagaagcaatattcttggccatcccgcctcattcctccagtgtggagatgacaagtctgggtgtgagagggaggggtccgggcatcatggttcagcgtggcactcctttggttgagtttggggcatgagatcacagtggctgcacaagagagcagtgtgtacagtaggagagacatttatgtaatatatattttattaacctgttagatgtccacaaagtattataaatcacgtgcctaaaactgtccatgtagaccaaggcctgccctcggcgccccccactcttgcctctgctctgcacagtccacgtgcactgcaggaccggagcgacacatgtcttccctgaagggtgttcagtacaaggcgtgtcagtttgtggatcagttgatccaagttactccttgtctaacctgactgacatatatttgaatactgtggttttctttcttttttttctatttgctgcccttcctggaggcagtgggttccagaagccaactgattgtccccctgccaagtcaccaagggaagctgctaagctgcttagtcccctcggtcctgcttgtagggtcttcctgattgtcaacagctgtctgggatgcttcagtctcctaaaactggaaacgcagggtgcgagcagcacacactgcctcccgccactgccagccggagtgagcggcccgagagtctctgcaggttcccctgggggctgggggccgctgaggcctaatatcaagagccaggaatgtcatgtacatggaggtgcctacggacgtgcctggtgtggtttgcaggtaggatggatgttcactgtttgaccgggtggggtatccttcctctctgcagtctccttcccagtatgcgtaaacacccttatagttctaattgtgttgatatttctgttctttctgaattgagagaaaatcccattcgttgtctgcagatttggaagtttgatgaggaatttggttcttgaaacatctgtctttttttttttttttgagacagagtatctctctgttgcccaggctgcagtgcagtggcgcgatctcagctccctgcaacctccacctcctgggttcaagcaattctctgcctcagcctcctgagtagctgggattccaggcacccgccaccacgcctggcttatttttgtatttttagtagagatggggtttcaccatcttggccaggctggtcttgaactcctgatctcatgatccacccgcctcagcttcccaaagtgctgggattacaggtgtgagccaccctgcctggccaaaacatttgtcatctttataaatggtcagaatagaaaagttagctctgccagtatcttcaattacttattacaagaatgtctttcatcatcttacttggagcattttccaatgactggctcttgagagccccaggcagggccccgagcaagtttttctaagtgccaaggccagcaaagtctgaactggccgcactcattaagtccctcatttggcaaaacaaaacagggcctggggcacccctggttcctggccttataggtcagtcaactggctgagaaatggtcaagaaaagaaacaatgacccttctgtggatgtgagtggatgatggactctggcctgtgtctactctcctgatgtgtagcccaccaacagtaatagaagtagagggtagggggttttgccaaggctaaggcttcaggtacttgctaacagttatagcagctgggtcactgtcatctggacttaccagttcatgccagtgtccctgtgacttatgcatagtgtgcgccacagccctctagaggtacctggagcccggactgccaggctggaggctctggggtactgaaggtgagctgtctgggcaaactattaagaacaagacgaactgttcacaatggagcttctcccacagatggggagctctgtgaggccttcacctgggtgcatgttggacttccattgctgttgctgttgtccctagacaagcccgttagcaagaagcaccggcaggggagccatgcactccataggcttgggatcacccccgggaaagcgatcttccccgggctaccacccccagctgcagttctgtgttagtgcatccttcaaagctaggagaattctagggtgaccagtgagctaatgttgagtgagcaggtattgacttgaacacactgcaggcctttggctgtctcatgctgtccttactcttcttgggaacagtgagtcactcagctggccagggtggggatgcatcctggtgaagagacagctttccctgaagatgctacagaaagttactgtcagatttcatttgtttctgtttcctgagatcaactaacagaagaatctaatggtgagagtgtcttcattcatgttttacgttttatcaaggcacactggaaagggaattatgtggctgacttcccttggccttcccaagagaagattctgttcttatgtcagtgtggcttctggaagtgtctcctatcctcccatcctccaggcctgtggtgtgacttctgccccgaagttcctactatagtgagtcatctggggagaggccactgaaaagaggccttcccttcccatttcctcccctgcctccttagaacacactctaagtcagaacttaatctaagaagaaggaagctggaccaggaaccttggaagtcagccagccctagaacagtcagcctaaattttggccgtaatggcttttttggttttttgttttgtttctgagatggagtctcactccgttgccaggctggagtgctgtggcgctatctcagcttaccgaatcctccgactccctggttcaagcgattgtcctgcctcagcctccggagtagctgggattacaggcatgcaccaccacacccagctaatttttgtatttttagtagagacggggtttcaccgtgttgtccaggatggtctccatctcctgacctcatgatgtgcccacttcggccttccaaagtggccgcaaagtggcccacttcggccaaagtgcacttcggccttccaaagtgcattacaggcgtgagccaccacgcccggcctggccttttttttttttttcttttgagacacagtttcactcgttgcccaggctggagtgcagtggcgcaatctcggctcactgcaacttctgcctcctaggttcaagcagttctcctgcctcagcctcccaagtagttgggattacgggcatgcaccaccatgcctggataattttttcttatttttagtagagacaggatttcatcatgttggccacgctggtttcgaactcctgaccacatgtggtccacccaccttggcctcaattatgtgcattttggtatatttacttgtatttcaacatcttgtgagtttgaaaaacctgaaaggccagaatgcttccttttatttctcaccatttgggcagcacctaagtggttttgtaaaatgcagcatctggtgctgtgggtctctctcaggccttgagggacacttccttcctccccactcgcctcctctccactagactttggttcctagagggcgtggggccgggtctgaggttcttgcctgccttccctcccattggtctttggttgctcatccctctaactgcaccccttcttggtccttcctccacagacttcagataatagataagtcattagcaaaccagaccgaatctttagggtgaagagctccccaaagccatctggtgaggtcattgtggggaccagggactgattatttgtcacctggatcacaaagatgggactgtctgctcaggctggtggtgacaggatcctgacccgtggtcctctcccgctccctctgctccaccaggacacatgtataggacactgtgctgtgtgcagtggagaaatctccctgggccaggggaaagttcagacagtgcctctagattgtgttttgcctcctccaatgtagagttgacatctggaccccagagcccagcagggctttctgtcagacatgctagggtggtagaaatgggccctccaggtccccctgcagtgcactgggcagagacctccggaaagccggcagcgggagcgcttcctgggcagcttcccccagcacagtgttcccaaaccagtccatccggaaaacagtctgtacagcaaatgctgtgtgagatcttaggcttttcactttttttgttttgttttgtttttgaaagaaagaaaaaaatacaattaacaagcctcttttgtaaatgggtttcctttctatgtataaaatcgtggtggtcccttgtttttacatgttcatgctgtgtaattttgagatgttactgagatatgttctgaacataatgtgcatttttttctgtacagatgaaatgggagaatttaataaagagtttgcaggtttttacttgtt

SEQ ID NO: 12656 - DNA, 9327 bp, Homo sapiens
  source 1..9327: mol_type = unassigned DNA
atttaaatacgcggcgccggcgagtgcgtcgagctcgccgcggactcaagatggcggcgtgtggacgtgtacggaggatgttccgcttgtcggcggcgctgcatctgctgctgctattcgcggccggggccgagaaactccccggccagggcgtccacagccagggccagggtcccggggccaactttgtgtccttcgtagggcaggccggaggcggcggcccggcgggtcagcagctgccccagctgcctcagtcatcgcagcttcagcagcaacagcagcagcagcaacagcaacagcagcctcagccgccgcagccgcctttcccggcgggtgggcctccggcccggcggggaggagcgggggctggtgggggctggaagctggcggaggaagagtcctgcagggaggacgtgacccgcgtgtgccctaagcacacctggagcaacaacctggcggtgctcgagtgcctgcaggatgtgagggagcctgaaaatgaaatttcttcagactgcaatcatttgttgtggaattataagctgaacctaactacagatcccaaatttgaatctgtggccagagaggtttgcaaatctactataacagagattaaagaatgtgctgatgaaccggttggaaaaggttacatggtttcctgcttggtggatcaccgaggcaacatcactgagtatcagtgtcaccagtacattaccaagatgacggccatcatttttagtgattaccgtttaatctgtggcttcatggatgactgcaaaaatgacatcaacattctgaaatgtggcagtattcggcttggagaaaaggatgcacattcacaaggtgaggtggtatcatgcttggagaaaggcctggtgaaagaagcagaagaaagagaacccaagattcaagtttctgaactctgcaagaaagccattctccgggtggctgagctgtcatcggatgactttcacttagaccggcatttatattttgcttgccgagatgatcgggagcgtttttgtgaaaatacacaagctggtgagggcagagtgtataagtgcctctttaaccataaatttgaagaatccatgagtgaaaagtgtcgagaagcacttacaacccgccaaaagctgattgcccaggattataaagtcagttattcattggccaaatcctgtaaaagtgacttgaagaaataccggtgcaatgtggaaaaccttccgcgatcgcgtgaagccaggctctcctacttgttaatgtgcctggagtcagctgtacacagagggcgacaagtcagcagtgagtgccagggggagatgctggattaccgacgcatgttgatggaagacttttctctgagccctgagatcatcctaagctgtcggggggagattgaacaccattgttccggattacatcgaaaagggcggaccctacactgtctgatgaaagtagttcgaggggagaaggggaaccttggaatgaactgccagcaggcgcttcaaacactgattcaggagactgaccctggtgcagattaccgcattgatcgagctttgaatgaagcttgtgaatctgtaatccagacagcctgcaaacatataagatctggagacccaatgatcttgtcgtgcctgatggaacatttatacacagagaagatggtagaagactgtgaacaccgtctcttagagctgcagtatttcatctcccgggattggaagctggaccctgtcctgtaccgcaagtgccagggagacgcttctcgtctttgccacacccacggttggaatgagaccagtgaatttatgcctcagggagctgtgttctcttgtttatacagacacgcctaccgcactgaggaacagggaaggaggctctcacgggagtgccgagctgaagtccaaaggatcctacaccagcgtgccatggatgtcaagctggatcctgccctccaggataagtgcctgattgatctgggaaaatggtgcagtgagaaaacagagactggacaggagctggagtgccttcaggaccatctggatgacttggtggtggagtgtagagatatagttggcaacctcactgagttagaatcagaggatattcaaatagaagccttgctgatgagagcctgtgagcccataattcagaacttctgccacgatgtggcagataaccagatagactctggggacctgatggagtgtctgatacagaacaaacaccagaaggacatgaacgagaagtgtgccatcggagttacccacttccagctggtgcagatgaaggattttcggttttcttacaagtttaaaatggcctgcaaggaggacgtgttgaagctttgcccaaacataaaaaagaaggtggacgtggtgatctgcctgagcacgaccgtgcgcaatgacactctgcaggaagccaaggagcacagggtgtccctgaagtgccgcaggcagctccgtgtggaggagctggagatgacggaggacatccgcttggagccagatctatacgaagcctgcaagagtgacatcaaaaacttctgttccgctgtgcaatatggcaacgctcagattatcgaatgtctgaaagaaaacaagaagcagctaagcacccgctgccaccaaaaagtatttaagctgcaggagacagagatgatggacccagagctagactacaccctcatgagggtctgcaagcagatgataaagaggttctgtccggaagcagattctaaaaccatgttgcagtgcttgaagcaaaataaaaacagtgaattgatggatcccaaatgcaaacagatgataaccaagcgccagatcacccagaacacagattaccgcttaaaccccatgttaagaaaagcctgtaaagctgacattcctaaattctgtcacggtatcctgactaaggccaaggatgattcagaattagaaggacaagtcatctcttgcctgaagctgagatatgctgaccagcgcctgtcttcagactgtgaagaccagatccgaatcattatccaggagtccgccctggactaccgcctggatcctcagctccagctgcactgctcagacgagatctccagtctatgtgctgaagaagcagcagcccaagagcagacaggtcaggtggaggagtgcctcaaggtcaacctgctcaagatcaaaacagaattgtgtaaaaaggaagtgctaaacatgctgaaggaaagcaaagcagacatctttgttgacccggtacttcatactgcttgtgccctggacattaaacaccactgcgcagccatcacccctggccgcgggcgtcaaatgtcctgtctcatggaagcactggaggataagcgggtgaggttacagcccgagtgcaaaaagcgcctcaatgaccggattgagatgtggagttacgcagcaaaggtggccccagcagatggcttctctgatcttgccatgcaagtaatgacgtctccatctaagaactacattctctctgtgatcagtgggagcatctgtatattgttcctgattggcctgatgtgtggacggatcaccaagcgagtgacacgagagctcaaggacaggtagagccaccttgaccaccaaaggaactacctatccagtgcccagtttgtacagccctcttgtatagcatccccactcacctcgctcttctcagaagtgacaccaaccccgtgttagagcattagcagatgtccactgcgttgtcccatccagcctccactcgtgtccatggtgtcctcctcctcctcaccgtgcagcagcagcagctggtcgctggggttactgcctttgtttggcaaacttgggtttacctgcctgtagacaagtctctctcataccaacagaacttccggtacttccagaaccaactcacctgacctgcaactcaaaggcttttttaagaaaaccaccaaaaaaaaaaatttttttaaagaaaaaaatgtatatagtaacgcatctcctccaggcttgatttgggcaatggggttatgtctttcatatgactgtgtaaaacaaagacaggacttggaggggaagcacaccacccagtgtgccatgactgaggtgtctcgttcatctctcagaagcaccttggggcctcgccagggccgtggtcttcaccgaggcgtgggtgggcagccgttccccaggctgtgtggggtcctgctttcttctgctgagacagtgacgctttccagtttccaccctaatcagccactgctggtcacagccccacagccatgggtatttctgtggtctcctcgcttcattgaagcaaagcatgagccttcctagacaagggcagctggggaggggaagggaccggaagtttgtgaagttgaacagtccatccatctgcactgagaggctggatcctgagtcccggggcagcaggatcccaggaaccttcctcctccagggcagcacaggactcagccatgtctggaccggccctgctgaggctacagtcactctggaagctctgcgcttcatcaggaggcaggactgtggcgggaggggtccttgaagatgggtgtggggagcagtgggtcaggaagtgggagccagaggtttgactcactttgctttatttttcaggctacaatacaggtcagagacaatggcttataaaggtttagtgtggtctcaggatgtgacaggcagtccagcctgacctttctgcacactccagacaaacttcccagacaagctcctttgtgcctctacgtggagagggtgtggaaagttatcacattaaaagatggaggatttgctctgttttttttctttctgtccatttgctgcgtgtacccactctagtaggcattggctaaatgttgtattttggcgattcatcaacctttgcagaatatgggctttatagaagcaatattcttggccatcccgcctcattcctccagtgtggagatgacaagtctgggtgtgagagggaggggtccgggcatcatggttcagcgtggcactcctttggttgagtttggggcatgagatcacagtggctgcacaagagagcagtgtgtacagtaggagagacatttatgtaatatatattttattaacctgttagatgtccacaaagtattataaatcacgtgcctaaaactgtccatgtagaccaaggcctgccctcggcgccccccactcttgcctctgctctgcacagtccacgtgcactgcaggaccggagcgacacatgtcttccctgaagggtgttcagtacaaggcgtgtcagtttgtggatcagttgatccaagttactccttgtctaacctgactgacatatatttgaatactgtggttttctttcttttttttctatttgctgcccttcctggaggcagtgggttccagaagccaactgattgtccccctgccaagtcaccaagggaagctgctaagctgcttagtcccctcggtcctgcttgtagggtcttcctgattgtcaacagctgtctgggatgcttcagtctcctaaaactggaaacgcagggtgcgagcagcacacactgcctcccgccactgccagccggagtgagcggcccgagagtctctgcaggttcccctgggggctgggggccgctgaggcctaatatcaagagccaggaatgtcatgtacatggaggtgcctacggacgtgcctggtgtggtttgcaggtaggatggatgttcactgtttgaccgggtggggtatccttcctctctgcagtctccttcccagtatgcgtaaacacccttatagttctaattgtgttgatatttctgttctttctgaattgagagaaaatcccattcgttgtctgcagatttggaagtttgatgaggaatttggttcttgaaacatctgtctttttttttttttttgagacagagtatctctctgttgcccaggctgcagtgcagtggcgcgatctcagctccctgcaacctccacctcctgggttcaagcaattctctgcctcagcctcctgagtagctgggattccaggcacccgccaccacgcctggcttatttttgtatttttagtagagatggggtttcaccatcttggccaggctggtcttgaactcctgatctcatgatccacccgcctcagcttcccaaagtgctgggattacaggtgtgagccaccctgcctggccaaaacatttgtcatctttataaatggtcagaatagaaaagttagctctgccagtatcttcaattacttattacaagaatgtctttcatcatcttacttggagcattttccaatgactggctcttgagagccccaggcagggccccgagcaagtttttctaagtgccaaggccagcaaagtctgaactggccgcactcattaagtccctcatttggcaaaacaaaacagggcctggggcacccctggttcctggccttataggtcagtcaactggctgagaaatggtcaagaaaagaaacaatgacccttctgtggatgtgagtggatgatggactctggcctgtgtctactctcctgatgtgtagcccaccaacagtaatagaagtagagggtagggggttttgccaaggctaaggcttcaggtacttgctaacagttatagcagctgggtcactgtcatctggacttaccagttcatgccagtgtccctgtgacttatgcatagtgtgcgccacagccctctagaggtacctggagcccggactgccaggctggaggctctggggtactgaaggtgagctgtctgggcaaactattaagaacaagacgaactgttcacaatggagcttctcccacagatggggagctctgtgaggccttcacctgggtgcatgttggacttccattgctgttgctgttgtccctagacaagcccgttagcaagaagcaccggcaggggagccatgcactccataggcttgggatcacccccgggaaagcgatcttccccgggctaccacccccagctgcagttctgtgttagtgcatccttcaaagctaggagaattctagggtgaccagtgagctaatgttgagtgagcaggtattgacttgaacacactgcaggcctttggctgtctcatgctgtccttactcttcttgggaacagtgagtcactcagctggccagggtggggatgcatcctggtgaagagacagctttccctgaagatgctacagaaagttactgtcagatttcatttgtttctgtttcctgagatcaactaacagaagaatctaatggtgagagtgtcttcattcatgttttacgttttatcaaggcacactggaaagggaattatgtggctgacttcccttggccttcccaagagaagattctgttcttatgtcagtgtggcttctggaagtgtctcctatcctcccatcctccaggcctgtggtgtgacttctgccccgaagttcctactatagtgagtcatctggggagaggccactgaaaagaggccttcccttcccatttcctcccctgcctccttagaacacactctaagtcagaacttaatctaagaagaaggaagctggaccaggaaccttggaagtcagccagccctagaacagtcagcctaaattttggccgtaatggcttttttggttttttgttttgtttctgagatggagtctcactccgttgccaggctggagtgctgtggcgctatctcagcttaccgaatcctccgactccctggttcaagcgattgtcctgcctcagcctccggagtagctgggattacaggcatgcaccaccacacccagctaatttttgtatttttagtagagacggggtttcaccgtgttgtccaggatggtctccatctcctgacctcatgatgtgcccacttcggccttccaaagtggccgcaaagtggcccacttcggccaaagtgcacttcggccttccaaagtgcattacaggcgtgagccaccacgcccggcctggccttttttttttttttcttttgagacacagtttcactcgttgcccaggctggagtgcagtggcgcaatctcggctcactgcaacttctgcctcctaggttcaagcagttctcctgcctcagcctcccaagtagttgggattacgggcatgcaccaccatgcctggataattttttcttatttttagtagagacaggatttcatcatgttggccacgctggtttcgaactcctgaccacatgtggtccacccaccttggcctcaattatgtgcattttggtatatttacttgtatttcaacatcttgtgagtttgaaaaacctgaaaggccagaatgcttccttttatttctcaccatttgggcagcacctaagtggttttgtaaaatgcagcatctggtgctgtgggtctctctcaggccttgagggacacttccttcctccccactcgcctcctctccactagactttggttcctagagggcgtggggccgggtctgaggttcttgcctgccttccctcccattggtctttggttgctcatccctctaactgcaccccttcttggtccttcctccacagacttcagataatagataagtcattagcaaaccagaccgaatctttagggtgaagagctccccaaagccatctggtgaggtcattgtggggaccagggactgattatttgtcacctggatcacaaagatgggactgtctgctcaggctggtggtgacaggatcctgacccgtggtcctctcccgctccctctgctccaccaggacacatgtataggacactgtgctgtgtgcagtggagaaatctccctgggccaggggaaagttcagacagtgcctctagattgtgttttgcctcctccaatgtagagttgacatctggaccccagagcccagcagggctttctgtcagacatgctagggtggtagaaatgggccctccaggtccccctgcagtgcactgggcagagacctccggaaagccggcagcgggagcgcttcctgggcagcttcccccagcacagtgttcccaaaccagtccatccggaaaacagtctgtacagcaaatgctgtgtgagatcttaggcttttcactttttttgttttgttttgtttttgaaagaaagaaaaaaatacaattaacaagcctcttttgtaaatgggtttcctttctatgtataaaatcgtggtggtcccttgtttttacatgttcatgctgtgtaattttgagatgttactgagatatgttctgaacataatgtgcatttttttctgtacagatgaaatgggagaatttaataaagagtttgcaggtttttacttgtt

SEQ ID NO: 12657 - DNA, 8255 bp, Homo sapiens
  source 1..8255: mol_type = unassigned DNA
atttaaatacgcggcgccggcgagtgcgtcgagctcgccgcggactcaagatggcggcgtgtggacgtgtacggaggatgttccgcttgtcggcggcgctgcatctgctgctgctattcgcggccggggccgagaaactccccggccagggcgtccacagccagggccagggtcccggggccaactttgtgtccttcgtagggcaggccggaggcggcggcccggcgggtcagcagctgccccagctgcctcagtcatcgcagcttcagcagcaacagcagcagcagcaacagcaacagcagcctcagccgccgcagccgcctttcccggcgggtgggcctccggcccggcggggaggagcgggggctggtgggggctggaagctggcggaggaagagtcctgcagggaggacgtgacccgcgtgtgccctaagcacacctggagcaacaacctggcggtgctcgagtgcctgcaggatgtgagggagttgttgtggaattataagctgaacctaactacagatcccaaatttgaatctgtggccagagaggtttgcaaatctactataacagagattaaagaatgtgctgatgaaccggttggaaaaggttacatggtttcctgcttggtggatcaccgaggcaacatcactgagtatcagtgtcaccagtacattaccaagatgacggccatcatttttagtgattaccgtttaatctgtggcttcatggatgactgcaaaaatgacatcaacattctgaaatgtggcagtattcggcttggagaaaaggatgcacattcacaaggtgaggtggtatcatgcttggagaaaggcctggtgaaagaagcagaagaaagagaacccaagattcaagtttctgaactctgcaagaaagccattctccgggtggctgagctgtcatcggatgactttcacttagaccggcatttatattttgcttgccgagatgatcgggagcgtttttgtgaaaatacacaagctggtgagggcagagtgtataagtgcctctttaaccataaatttgaagaatccatgagtgaaaagtgtcgagaagcacttacaacccgccaaaagctgattgcccaggattataaagtcagttattcattggccaaatcctgtaaaagtgacttgaagaaataccggtgcaatgtggaaaaccttccgcgatcgcgtgaagccaggctctcctacttgttaatgtgcctggagtcagctgtacacagagggcgacaagtcagcagtgagtgccagggggagatgctggattaccgacgcatgttgatggaagacttttctctgagccctgagatcatcctaagctgtcggggggagattgaacaccattgttccggattacatcgaaaagggcggaccctacactgtctgatgaaagtagttcgaggggagaaggggaaccttggaatgaactgccagcaggcgcttcaaacactgattcaggagactgaccctggtgcagattaccgcattgatcgagctttgaatgaagcttgtgaatctgtaatccagacagcctgcaaacatataagatctggagacccaatgatcttgtcgtgcctgatggaacatttatacacagagaagatggtagaagactgtgaacaccgtctcttagagctgcagtatttcatctcccgggattggaagctggaccctgtcctgtaccgcaagtgccagggagacgcttctcgtctttgccacacccacggttggaatgagaccagtgaatttatgcctcagggagctgtgttctcttgtttatacagacacgcctaccgcactgaggaacagggaaggaggctctcacgggagtgccgagctgaagtccaaaggatcctacaccagcgtgccatggatgtcaagctggatcctgccctccaggataagtgcctgattgatctgggaaaatggtgcagtgagaaaacagagactggacaggagctggagtgccttcaggaccatctggatgacttggtggtggagtgtagagatatagttggcaacctcactgagttagaatcagaggatattcaaatagaagccttgctgatgagagcctgtgagcccataattcagaacttctgccacgatgtggcagataaccagatagactctggggacctgatggagtgtctgatacagaacaaacaccagaaggacatgaacgagaagtgtgccatcggagttacccacttccagctggtgcagatgaaggattttcggttttcttacaagtttaaaatggcctgcaaggaggacgtgttgaagctttgcccaaacataaaaaagaaggtggacgtggtgatctgcctgagcacgaccgtgcgcaatgacactctgcaggaagccaaggagcacagggtgtccctgaagtgccgcaggcagctccgtgtggaggagctggagatgacggaggacatccgcttggagccagatctatacgaagcctgcaagagtgacatcaaaaacttctgttccgctgtgcaatatggcaacgctcagattatcgaatgtctgaaagaaaacaagaagcagctaagcacccgctgccaccaaaaagtatttaagctgcaggagacagagatgatggacccagagctagactacaccctcatgagggtctgcaagcagatgataaagaggttctgtccggaagcagattctaaaaccatgttgcagtgcttgaagcaaaataaaaacagtgaattgatggatcccaaatgcaaacagatgataaccaagcgccagatcacccagaacacagattaccgcttaaaccccatgttaagaaaagcctgtaaagctgacattcctaaattctgtcacggtatcctgactaaggccaaggatgattcagaattagaaggacaagtcatctcttgcctgaagctgagatatgctgaccagcgcctgtcttcagactgtgaagaccagatccgaatcattatccaggagtccgccctggactaccgcctggatcctcagctccagctgcactgctcagacgagatctccagtctatgtgctgaagaagcagcagcccaagagcagacaggtcaggtggaggagtgcctcaaggtcaacctgctcaagatcaaaacagaattgtgtaaaaaggaagtgctaaacatgctgaaggaaagcaaagcagacatctttgttgacccggtacttcatactgcttgtgccctggacattaaacaccactgcgcagccatcacccctggccgcgggcgtcaaatgtcctgtctcatggaagcactggaggataagcgggtgaggttacagcccgagtgcaaaaagcgcctcaatgaccggattgagatgtggagttacgcagcaaaggtggccccagcagatggcttctctgatcttgccatgcaagtaatgacgtctccatctaagaactacattctctctgtgatcagtgggagcatctgtatattgttcctgattggcctgatgtgtggacggatcaccaagcgagtgacacgagagctcaaggacaggctacaatacaggtcagagacaatggcttataaaggtttagtgtggtctcaggatgtgacaggcagtccagcctgacctttctgcacactccagacaaacttcccagacaagctcctttgtgcctctacgtggagagggtgtggaaagttatcacattaaaagatggaggatttgctctgttttttttctttctgtccatttgctgcgtgtacccactctagtaggcattggctaaatgttgtattttggcgattcatcaacctttgcagaatatgggctttatagaagcaatattcttggccatcccgcctcattcctccagtgtggagatgacaagtctgggtgtgagagggaggggtccgggcatcatggttcagcgtggcactcctttggttgagtttggggcatgagatcacagtggctgcacaagagagcagtgtgtacagtaggagagacatttatgtaatatatattttattaacctgttagatgtccacaaagtattataaatcacgtgcctaaaactgtccatgtagaccaaggcctgccctcggcgccccccactcttgcctctgctctgcacagtccacgtgcactgcaggaccggagcgacacatgtcttccctgaagggtgttcagtacaaggcgtgtcagtttgtggatcagttgatccaagttactccttgtctaacctgactgacatatatttgaatactgtggttttctttcttttttttctatttgctgcccttcctggaggcagtgggttccagaagccaactgattgtccccctgccaagtcaccaagggaagctgctaagctgcttagtcccctcggtcctgcttgtagggtcttcctgattgtcaacagctgtctgggatgcttcagtctcctaaaactggaaacgcagggtgcgagcagcacacactgcctcccgccactgccagccggagtgagcggcccgagagtctctgcaggttcccctgggggctgggggccgctgaggcctaatatcaagagccaggaatgtcatgtacatggaggtgcctacggacgtgcctggtgtggtttgcaggtaggatggatgttcactgtttgaccgggtggggtatccttcctctctgcagtctccttcccagtatgcgtaaacacccttatagttctaattgtgttgatatttctgttctttctgaattgagagaaaatcccattcgttgtctgcagatttggaagtttgatgaggaatttggttcttgaaacatctgtctttttttttttttttgagacagagtatctctctgttgcccaggctgcagtgcagtggcgcgatctcagctccctgcaacctccacctcctgggttcaagcaattctctgcctcagcctcctgagtagctgggattccaggcacccgccaccacgcctggcttatttttgtatttttagtagagatggggtttcaccatcttggccaggctggtcttgaactcctgatctcatgatccacccgcctcagcttcccaaagtgctgggattacaggtgtgagccaccctgcctggccaaaacatttgtcatctttataaatggtcagaatagaaaagttagctctgccagtatcttcaattacttattacaagaatgtctttcatcatcttacttggagcattttccaatgactggctcttgagagccccaggcagggccccgagcaagtttttctaagtgccaaggccagcaaagtctgaactggccgcactcattaagtccctcatttggcaaaacaaaacagggcctggggcacccctggttcctggccttataggtcagtcaactggctgagaaatggtcaagaaaagaaacaatgacccttctgtggatgtgagtggatgatggactctggcctgtgtctactctcctgatgtgtagcccaccaacagtaatagaagtagagggtagggggttttgccaaggctaaggcttcaggtacttgctaacagttatagcagctgggtcactgtcatctggacttaccagttcatgccagtgtccctgtgacttatgcatagtgtgcgccacagccctctagaggtacctggagcccggactgccaggctggaggctctggggtactgaaggtgagctgtctgggcaaactattaagaacaagacgaactgttcacaatggagcttctcccacagatggggagctctgtgaggccttcacctgggtgcatgttggacttccattgctgttgctgttgtccctagacaagcccgttagcaagaagcaccggcaggggagccatgcactccataggcttgggatcacccccgggaaagcgatcttccccgggctaccacccccagctgcagttctgtgttagtgcatccttcaaagctaggagaattctagggtgaccagtgagctaatgttgagtgagcaggtattgacttgaacacactgcaggcctttggctgtctcatgctgtccttactcttcttgggaacagtgagtcactcagctggccagggtggggatgcatcctggtgaagagacagctttccctgaagatgctacagaaagttactgtcagatttcatttgtttctgtttcctgagatcaactaacagaagaatctaatggtgagagtgtcttcattcatgttttacgttttatcaaggcacactggaaagggaattatgtggctgacttcccttggccttcccaagagaagattctgttcttatgtcagtgtggcttctggaagtgtctcctatcctcccatcctccaggcctgtggtgtgacttctgccccgaagttcctactatagtgagtcatctggggagaggccactgaaaagaggccttcccttcccatttcctcccctgcctccttagaacacactctaagtcagaacttaatctaagaagaaggaagctggaccaggaaccttggaagtcagccagccctagaacagtcagcctaaattttggccgtaatggcttttttggttttttgttttgtttctgagatggagtctcactccgttgccaggctggagtgctgtggcgctatctcagcttaccgaatcctccgactccctggttcaagcgattgtcctgcctcagcctccggagtagctgggattacaggcatgcaccaccacacccagctaatttttgtatttttagtagagacggggtttcaccgtgttgtccaggatggtctccatctcctgacctcatgatgtgcccacttcggccttccaaagtggccgcaaagtggcccacttcggccaaagtgcacttcggccttccaaagtgcattacaggcgtgagccaccacgcccggcctggccttttttttttttttcttttgagacacagtttcactcgttgcccaggctggagtgcagtggcgcaatctcggctcactgcaacttctgcctcctaggttcaagcagttctcctgcctcagcctcccaagtagttgggattacgggcatgcaccaccatgcctggataattttttcttatttttagtagagacaggatttcatcatgttggccacgctggtttcgaactcctgaccacatgtggtccacccaccttggcctcaattatgtgcattttggtatatttacttgtatttcaacatcttgtgagtttgaaaaacctgaaaggccagaatgcttccttttatttctcaccatttgggcagcacctaagtggttttgtaaaatgcagcatctggtgctgtgggtctctctcaggccttgagggacacttccttcctccccactcgcctcctctccactagactttggttcctagagggcgtggggccgggtctgaggttcttgcctgccttccctcccattggtctttggttgctcatccctctaactgcaccccttcttggtccttcctccacagacttcagataatagataagtcattagcaaaccagaccgaatctttagggtgaagagctccccaaagccatctggtgaggtcattgtggggaccagggactgattatttgtcacctggatcacaaagatgggactgtctgctcaggctggtggtgacaggatcctgacccgtggtcctctcccgctccctctgctccaccaggacacatgtataggacactgtgctgtgtgcagtggagaaatctccctgggccaggggaaagttcagacagtgcctctagattgtgttttgcctcctccaatgtagagttgacatctggaccccagagcccagcagggctttctgtcagacatgctagggtggtagaaatgggccctccaggtccccctgcagtgcactgggcagagacctccggaaagccggcagcgggagcgcttcctgggcagcttcccccagcacagtgttcccaaaccagtccatccggaaaacagtctgtacagcaaatgctgtgtgagatcttaggcttttcactttttttgttttgttttgtttttgaaagaaagaaaaaaatacaattaacaagcctcttttgtaaatgggtttcctttctatgtataaaatcgtggtggtcccttgtttttacatgttcatgctgtgtaattttgagatgttactgagatatgttctgaacataatgtgcatttttttctgtacagatgaaatgggagaatttaataaagagtttgcaggtttttacttgtt

SEQ ID NO: 12658 - DNA, 4373 bp, Homo sapiens
  source 1..4373: mol_type = unassigned DNA
aatgagcaaggaggccgagtgggacttcctcccggaatcccgttggccagaatagccgggccgtgggtgacacgtaagttgggcaggaggtggcggggcggcagaggcaccagccgacccgtcagtgacaccgctgtgccgtccccaaaaccagccgagacagctggcccccacccttccacccattgggcaggccgcacgggggcgcggcccggagtcctggtccctttgttgggcgcgcaccccctcccttaggtggcaacaaagtcgtgcagtgggagccgccgcgatagggcggggagtggccagggcgggactccaagaactgcccgggggcagcggggccaaaaagtgggaagaaggaaaaaaggcaggaggcatctggggacaggcgcgagggcagccggctctgaagtatgcggagggcctcctcccggccccgggcattcgcggagaacgagcctcgcagaagtttggctgcagctgcccgggcggcgtcgatggctgcgcgccccgcgccgcgcgggggctgagcgggcgccacttcccctccgggccggcttttgtgtctggcatctcctcctcatgctgcgtctggccacctactgcggcggccgctgctgagacgctcgctcggaccaaggggaggagacggcgggggcggccgcggctttgggtccaggcgggactatgggaaacgggatgtgctcccgaaagcagaagcggattttccagacgctgctgctgctgaccgtcgtgttcggctttctctacggcgcgatgctctactacgagctgcagacgcagctgcggaaagccgaggcggtggcgctcaagtaccagcagcaccaggagtccctctccgcccagttacaagttgtatatgaacacagatcaagattagagaaatccttgcaaaaagaaagacttgaacataaaaaagcaaaggaagattttcttgtttataagttagaagcacaagaaacattaaataaaggaaggcaagattccaatagcagatacagtgcactgaatgtccaacatcagatgttgaaaagccaacacgaggagctaaagaaacagcacagtgacttggaagaggaacatcgcaaacaaggggaagacttcagtagaacatttaatgaccataagcaaaaatacttgcagctccagcaagaaaaagaacaagaactttctaagctaaaagagactgtatacaatttgagagaagagaatagacaactaaggaaagcacaccaagacatacatacacagcttcaagatgtcaagcaacagcataagaatttactctccgagcatgaacaacttgtagtgactttggaagaccacaagagtgcactagctgctgcacagactcaagttgcagaatataaacaactgaaagatactctgaataggattccaagccttcgaaaacctgatccagcagaacagcaaaatgtgacccaggtggcacattctccacaaggttacaacacagcaagggagaagccaacccgagaggtgcaggaggtgtctcgaaataatgatgtgtggcagaaccatgaagcagttcctggaagagcagaagacacaaaactctatgctcccacccataaggaggcagaatttcaggctcccccagagccaatccaacaagaagtggaacgcagagaacctgaggagcatcaggtggaagaggagcacagaaaggccctggaggaggaagaaatggagcaggtcgggcaagcagaacatcttgaggaggaacacgatccatcaccagaggagcaggatcgggagtggaaagagcagcatgagcaacgagaagcagccaacctcctggaagggcacgcgcgtgctgaggtgtacccttcagccaagccaatgatcaaattccaatcaccctatgaggaacagttggaacagcagagactggcagtgcagcaggtggaggaggcccagcagctgcgggaacaccaggaagctttgcaccagcagaggctgcaggggcacttactacggcagcaggaacagcagcagcagcaggtggcaagagagatggccctgcagaggcaggctgagcttgaggagggccggccgcagcaccaggagcagctccggcagcaagctcattatgatgctatggataatgatatcgttcagggagcagaggaccagggaatccaaggagaggaaggagcctatgaaagagacaaccagcaccaagatgaagcagaaggagatccaggtaatagacatgagcctcgtgaacaaggaccccgagaagccgacccagaatctgaggcagatagggcagctgtagaagatataaacccagcagatgaccctaataatcaaggtgaggatgaatttgaagaagccgagcaagtgagagaagaaaatttgccagatgaaaatgaagagcaaaaacaaagtaatcaaaagcaagagaatacagaagtggaggaacatttggtgatggcaggaaatccagaccagcaggaggacaatgttgatgaacagtaccaggaagaggcagaagaggaggttcaggaagatttgactgaagagaaaaaaagggaactggagcataatgctgaagagacctatggtgaaaatgatgaaaatactgatgataaaaataatgatggagaagagcaagaagttcgagatgacaaccgccccaaaggccgagaggaacactacgaggaggaagaagaggaggaagaagacggggctgcagttgctgagaaatcacatcgaagagctgaaatgtagcggcacccaatttctagacaacgctcagccaacggattcttttcaagctgctcaaacataaatctgcctactgaactctaggatatttaattacaaaaattaagaacttagacttttttaaaacttttgtattagaaatgcgcatacatttatatgaatatattttgataacgtaggtctagagcttcttttatattcaagctaaacatgaaaaagaagaaaaacaataaagtaaacctgagcccccacgtcccaatttttttaatagattatgtgatgttggaaagctcattgattttgtatatgtttcagcgtgttacctttctggcttccagttcccaggtgttctttgtttgcctttgataaaatacaggatttaagaacagagagtactgcaaaatgccatgcagactttaaagagaatggcctgtttactaattgctgcccttctgatgtctttatgtatagctctgatagaattttcaccagtctatgtatctctggagtgagatctatgtacaaagtgacatacaattggaaatccatttttgttgtaaagacattgtttttcagacttttcagatcaattagaaaaatgtcattgctttaaaatcatagctgttctgtttaagaggaattgaatttaaaaatgagagagtattaaaactcatgtggcagtatcctggtcttaatcaggtattgcagtgttcaaacaaggtatggacacatcaacatattcaccttttggaaggactagtgacttggttaaaaactaatgagtgtttgcgtgtggtgtttctatgcgagcacccattctcaattttttttttttttttttgtttgaagccattgattgatattcttgtttcagtgtctggttccctataagtaatatatatttcctctttaagctctgtgcctcaatatgcaatcactttgataataagtataaatatgaagacataccaaactgcaaataggattatttttcaaaactatatggtgaaacatatggtgatatgatagacttatggtttttctgtttgctgggattgggtctgctttttgcctatgtgtaaggcattttaatcattgtgaatataatagattccttaaaataagaaaattaaaaatcagaaacttcccttggagtagagacatttcagttgcaagcataaagatttttaaatatataacactaggttatataattcatatatgtgtggttttgtattaataatcaaattaataaaaacatttcattttctaccattgtatgaacgtaattttattttttaataaccacactcatagatggttttgattgttccagttgagtgattgtgtatgtacgcataggaatgttttgttcagttgtactttgtatttccaataatcagaaatcttacctttatgtataaaaacccattatgtaatgtaaaatgtataatattgtacataatattcagaatacaattattttggtaaattagcttgtatttttaatgtcccagttgcagtatttaattatttgaaccatactgaaagttggtaatagtcaataaagctaaaaaaaaaaagtggcaaatctt

SEQ ID NO: 12659 - DNA, 2721 bp, Homo sapiens
  source 1..2721: mol_type = unassigned DNA
acatcctccggtgacgtcagccggggccgccatattggaaaggcgccgccgccgcctccgccttggagctcggggtgtttcggggactgcggccacaggcaggaaggcgctcctctcctgccccgccgacgcccggccagcccgcttcgccctgacctgtttcctcatgactgcccccggccctgctgccgacggacgtcgccccggcgtccggatttaacacggaaacccggatcggaggccgcgcggggaggaggagggcgacccggtcggtcctgcgaccctctcggcccggctcggcgcctcggcgggagccatgacctcgctgacccagcgcagctccggcctggtgcagcggcgcaccgaggcctcccgcaacgccgccgacaaggagcgggcggcgggcggcggcgccggcagcagcgaggacgacgcgcagagccgccgcgacgagcaggacgacgacgacaagggcgactccaaggaaacgcggctgaccctgatggaggaagtgctcctgctgggcctcaaggaccgcgagggttacacatcattttggaatgactgtatatcatctggattacgtggctgtatgttaattgaattagcattgagaggaaggttacaactagaggcttgtggaatgagacgtaaaagtctattaacaagaaaggtaatctgtaagtcagatgctccaacaggggatgttcttcttgatgaagctctgaagcatgttaaggaaactcagcctccagaaacggtccagaactggattgaattacttagtggtgagacatggaatccattaaaattgcattatcagttaagaaatgtacgggaacgattagctaaaaacctggtggaaaagggtgtattgacaacagagaaacagaacttcctactttttgacatgacaacacatcccctcaccaataacaacattaagcagcgcctcatcaagaaagtacaggaagccgttcttgacaaatgggtgaatgaccctcaccgcatggacaggcgcttgctggccctcatttacctggctcatgcctcggacgtcctggagaatgcttttgctcctcttctggacgagcagtatgatttggctaccaagagagtgcggcagcttctcgacttagaccctgaagtggaatgtctgaaggccaacaccaatgaggttctgtgggcggtggtggcggcgttcaccaagtaactctgctcggggtgaaccattctcctttctctcaagtaaaccagtagtttttcttctgttgacttctggttttctgtaatttgtactttcccacactataattggcttctgttttacaaaatggtgggtggctttttcttttttgtacgtgtacaggattctgctggtacgagaggccttcctctttctgtttttaaaaaaagttttactgccatattggcattccattccctgttgccatcctcactgttacctgttttgggtttctggtctactttgactttcaaagtacctccagcctcctcatacgcacagcttttggatgacctcagcttgagtttctccatatgtgcatgtacatctagcattctgcctacagttcagacagaagtcacaaaaaggccttcaactcaccaaaggtaaatatctgtatctattaggacattttttacatagacttcagttgagatgtatacttagcaaaattatttttaaattgaaacagcacagtaaatacttaatataaaatgtcccttggattttgcttcccatgtaaatctattgtattattacacttgttataattttaactataaaggtccaattgtttcacagagccagtttgggatgggctgcattccatttatgctgtatatagtttgaattatatataaattaccccttcttctggccacccctgctcccatcttagtattttgcaagatctaatcagttgtacacctggtgcccctcgcttgcttcaatcatggttatttgatggcaaaatcgacctcttgtcgctgaaggagagagaaaagatgtgtgtctgattggtcctgggattttttgagctgtgccatttatggtactctttgcctatgcatccccttgttagattttttttaaattttatcttactgtttttataatttctattgggaagaggcttgtgaccagtaccaatcttgagtttctttttctgtccacaagtaaattaatatctgctctgaaatgtcatttatctactcacacattcttggggaaaaaaatcaaatgtcagtcctagcagatgttgcatgtaaattggtagcaagtaatgattacaacccagaggattaagaattttgtaacagaaagctctatgttttaattttttatatacaattaggataattagcattgtcagactataaacctttgctttttaaagtttatttttactatttctttatcactttattgtatcatcaccattggtttcataatgtaaatactatatgttgaacaaattaaatgtcaaaattttttattaccatagtccatgttaatagtggggctttcaggtgtttagagattttttttgttgttgttaacattcattgcaaaagtactagatggtgtataactctagagttgaattttaagggattccctaatatgtatactatctttttatctgaagtaataaataaacaatgatcttgaaagtgcctgaatcagagcaagca

SEQ ID NO: 12660 - DNA, 2631 bp, Homo sapiens
  source 1..2631: mol_type = unassigned DNA
atattggaaaggcgccgccgccgcctccgccttggagctcggggtgtttcggggactgcggccacaggcaggaaggcgctcctctcctgccccgccgacgcccggccagcccgcttcgccctgacctgtttcctcatgactgcccccggccctgctgccgacggacgtcgccccggcgtccggatttaacacggaaacccggatcggaggccgcgcggggaggaggagggcgacccggtcggtcctgcgaccctctcggcccggctcggcgcctcggcgggagccatgacctcgctgacccagcgcagctccggcctggtgcagcggcgcaccgaggcctcccgcaacgccgccgacagccgccgcgacgagcaggacgacgacgacaagggcgactccaaggaaacgcggctgaccctgatggaggaagtgctcctgctgggcctcaaggaccgcgagggttacacatcattttggaatgactgtatatcatctggattacgtggctgtatgttaattgaattagcattgagaggaaggttacaactagaggcttgtggaatgagacgtaaaagtctattaacaagaaaggtaatctgtaagtcagatgctccaacaggggatgttcttcttgatgaagctctgaagcatgttaaggaaactcagcctccagaaacggtccagaactggattgaattacttagtggtgagacatggaatccattaaaattgcattatcagttaagaaatgtacgggaacgattagctaaaaacctggtggaaaagggtgtattgacaacagagaaacagaacttcctactttttgacatgacaacacatcccctcaccaataacaacattaagcagcgcctcatcaagaaagtacaggaagccgttcttgacaaatgggtgaatgaccctcaccgcatggacaggcgcttgctggccctcatttacctggctcatgcctcggacgtcctggagaatgcttttgctcctcttctggacgagcagtatgatttggctaccaagagagtgcggcagcttctcgacttagaccctgaagtggaatgtctgaaggccaacaccaatgaggttctgtgggcggtggtggcggcgttcaccaagtaactctgctcggggtgaaccattctcctttctctcaagtaaaccagtagtttttcttctgttgacttctggttttctgtaatttgtactttcccacactataattggcttctgttttacaaaatggtgggtggctttttcttttttgtacgtgtacaggattctgctggtacgagaggccttcctctttctgtttttaaaaaaagttttactgccatattggcattccattccctgttgccatcctcactgttacctgttttgggtttctggtctactttgactttcaaagtacctccagcctcctcatacgcacagcttttggatgacctcagcttgagtttctccatatgtgcatgtacatctagcattctgcctacagttcagacagaagtcacaaaaaggccttcaactcaccaaaggtaaatatctgtatctattaggacattttttacatagacttcagttgagatgtatacttagcaaaattatttttaaattgaaacagcacagtaaatacttaatataaaatgtcccttggattttgcttcccatgtaaatctattgtattattacacttgttataattttaactataaaggtccaattgtttcacagagccagtttgggatgggctgcattccatttatgctgtatatagtttgaattatatataaattaccccttcttctggccacccctgctcccatcttagtattttgcaagatctaatcagttgtacacctggtgcccctcgcttgcttcaatcatggttatttgatggcaaaatcgacctcttgtcgctgaaggagagagaaaagatgtgtgtctgattggtcctgggattttttgagctgtgccatttatggtactctttgcctatgcatccccttgttagattttttttaaattttatcttactgtttttataatttctattgggaagaggcttgtgaccagtaccaatcttgagtttctttttctgtccacaagtaaattaatatctgctctgaaatgtcatttatctactcacacattcttggggaaaaaaatcaaatgtcagtcctagcagatgttgcatgtaaattggtagcaagtaatgattacaacccagaggattaagaattttgtaacagaaagctctatgttttaattttttatatacaattaggataattagcattgtcagactataaacctttgctttttaaagtttatttttactatttctttatcactttattgtatcatcaccattggtttcataatgtaaatactatatgttgaacaaattaaatgtcaaaattttttattaccatagtccatgttaatagtggggctttcaggtgtttagagattttttttgttgttgttaacattcattgcaaaagtactagatggtgtataactctagagttgaattttaagggattccctaatatgtatactatctttttatctgaagtaataaataaacaatgatcttgaaagtgcctgaatcag

SEQ ID NO: 12661 - DNA, 2999 bp, Homo sapiens
  source 1..2999: mol_type = unassigned DNA
ctgcgtccagccataacccaggagtaacatcagaaacaggtgagaatgaccactttaactcaccgggcccgtcgcactgaaataagcaagaactctgaaaagaagatggaaagtgaggaagacagtaattgggagaaaagtccagacaatgaagattctggagactctaaggatatccgccttactcttatggaagaagtattgcttctgggactaaaagataaagaggggtacacatctttctggaatgactgcatatcatcaggcctgcgagggggcatcctgatagagctggccatgcggggtcgaatctatctggaacccccgaccatgcgtaagaagcgactactagacagaaaggtactgctaaagtcagacagcccaacaggtgatgttttactggatgaaactctgaaacacatcaaagcaactgaacccacagaaactgtccaaacatggatagagctactcactggtgagacctggaaccccttcaaattacagtaccagctgagaaatgtacgagagcgcatcgcaaagaacctagtagagaaaggtattctaaccactgagaagcagaatttcctgctatttgacatgactactcatccagtgaccaatacaacagagaaacagcgactagtgaaaaaacttcaagatagtgtactagagcggtgggtaaatgaccctcagcgtatggacaagcgaacactagcactcctggtgctagcccactcctctgatgtgctagagaatgtcttctcctctctgacagatgacaagtatgatgtggcaatgaatcgagccaaggacttagtagaactggaccctgaagtggaagggacaaagcctagtgccacagaaatgatctgggctgtgctggcagccttcaataaatcttaaagccggcaggtggatttctccttttcccctgctggctggtgactgtcagagaccccatcactgagttttgtgtgatgagatgttttcatcatttttgtttccttttcttgaatcagacttgtgatttggggagagcaacttcagggcttctccatagaccttgaccattataagcagaccttatttctccctacacttccactccataggtaaataaactgggtgaagccacacacacccaatgaacattttctcccatttggtggtttagtttcacccagtgtgcttttggataagcagaaatatctaaatgggattttgagttctccagctatagaatgtgaatgagataaaaagtgaactatctattatatttttctgagtttgttttctatcataaatacatgttttcacagcctttgtctctcagactctgctaaataatgtagcttattgaaataactgtcgctgaataaggagcaatgagaaacaaaactaatttttggagcagatggtctctggaattgcatatcctgctagtgattttctcatctttccttttctaacctaatgagaatgtcccagattcaattacctggatgtcaaagtcctagagccagaaatatattctctcatccctcttagcattctcttgctccctcattcactagggcaaatgtctaaatgaagaaaagtctctctcaacacctcgttcatgcaatcagcattagaatttgtaaggaaggaaggggggtggcatgaaaatttccattcttggggtatatgactgtcctgtttcccccaggccactttttttttttttttcttttgagacagggtcttgctcttgcccaggcaggagtacagtagtgcaatcacagctgactgcagccttgacctccagggctcaaggatcctcctgcctcagtctcccaactaagtgggactacaggcacgtgccaccatactcagcttttttttgtttgttttagacaagagtctcgctttgttgcccaggctggtcttgaattcctgggctcaagcaattcttccacctcagcctcccaaagtgctgagattactggcttgagccactgcacccacccctccagactactttaaatgtctctgctctgactgaattgaaggaattgtaagtttcagttgctgaatatatcagtatatctgaactccagatctttttatttcctatttttggcttcctacataaattaataaagtctgtctatatttaaggtttctgggagtagttttgtctatatttaatccatagatgtgctcctagtcatcagtcttatttcagtaaaaccatctttctggccaaatctctaacacgttttttacttcagtagtgagggcaatgagaagctttattaagaaagatcctatttaaagggctaatttggtattgaaagcatgctgatataaagtccagtatttgaggatataaagaggatgtgcactgagctgtgctgatgttcagcatttattatactttaatgggatagtgcttcttgaccattatagaacaacaaactgtcaaagggttaatacagatgacccagacctgacattaaatcctcttgattagaaataattaaatgaattatttattcatttctctcctctgccaaatctacttagccccacaaaaatgccccagctcagttaacatttttttgtttttcactttaggtatctcttaggcaaatagagatataaattgtaataggaaacagtctctaaatgtgaggctgaatacagcttcagtctggctctctaataggacaaaagccagtccatgtgttgtctctaactgatttagctttttcttttctttgaacaattcggcatgaattgaaaccaggttttcctgtggaaagttatagcttgattgggagatagaagttgaattgagttctttcttgcaactcttagtgtttatttttatatctcagtaagacgaggataccttcagtttgaatctgcataatgttcactgccaaactccttctcatttaatgcttatggccttcacatttctgtataataaagatcaattatcagctctctgg

SEQ ID NO: 12662 - DNA, 3237 bp, Homo sapiens
  source 1..3237: mol_type = unassigned DNA
aaacaccaaggtaggttgcctagtgatcctgaggaagctgatgtgttattccttctctgcatcgaaggatcaggaagtttgtgctctctgcgtggctaagtttttcacctactaggacgggggtggggtggggagaacaggtgtccttctaaaatacagcacaagctacagcctgcgtccagccataacccaggagtaacatcagaaacaggtgagaatgaccactttaactcaccgggcccgtcgcactgaaataagcaagaactctgaaaagaagatggaaagtgaggaagacagtaattgggagaaaagtccagacaatgaagattctggagactctaaggatatccgccttactcttatggaagaagtattgcttctgggactaaaagataaagaggcaaatatcaacagttggattacgcggtggctcacgcctgtaatcccagcactttggggagccgaggggtacacatctttctggaatgactgcatatcatcaggcctgcgagggggcatcctgatagagctggccatgcggggtcgaatctatctggaacccccgaccatgcgtaagaagcgactactagacagaaaggtactgctaaagtcagacagcccaacaggtgatgttttactggatgaaactctgaaacacatcaaagcaactgaacccacagaaactgtccaaacatggatagagctactcactggtgagacctggaaccccttcaaattacagtaccagctgagaaatgtacgagagcgcatcgcaaagaacctagtagagaaaggtattctaaccactgagaagcagaatttcctgctatttgacatgactactcatccagtgaccaatacaacagagaaacagcgactagtgaaaaaacttcaagatagtgtactagagcggtgggtaaatgaccctcagcgtatggacaagcgaacactagcactcctggtgctagcccactcctctgatgtgctagagaatgtcttctcctctctgacagatgacaagtatgatgtggcaatgaatcgagccaaggacttagtagaactggaccctgaagtggaagggacaaagcctagtgccacagaaatgatctgggctgtgctggcagccttcaataaatcttaaagccggcaggtggatttctccttttcccctgctggctggtgactgtcagagaccccatcactgagttttgtgtgatgagatgttttcatcatttttgtttccttttcttgaatcagacttgtgatttggggagagcaacttcagggcttctccatagaccttgaccattataagcagaccttatttctccctacacttccactccataggtaaataaactgggtgaagccacacacacccaatgaacattttctcccatttggtggtttagtttcacccagtgtgcttttggataagcagaaatatctaaatgggattttgagttctccagctatagaatgtgaatgagataaaaagtgaactatctattatatttttctgagtttgttttctatcataaatacatgttttcacagcctttgtctctcagactctgctaaataatgtagcttattgaaataactgtcgctgaataaggagcaatgagaaacaaaactaatttttggagcagatggtctctggaattgcatatcctgctagtgattttctcatctttccttttctaacctaatgagaatgtcccagattcaattacctggatgtcaaagtcctagagccagaaatatattctctcatccctcttagcattctcttgctccctcattcactagggcaaatgtctaaatgaagaaaagtctctctcaacacctcgttcatgcaatcagcattagaatttgtaaggaaggaaggggggtggcatgaaaatttccattcttggggtatatgactgtcctgtttcccccaggccactttttttttttttttcttttgagacagggtcttgctcttgcccaggcaggagtacagtagtgcaatcacagctgactgcagccttgacctccagggctcaaggatcctcctgcctcagtctcccaactaagtgggactacaggcacgtgccaccatactcagcttttttttgtttgttttagacaagagtctcgctttgttgcccaggctggtcttgaattcctgggctcaagcaattcttccacctcagcctcccaaagtgctgagattactggcttgagccactgcacccacccctccagactactttaaatgtctctgctctgactgaattgaaggaattgtaagtttcagttgctgaatatatcagtatatctgaactccagatctttttatttcctatttttggcttcctacataaattaataaagtctgtctatatttaaggtttctgggagtagttttgtctatatttaatccatagatgtgctcctagtcatcagtcttatttcagtaaaaccatctttctggccaaatctctaacacgttttttacttcagtagtgagggcaatgagaagctttattaagaaagatcctatttaaagggctaatttggtattgaaagcatgctgatataaagtccagtatttgaggatataaagaggatgtgcactgagctgtgctgatgttcagcatttattatactttaatgggatagtgcttcttgaccattatagaacaacaaactgtcaaagggttaatacagatgacccagacctgacattaaatcctcttgattagaaataattaaatgaattatttattcatttctctcctctgccaaatctacttagccccacaaaaatgccccagctcagttaacatttttttgtttttcactttaggtatctcttaggcaaatagagatataaattgtaataggaaacagtctctaaatgtgaggctgaatacagcttcagtctggctctctaataggacaaaagccagtccatgtgttgtctctaactgatttagctttttcttttctttgaacaattcggcatgaattgaaaccaggttttcctgtggaaagttatagcttgattgggagatagaagttgaattgagttctttcttgcaactcttagtgtttatttttatatctcagtaagacgaggataccttcagtttgaatctgcataatgttcactgccaaactccttctcatttaatgcttatggccttcacatttctgtataataaagatcaattatcagctctctgg

SEQ ID NO: 12663 - DNA, 973 bp, Homo sapiens
  source 1..973: mol_type = unassigned DNA
ttctctgcatcgaaggatcaggaagtttgtgctctctgcgtggctaagtttttcacctactaggacgggggtggggtggggagaacaggtgtccttctaaaatacagcacaagctacagcctgcgtccagccataacccaggagtaacatcagaaacaggtgagaatgaccactttaactcaccgggcccgtcgcactgaaataagcaagaactctgaaaagaagatggaaagtgaggaagacagtaattgggagaaaagtccagacaatgaagattctggagactctaaggatatccgccttactcttatggaagaagtattgcttctgggactaaaagataaagaggcaaatatcaacagttggattacgcggtggctcacgcctgtaatcccagcactttggggagccgaggggtacacatctttctggaatgactgcatatcatcaggcctgcgagggggcatcctgatagagctggccatgcggggtcgaatctatctggaacccccgaccatgcgtaagaagcgactactagacagaaaggtactgctaaagtcagacagcccaacaggtgatgttttactggatgaaactctgaaacacatcaaagcaactgaacccacagaaactgtccaaacatggatagagctactcactggtgagacctggaaccccttcaaattacagtaccagctgagaaatgtacgagagcgcatcgcaaagaacctagtagagaaaggtattctaaccactgagaagcagaatttcctgctatttgacatgactactcatccagtgaccaatacaacagagaaacagcgactagtgaaaaaacttcaagatagtgtactagagcggtgggtaaatgaccctcagcgtatggacaagcgaacactagcactcctggtgctagcccactcctctgatgtgctagagaatgtcttctcctctctgacagatgacaagtatg

SEQ ID NO: 12664 - DNA, 1011 bp, Homo sapiens
  source 1..1011: mol_type = unassigned DNA
gtgttattccttctctgcatcgaaggatcaggaagtttgtgctctctgcgtggctaagtttttcacctactaggacgggggtggggtggggagaacaggtgtccttctaaaatacagcacaagctacagcctgcgtccagccataacccaggagtaacatcagaaacaggtgagaatgaccactttaactcaccgggcccgtcgcactgaaataagcaagaactctgaaaagaagatggaaagtgaggaagacagtaattgggagaaaagtccagacaatgaagattctggagactctaaggatatccgccttactcttatggaagaagtattgcttctgggactaaaagataaagaggtactgctaaagtcagacagcccaacaggtgatgttttactggatgaaactctgaaacacatcaaagcaactgaacccacagaaactgtccaaacatggatagagctactcactggtgagacctggaaccccttcaaattacagtaccagctgagaaatgtacgagagcgcatcgcaaagaacctagtagagaaaggtattctaaccactgagaagcagaatttcctgctatttgacatgactactcatccagtgaccaatacaacagagaaacagcgactagtgaaaaaacttcaagatagtgtactagagcggtgggtaaatgaccctcagcgtatggacaagcgaacactagcactcctggtgctagcccactcctctgatgtgctagagaatgtcttctcctctctgacagatgacaagtatgatgtggcaatgaatcgagccaaggacttagtagaactggaccctgaagtggaagggacaaagcctagtgccacagaaatgatctgggctgtgctggcagccttcaataaatcttaaagccggcaggtggatttctccttttcccctgctggctggtgactgtcagagaccccatcactgagttttgtgtgatgagatgttttcatcatttttgtttccttttcttg

SEQ ID NO: 12665 - DNA, 3722 bp, Homo sapiens
  source 1..3722: mol_type = unassigned DNA
agatgggagggaggctgttgcaggctctcaggggggagagatggtgctggttctgggctagaagataaaaagataaaaagaaaacccaggagacatcaaggagctggcatttcttgtagacaggattagaagatgagtatagggaagaggtatgagttaaggctaggagattaaatggtgaagccatcaactggggtgggaggcgcaggcgagagtgagctgggtggaagaagggatgatgacaagaagggataatgatagtgattggatgagctggtttggggtagctcaagaaacggggatgctaatttggggctcagggtgcgcagaagccaccggagaagacgcccttgccagggggagtggggcaagaaaaggcaggaccgcctgatataactgaggacagcgaagggtggcaggagagtagcagggcagacggtctctgggtcaggggcggggagtcacgagggagccctcggacagcgcccgggccacgcaccataagggaggagtcattgctgctcatctcgggccgctcgcggctccgagtccgggtctggtggggcggtgcagagcgggattcccgaggcagggtcgtgggcactctatcgcggcgggcggttgaaggcgttacagtccttggaaaccgagctgctagccggttgctaggagcgtccagtgtctggagtgggaggaacaaaacgcctcacgtcacaaggcgcaggaatcgagcgccgagagagcgagtcggtgctactggcgtcgggtcggtccgggtaggcgcagcgggactggacctgggtgccgagcggagccgctgccatgggcctgggcgtcagcgctgagcagcccgcaggcggcgccgagggcttccacctccacggggtgcaggagaactccccagcccagcaggcgggcctggagccctactttgacttcatcatcaccattgggcactcgaggctgaacaaggagaatgacaccctgaaggcactactgaaagccaatgtggagaagcccgtgaagctggaggtgttcaatatgaagaccatgagggtgcgcgaggtggaggtggtgcccagcaacatgtggggcggccagggcctactgggtgccagtgtgcgcttctgcagcttccgcagggccagtgagcaggtgtggcatgtgctggatgtggaaccatcttcacctgctgcccttgccggcctgcgcccctacacagactatgtggttggttcggaccagattctccaggagtccgaggacttctttacgctcatcgagtctcatgaggggaagcccttgaagctgatggtgtataactccaagtcagactcctgccgggaggtgactgtaactcccaacgcagcctggggtggagagggcagtctgggatgtggcattggctatgggtatctacaccggatcccaactcagccccccagctaccacaagaagccacctggcaccccaccaccttctgctctaccacttggtgccccaccacctgatgctctaccacctggacccacccccgaggactctccttccctggagacaggttccaggcagagtgactacatggaggccctgctgcaggcacctggctcctccatggaggatccccttcctgggcctgggagtcccagccacagtgctccagaccctgatggacttccccatttcatggagactcctcttcagcccccacctccagtgcagcgagttatggacccaggcttcctggacgtgtcgggaatttctctcttggacaacagcaatgccagtgtgtggcccagcctgccctcttccacagaactgaccaccacagctgtctcaacctcagggccagaggacatctgctccagcagcagttctcatgagcggggtggtgaggctacatggtctgggtcagagtttgaggtctccttcctggacagcccaggtgcccaagcccaggcggaccacctgcctcagctgactcttcctgacagtctcacctctgcagcctcaccagaagatgggctgtccgccgagctgcttgaagctcaggctgaggaggaaccagcaagcacagagggcctagatactgggacggaggctgaggggctggacagccaggcccagatctctaccacagaataacaccctgggctgtgacaaggcccatgatgacatttcatgaggcccagatgtgggcaggcagcccgggctgcactatgcggtcaggattccttgctgctttggtgggacatgaggcctcagtgggtggtgagagggggccatgggccttgtgggaggatatcttttggccgtgtaccctcaggtccagtgcttggtcctgctctggtcactggggcttcccaggaggcagcagggtctggtcataatccagtgtgaagatgaggtgaggaaggaaggggttgctgtccagtgttggcctggtcgctttgattcttcctgcacagctcagcccaccccatctgtactggaagggaccctggagccctgggaccaccccctttcaagtcccaaacactgagtcctctgtcatgtgtccttgtccctaggctacaatgctacacttggctcaggctgatcaccatgctagtcacaggagggagagagaggcagtgtacttgcccccatctcctggagggaggtgcgttggaaattctaggcccttcagcagagacccatttgtgcccagaccacaatatttcttcttcctcagggactacatgccacagacctgtatccccagtggcaactcctgttagctcccaaacttaaacagtgatctcttctaaatatacaaggcatctacccagccccaatagtgaataaaagtcacaaatttaagttcaacaccctaagcaatttctcaaagccagtctacctgactaggtctatccacgcacggttcccaaccccaagggggaattaggggattagattaagagtaggtaaagacccttttgttctttcctgttgtaggggaggaagctgttctccccaccccaggtgcctttggaggttaaggctaggttaggccctgcactccacctggggacggcccctcatcacctgaagtcctctgctgtgttgactggaccctcagttcccacactgctaattactatgaaagctgctctggcctcgtcttctagcttgtgcctagttgaaagtctcacctttacaggatcatttgtaatgctggtgtacatgcagggaactcacaagctgtgtcaggtatgcaggacaaggaatgtctgctctggggggcacaggccaactatatggagggagggtcccaaattagcaaacccttcatttaaagcaaacccttgtcaagcctaccagagcagctgatacgtgtgcataacagtgaggcattgtgtcctggatcgtctgggagcccagtgtcaagtctgctggaatgcaggaagtagaacagaatcgccacaggactgttctggggccagcttcccttaactctgtagcctggcagtctgacccaaagttgccctcacccaaaggttctggctcttccctccctcacttttactttcccttcccccataagttggaggataaaatgggtatcaatgctaatatttccagggagaacatgaaaccagaggtttctttctttctctgtaatctgctatgaaagaaaataacaaatgaaaataaatgtgtactacactttgaaatatttt

SEQ ID NO: 12666 - DNA, 5220 bp, Homo sapiens
  source 1..5220: mol_type = unassigned DNA
atcccggctgacgttggacgacaaagatggcggcagggaccagcagttactgggaagatctcaggaaacaggctcgacagctggaaaatgaacttgacctgaaactagtttccttcagcaaactatgtacaagttacagtcatagcagtacccgagatggaagacgcgacaggtatagttctgatacaacaccccttttaaatggatcaagccaagacagaatgtttgagacaatggcgattgagattgaacaacttttggcaaggcttacaggggtaaatgataaaatggcagaatataccaacagtgcaggtgtcccctccttgaatgcagccctgatgcatacattacagcggcatagagacatattgcaggattatacacatgaattccataaaaccaaagcaaactttatggcaatacgggaaagggagaatcttatgggatcagtacgaaaagatattgagtcatataaaagtgggtctggagtaaacaacagaagaactgagctatttttgaaagaacatgaccaccttcgaaactcagatcgtctgatagaagagacaataagcattgctatggcaacaaaagaaaatatgacttcacagagaggaatgttgaagtcaattcacagcaaaatgaacactttggccaatcgttttcctgctgtaaacagcctgatccagaggatcaacctgaggaagcggcgggactcgctcatcctagggggtgttattgggatctgtaccatcctgttgctgctgtatgcgttccattgatgggacatcttcagggactcttgacagccaccgctttcacaccctggtctggaataaggaaacatcggagggagaagttgactgtcttgataattagcctgaccagcaggatgaatgcaagactgacagtgatggactctgtgacatggtcaggttgagctgaagccacagtttctctgtgctgtgttttctaacacatttttctgtttttaattaaaaaaaaaaaaaaaaggttttcagttgcttttgtctccctaggaggcaggtaaaccaatcaaaaacagagttttctgtgtttccatgatagtgttgaagcctaatgacaagccaggtcttacagctgggctcttcagaaaaccaggtttctacatccaaagactgcttttcttttagctgccagattggattgtgaataaaaataattcttccctctccctctccctctccccacggtctccctctttccacggtctccctctgatgccgagccgaagctggactgtactgctgccatctcggctcactgcaacctccctgcctgattctcctgcctcagcctgccgagtgcctgcaattgcaggcgagcgccgccacgcctgactgcctcggcctcccgaggtgccgggattgcagacggagtctcgttcactcagtgctcaatggtgcccaggctggagtgcagtggcgtgatctcggctcactacaacctccacctcccagccacctgccttggcctcccaaagtgccgagattgcagcctctgcccggccgccaccccgtctggaaagtgaggagcgcctctgcccggccgccatcccatctaggaagtgaggagcgcctcttcccagccgccatcccatctaggaagtgaggagcgtctctgcccggccgcccatcgtctgagatgtggggagcgcctctgccccgccgccccgtctgggatgtgaggagctcctctgcccggccgcgaccccgtctgggaggtgaggagcgtctctgtctggccaccccgtctgagaagtgaggagacctccgcccggcagccgccctgtctgagaagtgaggagcccctccgcccggcagccaccccatctgggaagtgaggagcgtctacgcccgggcagctgccccgtccgggagggaggtgggggggtcagccccccgcccggccagccgccccgtccgggagggaggtgggggggatcagccccccgcccggccagccgccccgtccgggagggaggtggggggcgcctctgcccggccgcccctgcccggccgcccctactgggaagtgaggagcccctctgcctggccaccaccccatctgggaggtgtgcccagcagctcattgagaacgggccatgatgacaatggcggttttgtggaatagaaaaggcggaaaggtggggaaaagattgagaaattggatggttgccgtgtctgtgtagaaagaagtagacatgggagacttttcattttgttctgtactaagaaaaattcttctgccttgggatcctgttgatctatgaccttacccccaacctggtgctctctgaaacatgtgctgtgtccactcagggttaaatggattaagggtggtgcaagatgtgctttgttaaacagatgcttgaaggcagcatgctccttaagagtcatcaccactccctaatctcaagtacccagggacacaaacactgcggaaggcggcagggtcctctgcctaggaaaaccagagacctttgttcacttgttgatctgctgaccttccctccactattgtcctatgaccctgccaaatccccctctgcgagaaacacccaagaatgatcaattaaaaaaaaaataatataataataattcttgtcctcttattttacactcataatgagaaatcacaagttctttcttgatgatctgtgctatagatttctactctgtctcctcaactctgttgatatttggggaaaattctgtttttcatagattctttgagatgctgatggaccagcttcagcatgtttgaggttgtctgaaatggagatcactgtaaaactgtctttttcttttaaattacaagtacactggggttaactgtattgctggaaaaacatcaagaatgacagtcttatatttaaggcaccagtcattgtttccattttttttttaattcttcccttggattaatattttctactgaaaagaaatgaaatctcagttccactatgataaaagaaacgaatcaccagtgtctgtcagtgcccccactgctcctcctcataccagcattgacactggtagctgaggaaggggactgctcaatttctaatgtgatctattcaagaagccacatataaaaaggcattgagggctcactgtccagagaattgcttttgtaaatgctccacaacgtatgggcaaaagtttaaggactactgcctgatgtaccaggaatcctgagttctgtgaaaatctgttcattccaaatctgttaagcatttccaaacatccagagaatggtttcactgttgagggtgcatgtggcagaatctgtctctctctgcacctgtcttctgttaccatccctggacagtgacagattttaagccagccaccagaattcttttcgagttaaccatttcttagtttctgtaaattcatgacttgtcttactgaactacagcctggtttgtagacttccaacatctacactgctgctcttcaccattggaattcactgtggtatttatagtattggcttcagtccgagccacaggcaataaaaggatatcagctgtagttctcagctacatcatggtgtatagatgctgttattcaggcgaacttgctcatgggtggactaacacctggtttggtacagagactgagaagtttttcattctggtgtcaaagttttgttacattatgggtgtgaagggcatttgatatatttttcttaactatggggtttatttttctaaatgtgggttgattgactgttaattgattcagggtacccttaaaagaaaagaagttttcccattgtgaaccttaaatgatcagagaagtaagttcattgattaaattctctgttgggagaacaaaacttttctcccttgacactttattatctttgatttttcaaagggccttgattggtggttgtgtctcggttaaaatttatgggactttgctatgtagttggcatttataaaatctgaagtatcataaataaagttatttatttaattatactaccagtcttttttactggtctgattcttttgtgcattcattaaagctgattgtgtgagagtgaactgggacacaagctagtctagctcactgcagccaagcaaaccctgttgatggctgatgggcctttccattagggttttgcttatgtgaagtaatggaattatgttggttattttctttatgaaaataaaccagttcttccaaggaagttaaaaggcttggtatggatgttggtgtcagataggtctgactaacctctccgtgctgcagcctatactaaggtgacccagggccacatgtagacagctaggccagtgctttttcctcttagggtttctttgcagaaagaaacctccagcaagggaagagaggtgtgtgtccacaggaaggggctccgtggggatcccatgaagggatttgagctctttcagctccatgtcatttaacttttttgtttaaccaccttggctttctctccttttttgctgtcctccttacggaccagttaccagattcagaggctaacagttagttacttgttaatgctagtcacagccaggaggtcagaaggaattttctacttctggatccaaatgttacctcttaggggaagttatgccccctcaactattgtcttattataatgaatctttcctttttggtccttttaagtaaccactcaaaacttttcatttcactgaaaaaatatgaaaaaccatgacaatagggctgggtgcagtggctcacgcctgtaatcttagcactttgggagaccaaggcaggcggatcgtttgaggccaggagtttgagaccagcctgggcaatgtagcaagactctgtctctgcaaaaaaaattaaaagatacctgagagctcactttaatatcaaggtatttgcatccattcccaccctgttagctcttaagggaggagggaaatcaattccaaccatactttcctgtgatggaagatgtttcctcttgaaaaaatgccaatacagatttttaaaacctattgttttccaaatgcactttgtaagtttttgcttttaaaatagcttcttggaaccaattttattgtatttgtacttaatttttgttctcatctaaatgtgcattttctgactgtatagaagaagctttggtatgtaatttaataataaattagaaatctaaatgattgca

SEQ ID NO: 12667 - DNA, 5230 bp, Homo sapiens
  source 1..5230: mol_type = unassigned DNA
atcccggctgacgttggacgacaaagatggcggcagggaccagcagttactgggaaggtgagggcgagaaggcctccggatctcaggaaacaggctcgacagctggaaaatgaacttgacctgaaactagtttccttcagcaaactatgtacaagttacagtcatagcagtacccgagatggaagacgcgacagttctgatacaacaccccttttaaatggatcaagccaagacagaatgtttgagacaatggcgattgagattgaacaacttttggcaaggcttacaggggtaaatgataaaatggcagaatataccaacagtgcaggtgtcccctccttgaatgcagccctgatgcatacattacagcggcatagagacatattgcaggattatacacatgaattccataaaaccaaagcaaactttatggcaatacgggaaagggagaatcttatgggatcagtacgaaaagatattgagtcatataaaagtgggtctggagtaaacaacagaagaactgagctatttttgaaagaacatgaccaccttcgaaactcagatcgtctgatagaagagacaataagcattgctatggcaacaaaagaaaatatgacttcacagagaggaatgttgaagtcaattcacagcaaaatgaacactttggccaatcgttttcctgctgtaaacagcctgatccagaggatcaacctgaggaagcggcgggactcgctcatcctagggggtgttattgggatctgtaccatcctgttgctgctgtatgcgttccattgatgggacatcttcagggactcttgacagccaccgctttcacaccctggtctggaataaggaaacatcggagggagaagttgactgtcttgataattagcctgaccagcaggatgaatgcaagactgacagtgatggactctgtgacatggtcaggttgagctgaagccacagtttctctgtgctgtgttttctaacacatttttctgtttttaattaaaaaaaaaaaaaaaaggttttcagttgcttttgtctccctaggaggcaggtaaaccaatcaaaaacagagttttctgtgtttccatgatagtgttgaagcctaatgacaagccaggtcttacagctgggctcttcagaaaaccaggtttctacatccaaagactgcttttcttttagctgccagattggattgtgaataaaaataattcttccctctccctctccctctccccacggtctccctctttccacggtctccctctgatgccgagccgaagctggactgtactgctgccatctcggctcactgcaacctccctgcctgattctcctgcctcagcctgccgagtgcctgcaattgcaggcgagcgccgccacgcctgactgcctcggcctcccgaggtgccgggattgcagacggagtctcgttcactcagtgctcaatggtgcccaggctggagtgcagtggcgtgatctcggctcactacaacctccacctcccagccacctgccttggcctcccaaagtgccgagattgcagcctctgcccggccgccaccccgtctggaaagtgaggagcgcctctgcccggccgccatcccatctaggaagtgaggagcgcctcttcccagccgccatcccatctaggaagtgaggagcgtctctgcccggccgcccatcgtctgagatgtggggagcgcctctgccccgccgccccgtctgggatgtgaggagctcctctgcccggccgcgaccccgtctgggaggtgaggagcgtctctgtctggccaccccgtctgagaagtgaggagacctccgcccggcagccgccctgtctgagaagtgaggagcccctccgcccggcagccaccccatctgggaagtgaggagcgtctacgcccgggcagctgccccgtccgggagggaggtgggggggtcagccccccgcccggccagccgccccgtccgggagggaggtgggggggatcagccccccgcccggccagccgccccgtccgggagggaggtggggggcgcctctgcccggccgcccctgcccggccgcccctactgggaagtgaggagcccctctgcctggccaccaccccatctgggaggtgtgcccagcagctcattgagaacgggccatgatgacaatggcggttttgtggaatagaaaaggcggaaaggtggggaaaagattgagaaattggatggttgccgtgtctgtgtagaaagaagtagacatgggagacttttcattttgttctgtactaagaaaaattcttctgccttgggatcctgttgatctatgaccttacccccaacctggtgctctctgaaacatgtgctgtgtccactcagggttaaatggattaagggtggtgcaagatgtgctttgttaaacagatgcttgaaggcagcatgctccttaagagtcatcaccactccctaatctcaagtacccagggacacaaacactgcggaaggcggcagggtcctctgcctaggaaaaccagagacctttgttcacttgttgatctgctgaccttccctccactattgtcctatgaccctgccaaatccccctctgcgagaaacacccaagaatgatcaattaaaaaaaaaataatataataataattcttgtcctcttattttacactcataatgagaaatcacaagttctttcttgatgatctgtgctatagatttctactctgtctcctcaactctgttgatatttggggaaaattctgtttttcatagattctttgagatgctgatggaccagcttcagcatgtttgaggttgtctgaaatggagatcactgtaaaactgtctttttcttttaaattacaagtacactggggttaactgtattgctggaaaaacatcaagaatgacagtcttatatttaaggcaccagtcattgtttccattttttttttaattcttcccttggattaatattttctactgaaaagaaatgaaatctcagttccactatgataaaagaaacgaatcaccagtgtctgtcagtgcccccactgctcctcctcataccagcattgacactggtagctgaggaaggggactgctcaatttctaatgtgatctattcaagaagccacatataaaaaggcattgagggctcactgtccagagaattgcttttgtaaatgctccacaacgtatgggcaaaagtttaaggactactgcctgatgtaccaggaatcctgagttctgtgaaaatctgttcattccaaatctgttaagcatttccaaacatccagagaatggtttcactgttgagggtgcatgtggcagaatctgtctctctctgcacctgtcttctgttaccatccctggacagtgacagattttaagccagccaccagaattcttttcgagttaaccatttcttagtttctgtaaattcatgacttgtcttactgaactacagcctggtttgtagacttccaacatctacactgctgctcttcaccattggaattcactgtggtatttatagtattggcttcagtccgagccacaggcaataaaaggatatcagctgtagttctcagctacatcatggtgtatagatgctgttattcaggcgaacttgctcatgggtggactaacacctggtttggtacagagactgagaagtttttcattctggtgtcaaagttttgttacattatgggtgtgaagggcatttgatatatttttcttaactatggggtttatttttctaaatgtgggttgattgactgttaattgattcagggtacccttaaaagaaaagaagttttcccattgtgaaccttaaatgatcagagaagtaagttcattgattaaattctctgttgggagaacaaaacttttctcccttgacactttattatctttgatttttcaaagggccttgattggtggttgtgtctcggttaaaatttatgggactttgctatgtagttggcatttataaaatctgaagtatcataaataaagttatttatttaattatactaccagtcttttttactggtctgattcttttgtgcattcattaaagctgattgtgtgagagtgaactgggacacaagctagtctagctcactgcagccaagcaaaccctgttgatggctgatgggcctttccattagggttttgcttatgtgaagtaatggaattatgttggttattttctttatgaaaataaaccagttcttccaaggaagttaaaaggcttggtatggatgttggtgtcagataggtctgactaacctctccgtgctgcagcctatactaaggtgacccagggccacatgtagacagctaggccagtgctttttcctcttagggtttctttgcagaaagaaacctccagcaagggaagagaggtgtgtgtccacaggaaggggctccgtggggatcccatgaagggatttgagctctttcagctccatgtcatttaacttttttgtttaaccaccttggctttctctccttttttgctgtcctccttacggaccagttaccagattcagaggctaacagttagttacttgttaatgctagtcacagccaggaggtcagaaggaattttctacttctggatccaaatgttacctcttaggggaagttatgccccctcaactattgtcttattataatgaatctttcctttttggtccttttaagtaaccactcaaaacttttcatttcactgaaaaaatatgaaaaaccatgacaatagggctgggtgcagtggctcacgcctgtaatcttagcactttgggagaccaaggcaggcggatcgtttgaggccaggagtttgagaccagcctgggcaatgtagcaagactctgtctctgcaaaaaaaattaaaagatacctgagagctcactttaatatcaaggtatttgcatccattcccaccctgttagctcttaagggaggagggaaatcaattccaaccatactttcctgtgatggaagatgtttcctcttgaaaaaatgccaatacagatttttaaaacctattgttttccaaatgcactttgtaagtttttgcttttaaaatagcttcttggaaccaattttattgtatttgtacttaatttttgttctcatctaaatgtgcattttctgactgtatagaagaagctttggtatgtaatttaataataaattagaaatctaaatg

SEQ ID NO: 12668 - DNA, 1204 bp, Homo sapiens
  source 1..1204: mol_type = unassigned DNA
gttggacgacaaagatggcggcagggaccagcagttactgggaagatctcaggaaacaggctcgacagctggaaaatgaacttgacctgaaactagtttccttcagcaaactatgtacaagttacagtcatagcagtacccgagatggaagacgcgacagttctgatacaacaccccttttaaatggatcaagccaagacagaatgtttgagacaatggcgattgagattgaacaacttttggcaaggcttacaggggtaaatgataaaatggcagaatataccaacagtgcaggtgtcccctccttgaatgcagccctgatgcatacattacagcggcatagagacatattgcaggattatacacatgaattccataaaaccaaagcaaactttatggcaatacgggaaagggagaatcttatgggatcagtacgaaaagatattgagtcatataaaagtgggtctggagtaaacaacagaagaactgagctatttttgaaagaacatgaccaccttcgaaaaggttttcagtggtgaagataaacttgaataaggagataacttacacaagcagaaaaagcctcatctcttctggattcctttaatgccagtggtcatcaccaggtgtagatcagtcaccttttacccaggctgggaccaccaccttctcatctacagctcagatcgtctgatagaagagacaataagcattgctatggcaacaaaagaaaatatgacttcacagagaggaatgttgaagtcaattcacagcaaaatgaacactttggccagtatcctttttgaatgttcgcagtctgtgttttgagggtagaggggagaagtgtctgtgtgtgcttttatagggggcaggttgccatcatcagtagcagtagagcccatcagtaattgcataatatgaatatactgtgcattcctactttgtgaaagtttatgctctttagtaccattcctaaaagactgcacctcagaagtttcttactactagatgtagaagaaaaaaattataaatgtgaatttaaaaattatccaccaatttcttctacattttagaaagcttttaaattcatgttagaactccacactatacattattcttacctaaacatgataaattatatgcctttgttgtttttcccatttagagataagtcagtggcagatgcttggaagggggaaggaag

SEQ ID NO: 12669 - DNA, 5208 bp, Homo sapiens
  source 1..5208: mol_type = unassigned DNA
atcccggctgacgttggacgacaaagatggcggcagggaccagcagttactgggaagatctcaggaaacaggctcgacagctggaaaatgaacttgacctgaaactagtttccttcagcaaactatgtacaagttacagtcatagcagtacccgagatggaagacgcgacagttctgatacaacaccccttttaaatggatcaagccaagacagaatgtttgagacaatggcgattgagattgaacaacttttggcaaggcttacaggggtaaatgataaaatggcagaatataccaacagtgcaggtgtcccctccttgaatgcagccctgatgcatacattacagcggcatagagacatattgcaggattatacacatgaattccataaaaccaaagcaaactttatggcaatacgggaaagggagaatcttatgggatcagtacgaaaagatattgagtcatataaaagtgggtctggagtaaacaacagaagaactgagctatttttgaaagaacatgaccaccttcgaaactcagatcgtctgatagaagagacaataagcattgctatggcaacaaaagaaaatatgacttcacagagaggaatgttgaagtcaattcacagcaaaatgaacactttggccaatcgttttcctgctgtaaacagcctgatccagaggatcaacctgaggaagcggcgggactcgctcatcctagggggtgttattgggatctgtaccatcctgttgctgctgtatgcgttccattgatgggacatcttcagggactcttgacagccaccgctttcacaccctggtctggaataaggaaacatcggagggagaagttgactgtcttgataattagcctgaccagcaggatgaatgcaagactgacagtgatggactctgtgacatggtcaggttgagctgaagccacagtttctctgtgctgtgttttctaacacatttttctgtttttaattaaaaaaaaaaaaaaaaggttttcagttgcttttgtctccctaggaggcaggtaaaccaatcaaaaacagagttttctgtgtttccatgatagtgttgaagcctaatgacaagccaggtcttacagctgggctcttcagaaaaccaggtttctacatccaaagactgcttttcttttagctgccagattggattgtgaataaaaataattcttccctctccctctccctctccccacggtctccctctttccacggtctccctctgatgccgagccgaagctggactgtactgctgccatctcggctcactgcaacctccctgcctgattctcctgcctcagcctgccgagtgcctgcaattgcaggcgagcgccgccacgcctgactgcctcggcctcccgaggtgccgggattgcagacggagtctcgttcactcagtgctcaatggtgcccaggctggagtgcagtggcgtgatctcggctcactacaacctccacctcccagccacctgccttggcctcccaaagtgccgagattgcagcctctgcccggccgccaccccgtctggaaagtgaggagcgcctctgcccggccgccatcccatctaggaagtgaggagcgcctcttcccagccgccatcccatctaggaagtgaggagcgtctctgcccggccgcccatcgtctgagatgtggggagcgcctctgccccgccgccccgtctgggatgtgaggagctcctctgcccggccgcgaccccgtctgggaggtgaggagcgtctctgtctggccaccccgtctgagaagtgaggagacctccgcccggcagccgccctgtctgagaagtgaggagcccctccgcccggcagccaccccatctgggaagtgaggagcgtctacgcccgggcagctgccccgtccgggagggaggtgggggggtcagccccccgcccggccagccgccccgtccgggagggaggtgggggggatcagccccccgcccggccagccgccccgtccgggagggaggtggggggcgcctctgcccggccgcccctgcccggccgcccctactgggaagtgaggagcccctctgcctggccaccaccccatctgggaggtgtgcccagcagctcattgagaacgggccatgatgacaatggcggttttgtggaatagaaaaggcggaaaggtggggaaaagattgagaaattggatggttgccgtgtctgtgtagaaagaagtagacatgggagacttttcattttgttctgtactaagaaaaattcttctgccttgggatcctgttgatctatgaccttacccccaacctggtgctctctgaaacatgtgctgtgtccactcagggttaaatggattaagggtggtgcaagatgtgctttgttaaacagatgcttgaaggcagcatgctccttaagagtcatcaccactccctaatctcaagtacccagggacacaaacactgcggaaggcggcagggtcctctgcctaggaaaaccagagacctttgttcacttgttgatctgctgaccttccctccactattgtcctatgaccctgccaaatccccctctgcgagaaacacccaagaatgatcaattaaaaaaaaaataatataataataattcttgtcctcttattttacactcataatgagaaatcacaagttctttcttgatgatctgtgctatagatttctactctgtctcctcaactctgttgatatttggggaaaattctgtttttcatagattctttgagatgctgatggaccagcttcagcatgtttgaggttgtctgaaatggagatcactgtaaaactgtctttttcttttaaattacaagtacactggggttaactgtattgctggaaaaacatcaagaatgacagtcttatatttaaggcaccagtcattgtttccattttttttttaattcttcccttggattaatattttctactgaaaagaaatgaaatctcagttccactatgataaaagaaacgaatcaccagtgtctgtcagtgcccccactgctcctcctcataccagcattgacactggtagctgaggaaggggactgctcaatttctaatgtgatctattcaagaagccacatataaaaaggcattgagggctcactgtccagagaattgcttttgtaaatgctccacaacgtatgggcaaaagtttaaggactactgcctgatgtaccaggaatcctgagttctgtgaaaatctgttcattccaaatctgttaagcatttccaaacatccagagaatggtttcactgttgagggtgcatgtggcagaatctgtctctctctgcacctgtcttctgttaccatccctggacagtgacagattttaagccagccaccagaattcttttcgagttaaccatttcttagtttctgtaaattcatgacttgtcttactgaactacagcctggtttgtagacttccaacatctacactgctgctcttcaccattggaattcactgtggtatttatagtattggcttcagtccgagccacaggcaataaaaggatatcagctgtagttctcagctacatcatggtgtatagatgctgttattcaggcgaacttgctcatgggtggactaacacctggtttggtacagagactgagaagtttttcattctggtgtcaaagttttgttacattatgggtgtgaagggcatttgatatatttttcttaactatggggtttatttttctaaatgtgggttgattgactgttaattgattcagggtacccttaaaagaaaagaagttttcccattgtgaaccttaaatgatcagagaagtaagttcattgattaaattctctgttgggagaacaaaacttttctcccttgacactttattatctttgatttttcaaagggccttgattggtggttgtgtctcggttaaaatttatgggactttgctatgtagttggcatttataaaatctgaagtatcataaataaagttatttatttaattatactaccagtcttttttactggtctgattcttttgtgcattcattaaagctgattgtgtgagagtgaactgggacacaagctagtctagctcactgcagccaagcaaaccctgttgatggctgatgggcctttccattagggttttgcttatgtgaagtaatggaattatgttggttattttctttatgaaaataaaccagttcttccaaggaagttaaaaggcttggtatggatgttggtgtcagataggtctgactaacctctccgtgctgcagcctatactaaggtgacccagggccacatgtagacagctaggccagtgctttttcctcttagggtttctttgcagaaagaaacctccagcaagggaagagaggtgtgtgtccacaggaaggggctccgtggggatcccatgaagggatttgagctctttcagctccatgtcatttaacttttttgtttaaccaccttggctttctctccttttttgctgtcctccttacggaccagttaccagattcagaggctaacagttagttacttgttaatgctagtcacagccaggaggtcagaaggaattttctacttctggatccaaatgttacctcttaggggaagttatgccccctcaactattgtcttattataatgaatctttcctttttggtccttttaagtaaccactcaaaacttttcatttcactgaaaaaatatgaaaaaccatgacaatagggctgggtgcagtggctcacgcctgtaatcttagcactttgggagaccaaggcaggcggatcgtttgaggccaggagtttgagaccagcctgggcaatgtagcaagactctgtctctgcaaaaaaaattaaaagatacctgagagctcactttaatatcaaggtatttgcatccattcccaccctgttagctcttaagggaggagggaaatcaattccaaccatactttcctgtgatggaagatgtttcctcttgaaaaaatgccaatacagatttttaaaacctattgttttccaaatgcactttgtaagtttttgcttttaaaatagcttcttggaaccaattttattgtatttgtacttaatttttgttctcatctaaatgtgcattttctgactgtatagaagaagctttggtatgtaatttaataataaattagaaatctaaatg

SEQ ID NO: 12670 - DNA, 1026 bp, Homo sapiens
  source 1..1026: mol_type = unassigned DNA
ggacgacaaagatggcggcagggaccagcagttactgggaagatctcaggaaacaggctcgacagctggaaaatgaacttgacctgaaactagtttccttcagcaaactatgtacaagttacagtcatagcagtacccgagatggaagacgcgacaggtatagttctgatacaacaccccttttaaatggatcaagccaagacagaatgtttgagacaatggcgattgagattgaacaacttttggcaaggcttacaggggtaaatgataaaatggcagaatataccaacagtgcaggtgtcccctccttgaatgcagccctgatgcatacattacagcggcatagagacatattgcaggtaatatattgggctcgagatgttttcattatcacaggagtttgggtttttttttttaatccctgcattggatatgtgcacatatatttaaaaggacaaagagaaaaatctgagaaaataaatgccatgctaaagggacttgttttacttttttttggggtcaccattataaaattctgaaaatatctaatagctcttgctatttcttggcgaagttgagtaatattcatcactgggtacatatacttccactatgggagacctagctagctagctgtaacagtgaaatagccaatggtcatgtatagacaataacgtggtgggtaagcgtgtactttcagctagctttgaagataatatggagggggaattatttactatacttagtatattgtttaagaaaacagtaaatgtgtatgcaccaataaaactaaataaacttttaaagatttaaatggaggatatgttaaaaatatggtagtacaaatagaaaggactttctaaataagacttgatactggaaaccataacgaatggctaatttgcttactacacagagatataatagaaataagaaaaagacagtaggaaaatggacaaaggatataaaattgcttacaaaaaaatgaatggccaaaactataaaaacattttcagcagtatttcc

SEQ ID NO: 12671 - DNA, 1011 bp, Homo sapiens
  source 1..1011: mol_type = unassigned DNA
ggacgacaaagatggcggcagggaccagcagttactgggaaggtgagggcgagaaggcctccggatctcaggaaacaggctcgacagctggaaaatgaacttgacctgaaactagtttccttcagcaaactatgtacaagttacagtcatagcagtacccgagatggaagacgcgacagttctgatacaacaccccttttaaatggatcaagccaagacagaatgtttgagacaatggcgattgagattgaacaacttttggcaaggcttacaggggtaaatgataaaatggcagaatataccaacagtgcaggtgtcccctccttgaatgcagccctgatgcatacattacagcggcatagagacatattgcaggattatacacatgaattccataaaaccaaagcaaactttatggcaatacgggaaagggagaatcttatgggatcagtacgaaaagatattgagtcatataaaagtgggtctggagtaaacaacagaagaactgagctatttttgaaagaacatgaccaccttcgaaactcagatcgtctgatagaagagacaataagcattgctatggcaacaaaagaaaatatgacttcacagagaggaatgttgaagtcaattcacagcaaaatgaacactttggccaatcgttttcctgctgtaaacagcctgatccagaggatcaacctgaggaagcggcgggactcgctcatcctagggggtgttattgggatctgtaccatcctgttgctgctgtatgcgttccattgatgggacatcttcagggactcttgacagccaccgctttcacaccctggtctggaataaggaaacatcggagggagaagttgactgtcttgataattagcctgaccagcaggatgaatgcaagactgacagtgatggactctgtgacatggtcaggttgagctgaagccacagtttctctgtgctgtgttttctaacacatttttctgtttttaattaaaaaaaaaaaaaaaa

SEQ ID NO: 12672 - DNA, 1469 bp, Homo sapiens
  source 1..1469: mol_type = unassigned DNA
aaccggaaggggggctgtgaggacgtgttccgaggaagccagagccggagccgtggcctgcggggccggcgacatggatcccctgttccagcaaacgcacaagcaggtccacgagatccagtcttgcatgggacgcctggagacggcagacaagcagtctgtgcacatagtagaaaacgaaatccaagcaagcatagaccagatattcagccgtctagaacgtctggagattttgtccagcaaggagccccctaacaaaaggcaaaatgccagacttcgggttgaccagttaaagtatgatgtccagcacctgcagactgcgctcagaaacttccagcatcggcgccatgcaagggagcagcaggagagacagcgagaagagcttctgtctcgaaccttcaccactaacgactctgacaccaccataccaatggacgaatcactgcagtttaactcctccctccagaaagttcacaacggcatggatgacctcattttagatgggcacaatattttagatggactgaggacccagagactgaccttgaaggggactcagaagaagatccttgacattgccaacatgctgggcttgtccaacacagtgatgcggctcatcgagaagcgggctttccaggacaagtactttatgataggcacccaaggatcctgccagacagcacactttggaggaaggtctgcagggagcagctgagccatttgttcttgaactctgggaggcagaagtccccgcacccatcatgcgtggactgataggacatcttttcgtggtgtgcaccagtgctttccacacttgacagtggttggctttgatgaaccctcatgctgcaccttcagagccagtcctctagtttggaataaaaattgcagaggtggtttttgggtctttaccacctgcggctggtggacagcagccagtgtgtctggacacccaggggcattgagactgcatgttgtcacatgaccacttctcttcacacatctgctttcagtgcctggtgaaaaatagaccttggcctaacagtgtgactctctccaccgcctcagtgtagggaagggtccaggccagggaaggagcaccctctagtggaggcgggggtgaattcttaggtcgagctgatgcaagaaactccggtagccagcctctgtgaccttgtacatgagtttggtgtgcctattgtgatttaaaacaggtgggttatcaagaggaacttgagatctctttattacatggacatttacttcagggggaccactgtaagaaaagccaaactccaagaccaagtaagttagaggagtcttgattttttagacttcactgcggagttctgtacaccctttgccctgatgaatttgaatgggtttgatttgcaaatttggatttacacccattgttttggaagcacatcagctgaataaagttgaggtttattttatttagaaaatca

SEQ ID NO: 12673 - DNA, 3319 bp, Homo sapiens
  source 1..3319: mol_type = unassigned DNA
aaccggaaggggggctgtgaggacgtgttccgaggaagccagagccggagccgtggcctgcggggccggcgacatggatcccctgttccagcaaacgcacaagcaggtccacgagatccagtcttgcatgggacgcctggagacggcagacaagcagtctgtgcacatagtagaaaacgaaatccaagcaagcatagaccagatattcagccgtctagaacgtctggagattttgtccagcaaggagccccctaacaaaaggcaaaatgccagacttcgggttgaccagttaaagtatgatgtccagcacctgcagactgcgctcagaaacttccagcatcggcgccatgcaagggagcagcaggagagacagcgagaagagcttctgtctcgaaccttcaccactaacgactctgacaccaccataccaatggacgaatcactgcagtttaactcctccctccagaaagttcacaacggcatggatgacctcattttagatgggcacaatattttagatggactgaggacccagagactgaccttgaaggggactcagaagaagatccttgacattgccaacatgctgggcttgtccaacacagtgatgcggctcatcgagaagcgggctttccaggacaagtactttatgataggtgggatgctgctgacctgtgtggtcatgttcctcgtggtgcagtacctgacatgagccagccacgctcagtggctgaacagcattcccacagcctgcaagtgtgtgtgtgtgtgaaagagagaggggggcccagaggccgccttttgaaatgtttgcctgtctgaactgtgaagacacttgggagtgattgtggtctaatttccaacctgctctgttttctgtgacatcttggagggggagctagtgccaccaccatgcgcggtgcttaggaaatgaaagaagtcccgggtctgtctctctcactctcgctctcactgggggagggaaagaatggctttggtggctttgttcacatagctgatgcgtgccctgggaaggtgtccacagtgagccctgtgtgcaggactgtccacacggttcacaccttgtcaccatcaggcctttctggctcctgatagggtggagcaaaagtggaaaggaaaggaaagaggccttttctcacagccattatattaaatagtaggtcgattcacatcctcgtgctcctggccaccctcccctgtgcctcagtgacatgtagatgactgactgccaatacttgtcaccattccctggaagcagctacctaggggaaacaagatgtagtgctattgccgataacaagtaagattttccacactacagctgggtgtttctcttttctaaagtgaggccagtgttatttcccgggagtgttcagtcttgaccctagtcactgattttttctagttgttaatagagtggttggcttttaaggttcagagactgtggcttggcacctgcgcccaggctttgtgggcctttgccccttagaaagtagctgtaggcaaagatttgtgattttccaattacagtctcagctctagttttagtatctctaattctttggttcccttctcttccctgaaatatattagcacctgccagccaggccctcattttgcccagccagtgtgggcagatcccaccgtggagacatctgtagtgtgtatgtccttgtaacactctgttttcagggactacaacctttttccttctgtgaccagccccggattcaggctgtactaataccaggtatattgtggaatttagtataaaggccaatctgtcctgaagtccatctaatgtggtgaatcactgaaagtctcagaaagacctggttagtgtatgttctcatttaccacaggcctaccagccctgggcacagcagcttcatggcaagacataaaatgacactcaaaatccttcagatctggaaaccggctcagtattaaccctacctttggttgtcctgccctacctgctctgttagtttcttgttgcttgaactgtcttctgtcttatttcccttcctttctgtgttcctcttcacctctcttgttcccctccccgctgctctgtagtcatgttggtcctttcaggcacctctgtggcatagctcccctttggtaagttttcttaattgtcatagattaactgagtttcctggatgctaatttcacactttcggttggaggagatctccattgttcctacccctccgggccaaatgggccccaggtttccaaggaaggagcaatctgtgactcctaaaatgggttggggccctgccagagttaaagcagtgactggagggtggactggggggttgcagcatctttagacctagatctgtctaactctggggaggcacattgacatttccattacacacagcactgctgcggtgccagggacctagcgcaggacttttggtaatccataaaatggattctgagactgcgacggcaaggctgtcctgtcccccaggcacccaaggatcctgccagacagcacactttggaggaaggtctgcagggagcagctgagccatttgttcttgaactctgggaggcagaagtccccgcacccatcatgcgtggactgataggacatcttttcgtggtgtgcaccagtgctttccacacttgacagtggttggctttgatgaaccctcatgctgcaccttcagagccagtcctctagtttggaataaaaattgcagaggtggtttttgggtctttaccacctgcggctggtggacagcagccagtgtgtctggacacccaggggcattgagactgcatgttgtcacatgaccacttctcttcacacatctgctttcagtgcctggtgaaaaatagaccttggcctaacagtgtgactctctccaccgcctcagtgtagggaagggtccaggccagggaaggagcaccctctagtggaggcgggggtgaattcttaggtcgagctgatgcaagaaactccggtagccagcctctgtgaccttgtacatgagtttggtgtgcctattgtgatttaaaacaggtgggttatcaagaggaacttgagatctctttattacatggacatttacttcagggggaccactgtaagaaaagccaaactccaagaccaagtaagttagaggagtcttgattttttagacttcactgcggagttctgtacaccctttgccctgatgaatttgaatgggtttgatttgcaaatttggatttacacccattgttttggaagcacatcagctgaataaagttgaggtttattttatttagaaaatca

SEQ ID NO: 12674 - DNA, 2220 bp, Homo sapiens
  source 1..2220: mol_type = unassigned DNA
aaccggaaggggggctgtgaggacgtgttccgaggaagccagagccggagccgtggcctgcggggccggcgacatggatcccctgttccagcaaacgcacaagcaggtccacgagatccagtcttgcatgggacgcctggagacggcagacaagcagtctgtgcacatagtagaaaacgaaatccaagcaagcatagaccagatattcagccgtctagaacgtctggagattttgtccagcaaggagccccctaacaaaaggcaaaatgccagacttcgggttgaccagttaaagtatgatgtccagcacctgcagactgcgctcagaaacttccagcatcggcgccatgcaagggagcagcaggagagacagcgagaagagcttctgtctcgaaccttcaccactaacgactctgacaccaccataccaatggacgaatcactgcagtttaactcctccctccagaaagttcacaacggcatggatgacctcattttagatgggcacaatattttagatggactgaggacccagagactgaccttgaaggtggggtccctgctgggggacagagagaaggcctcttgttttagcctcatccaacagtttagtaactgtgtttatattttgattacgtgtcctcaaattgtgatattttgatgacaagacagagcccttgagtttgggatcctttctgttggagttgagttattgtgagcctgaaagtacccagttcctttgccagtgcttgaaacaaaccatgaagtggcctctcttaggatccaggtcttttcccatttactgaacttatcatgaaagtgagtgctactacgaggggtccaatcacaggctgagaaattgtgttacagaatctactcttggaagaatgaagacgtggctgtcctttggtacctcgctttaaggtggctttcccttaggacccctactgtggactgccttataactaaaaccttttgtattttagtaactgaatccccactgtgcagtgttagggctgcctggttgtttgcagtagattagagctttagaagcttctagagcttctaaagcccgtgctggtgatcccagcgactcttcactccctagccttaggtattcctagaagccctgaccagttggcactgctgagactccagcccctgggagtggtttacagaaacattacacagactctgatgtcagtcatgatgtttcagcctctgcccttttcctgtatcaaccctgatggataatagggcgtgggttctgtctgttatcagggtgtggtcccctgtgaatgaagcactcccagccactgagctgtgagaaacagtcactcggaagtgtgagctttatcttagtttttgttggatcatgttgagtctgtcagctccacaggacttcagtacgtttctgaacagtccctgccatctctacgggggagagggtcaggcaagctgcaagtgacactcacctcctgctgacagttgcagtgtctcagatggcctggaagggtggtctccagcagcctgctgggcgctcccctttcatgagagccacctgcagtgacctgaactgatacatgttgattagtctgccctttctttagaaaactgctactctccttttcatatctcagaaaaacagtagaggccttttaggaccaaactccatgtcacactgatgaagagccagtgggggttagagcgtcctgttaaggcacatgctaacttcccactcaagtctggcagcgctggggcatcagcacacctcttgccacccacactgataccagaggggaaggctgtgaggtggctgggggttgagacttgaggtttctaactttcctctgcacacctgtggctacctggtgtttgtctcttgattccctccacctgcctcacaccctgcctccgtcgggattttccacctacaccattcaaaaggaacataggagagggcatgaaggggctaggctgaagcactctgatgactggggccaatttgtggctgaaaatgaatacattttttgaaatttatggtcattttcaagtgatttagaaggttgatccttagcctcatacagtgatgaaataatctgtgtgttcagagccaagcaggactttagcaagagtctgattgtattgtcactatctcggggaaaaaaaaatacaaatacatttctctgatctctgatggcaatgaagtttgacttgtaa

SEQ ID NO: 12675 - DNA, 889 bp, Homo sapiens
  source 1..889: mol_type = unassigned DNA
gctgtgaggacgtgttccgaggaagccagagccggagccgtggcctgcggggccggcgacatggatcccctgttccagcaaacgcacaagcaggtccacgagatccagtcttgcatgggacgcctggagacggcagacaagcagtctgtgcacatagtagaaaacgaaatccaagcaagcatagaccagatattcagccgtctagaacgtctggagattttgtccagcaaggagccccctaacaaaaggcaaaatgccagacttcgggttgaccagttaaagtatgatgtccagcacctgcagactgcgctcagaaacttccagcatcggcgccatgcaagggagcagcaggagagacagcgagaagagcttctgtctcgaaccttcaccactaacgactctgacaccaccataccaatggacgaatcactgcagtttaactcctccctccagaaagttcacaacggcatggatgacctcattttagatgggcacaatattttagatggactgaggacccagagactgaccttgaaggggactcagaagaagatccttgacattgccaacatgctgggcttgtccaacacagtgatgcggctcatcgagaagcgggctttccaggacaagtactttatgatagagacaaggtctcaccatgttgcccagaatggacccgaactcctgagctcaagagatcctcctgcatcagcctcccgaagtgctgggattatagaattctcagagaaaataacttgactgaattacacaaggattcatttgaaggcctgctatccctccagtatttagatttatcctgcaataaaatacagtctattgaaagacatacatttgaaccactaccatttttgaagtttatgtaagttac

SEQ ID NO: 12676 - DNA, 2090 bp, Homo sapiens
  source 1..2090: mol_type = unassigned DNA
gtagaagggcgtcgggcggccgtcgggacggaagccgggaggcgctgccgaccgcgcctgcgacagcgtcagccctgcgcggagcgccggcccgatggcggcggcggcggcgatggccgagcaggagagcgcccggaacggcggccgcaaccgcggcggcgtccagcgtgtggagggcaagctgcgcgccagcgtcgagaagggcgactactacgaggcgcaccagatgtaccggaccctgttcttcaggtacatgtcccagagcaagcacacggaggcccgggagctcatgtactcgggagccctgctcttcttcagccatggccagcaaaacagtgcagcagacttgtccatgctggtcctggagtccctggagaaggcggaagtggaggtggctgacgagctgctggaaaatctggctaaagtgttcagcctgatggaccccaactctcctgagcgcgtgacctttgtgtccagagccctgaagtggtccagtgggggctccgggaagctgggccacccccggctgcaccagctgctggccctcaccctgtggaaagaacaaaactattgtgagtcgaggtatcattttctgcactcagcggacggggagggctgtgccaacatgctggtggagtattccacgtcccgcggcttccgcagcgaggtggacatgttcgtggcccaggccgtgctacagtttctctgtttaaaaaacaaaagtagcgcatcggtggtcttcacgacgtacacccagaagcacccgtccatcgaggacgggcctccgtttgtggagccgctgcttaacttcatctggttcctgctgctggctgtggacggtgggaagctgacggtgttcactgtgctgtgtgagcagtaccagccatccctccggcgggaccccatgtacaacgagtacctcgaccgcataggacagctgttcttcggcgtcccgcccaagcagacgtcttcctacgggggcctgctcgggaaccttctgaccagcctcatgggctcctcagagcaggaggatggggaggagagccccagcgacggcagccccatcgagctggactgaactggccaggccacgtggagacaccacggtcgacgacggctggagggacgtttcagaggcgagtcctgggtggctcctcgccttgggggctcctggccctgaggctggcggtggccgcatgccggcgcgtgtctgtttctgtgcggcggctcagggtggcgcggctgctgctcactgtgctgctgggacccaagagtggggcgtcgcccctgctggccgccgcgtcccccgagattgacccacaataaagcacaggccttaccgcggcgtcaccctctcccactcctttgttctgggtcctttcgggagggctgatgggcagcacaggaggcccgtcctcggggggctgcgcacatcacgctccttgccgggcgtccggcacagctgcggtcaccaaagcaggtgctggccctcggacctgagagcccagccagggcccatgtggtctgcaaatgggagcggctgtttttgaacacggggtcattctgcagtcaggacgaaccggtccccgtcgcagacggagtgcacgtgccctgcgccacatcctcacgctcggtggagggacgcgtgcggcgggacggtgcctacgggtacttgcagctgtgtcccatgtggcatcccagagctgcgccctgctggtctctgtgagcgccacgctgctgtgctggaaatgccgctttaaaaagggataccgtgggactctgcccgtctctttcataacgcaatatttatttgtattgggtgatgattgattctttcgacctaacattttgggttttaaccaaataaccggtccaggagtgagcagctccgttctgtcagatgctactccaaatgttaccagaacgatgacaaaaggggagacgctctattttttcacagttaaatgacagttgtagattgatacgcagttgtgcatgggaaggggaaacgcacagctttatttactgtaaagtggaatttcaggaaggcttgtgtgaaccgttgcgcataaataaaccctttctaccgg

SEQ ID NO: 12677 - DNA, 2251 bp, Homo sapiens
  source 1..2251: mol_type = unassigned DNA
aacaattcaggcccttgtcccaagtaggaggacattccccaagcaggcgggtaaagtctcctcctggtcaagtgctaacgataaagccaccaatccttccaaccgccaggaggactgggaatacataattggcttctgtgatcagatcaacaaggagctggaagggccacagatcgccgtccgactgctggcccacaagatccagtccccacaggaatgggaggcgctccaggccctgacgtacctgggggacagggtgtctgagaaagtgaagaccaaggttattgagctgctgtacagctggaccatggccctgccagaagaagcaaagatcaaagacgcctaccacatgctgaagagacagggcatagtgcagtctgacccaccaattcctgtggataggacgctgatcccctctccaccacctcgtcccaaaaaccctgtttttgatgatgaggagaagtccaagcttttagccaagctgctgaaaagcaaaaacccagatgacctgcaggaggccaacaagctcatcaagtccatggtgaaggaagacgaggcacggatccagaaggtgaccaagcgtctgcacacgttagaggaagttaacaacaacgtgagactgctcagtgagatgctgcttcattacagccaggaggactcttcggacggggacagagagctgatgaaggagctgtttgatcagtgtgagaacaagaggcggactttatttaaactcgccagtgagactgaggacaatgataacagtttgggggacatcctgcaagccagtgacaacctctcccgggtcatcaactcttacaaaacaattattgaagggcaggtcatcaatggcgaggtggctaccttaaccctgcctgactcggaaggaaacagtcagtgcagtaaccaaggcacgctcatcgaccttgcggagctggacacgaccaacagtttgtcctccgtgttggccccagcacctactccaccctcctcaggcatcccaatcctccctccaccaccccaggcctcaggacctccacggagccgctcctctagccaggccgaggccaccctggggcccagcagcacaagcaacgccctctcctggctggacgaggagctactctgcttgggcctcgccgacccagcccctaatgttcctcccaaagagtcagctgggaacagccagtggcacctgctccagagggaacagtccgacctggacttcttcagccccaggccggggaccgctgcctgtggcgcctccgatgctcctctgctccagccctcagccccctcctcaagcagctcccaagctccactgccgcctcccttcccagctcctgtggtcccagccagtgttcctgcccccagtgcgggctcctccttgttttctactggagtggccccagccttggccccaaaagttgagcccgcagtccctgggcaccatggcttggcgttgggcaacagcgcgctgcaccacctggatgccctcgatcagcttctagaagaggccaaagtgacctcgggcttggtgaaacccactacctcccctctcatccccaccaccaccccagccaggcccctcctgcccttctccacggggcccggcagcccgctcttccagccactgagtttccagtcccagggcagccccccgaaggggcctgagctctccctggccagcatccacgtgcccctggaatcgatcaagcctagcagtgcccttcctgtgacagcctacgataaaaacggcttccgcatcctcttccactttgccaaggagtgtcccccaggacgacctgacgtgctggtggtggtggtgtccatgctgaacacggctcccttacctgtcaagagcatcgtgctgcaggctgcagtgcccaagtcaatgaaagtgaagttgcagccaccttctgggacagaactctctccatttagccccatccagccacctgcagccatcacccaggtcatgttgctggccaatccactgaagaagcaggtactcagctttctgggaaaagcgtgcctccagccgtggggacaggccatcctactgactacctcttgcttggcatgaaataaactgctatcctccccttggaatctaccgccactctacatcctactgctttggcctccctctcctctcaccagatggcatgtggtgtggcacctgtggctggacacaggaggcctcaggatcacaaatgttacactagacatatgtcctaatgtgctgccc

SEQ ID NO: 12678 - DNA, 2255 bp, Homo sapiens
  source 1..2255: mol_type = unassigned DNA
acaacaattcaggcccttgtcccaagtaggaggacattccccaagcaggcgggtaaagtctcctcctggtcaagtgctaacgataaagccaccaatccttccaaccgccaggaggactgggaatacataattggcttctgtgatcagatcaacaaggagctggaagggccacagatcgccgtccgactgctggcccacaagatccagtccccacaggaatgggaggcgctccaggccctgacggtgctggaggcatgcatgaagaactgtgggaggagatttcataacgaagtggggaagttccgctttttgaatgagttaatcaaagtcgtctctccaaagtacctgggggacagggtgtctgagaaagtgaagaccaaggttattgagctgctgtacagctggaccatggccctgccagaagaagcaaagatcaaagacgcctaccacatgctgaagagacagggcatagtgcagtctgacccaccaattcctgtggataggacgctgatcccctctccaccacctcgtcccaaaaaccctgtttttgatgatgaggagaagtccaagcttttagccaagctgctgaaaagcaaaaacccagatgacctgcaggaggccaacaagctcatcaagtccatggtgaaggaagacgaggcacggatccagaaggtgaccaagcgtctgcacacgttagaggaagttaacaacaacgtgagactgctcagtgagatgctgcttcattacagccaggaggactcttcggacggggacagagagctgatgaaggagctgtttgatcagtgtgagaacaagaggcggactttatttaaactcgccagtgagactgaggacaatgataacagtttgggggacatcctgcaagccagtgacaacctctcccgggtcatcaactcttacaaaacaattattgaagggcaggtcatcaatggcgaggtggctaccttaaccctgcctgactcggaaggaaacagtcagtgcagtaaccaaggcacgctcatcgaccttgcggagctggacacgaccaacagtttgtcctccgtgttggccccagcacctactccaccctcctcaggcatcccaatcctccctccaccaccccaggcctcaggacctccacggagccgctcctctagccaggccgaggccaccctggggcccagcagcacaagcaacgccctctcctggctggacgaggagctactctgcttgggcctcgccgacccagcccctaatgttcctcccaaagagtcagctgggaacagccagtggcacctgctccagagggaacagtccgacctggacttcttcagccccaggccggggaccgctgcctgtggcgcctccgatgctcctctgctccagccctcagccccctcctcaagcagctcccaagctccactgccgcctcccttcccagctcctgtggtcccagccagtgttcctgcccccagtgcgggctcctccttgttttctactggagtggccccagccttggccccaaaagttgagcccgcagtccctgggcaccatggcttggcgttgggcaacagcgcgctgcaccacctggatgccctcgatcagcttctagaagaggccaaagtgacctcgggcttggtgaaacccactacctcccctctcatccccaccaccaccccagccaggcccctcctgcccttctccacggggcccggcagcccgctcttccagccactgagtttccagtcccagggcagccccccgaaggggcctgagctctccctggccagcatccacgtgcccctggaatcgatcaagcctagcagtgcccttcctgtgacagcctacgataaaaacggcttccgcatcctcttccactttgccaaggagtgtcccccaggacgacctgacgtgctggtggtggtggtgtccatgctgaacacggctcccttacctgtcaagagcatcgtgctgcaggctgcagtgcccaagtcaatgaaagtgaagttgcagccaccttctgggacagaactctctccatttagccccatccagccacctgcagccatcacccaggtcatgttgctggccaatccactgaaggagaaggtgcggcttcggtataagctgaccttcgccctgggggagcagctgagcacagaggtgggcgaggtggaccagttccctcctgtggaacagtgggggaacctatgaccccagaggacgctgtgatctccaccttgaagccaggcagg

SEQ ID NO: 12679 - DNA, 4590 bp, Homo sapiens
  source 1..4590: mol_type = unassigned DNA
ggggcaggctgggaggtgggactgactgagtcttccgtgtgtcgccgccgttgccgcctcagcttcagcctcgttactcctgcggttctgtgactgtgctgctggcgttaacggcgcgaggtgaagggaggtgacggagtgtgcccgcgcgcgcgggggtcccctcagtcccagcagttcccttcgtgcgcggggggcggcgagggtcttcagcagtcgggagaggcccttgacggcgccatgtcggcgggcggtccatgcccagcagcagccggagggggcccagggggcgcctcctgctccgtgggggcccctggcggggtatccatgttccggtggctggaggtgctggagaaggagttcgacaaagcttttgtggatgtggatctgctcctgggagagatcgatccagaccaagcggacatcacttatgaggggcgacagaagatgaccagcctgagctcctgctttgcacagctttgccacaaagcccagtctgtgtctcaaatcaaccacaagctggaggcacagttggtggatctgaaatctgaactgacagaaacccaagcagagaaagttgttttggagaaagaagtacatgatcagcttttacagctgcactctattcagctgcagcttcatgctaaaactggtcaaagtgctgactctggtaccattaaggcaaaattggaaagagagcttgaggcaaacaaaaaagaaaaaatgaaagaagcacaacttgaagctgaagtgaaattgttgagaaaagagaatgaagcccttcgtagacatatagctgttctccaggctgaagtatatggggcgagactagctgccaagtacttggataaggaactggcaggaagggtccaacagatacaattgctaggacgagatatgaagggacctgctcatgataagctttggaaccaattagaagctgaaatacatttgcatcgtcacaaaactgtgatccgagcctgcagaggacgtaatgacttgaaacgaccaatgcaagcaccaccaggccatgatcaagattccctaaagaaaagccaaggtgttggtccaattagaaaagttctcctccttaaggaagatcatgaaggccttggcatttcaattacaggtgggaaagaacatggtgttccaatcctcatctctgagatccatccggggcaacctgctgatagatgcggagggctgcacgttggggatgctattttggcagtcaacggagttaacctaagggacacaaagcataaagaagctgtaactattctttctcagcagagaggagagattgaatttgaagtagtttatgtggctcctgaagtggattctgatgatgaaaacgtagagtatgaagatgagagtggacatcgttaccgtttgtaccttgatgagttagaaggaggtggtaaccctggtgctagttgcaaagacacaagtggggaaatcaaagtattacaaggatttaataagaaggcagtaactgacacacatgaaaatggagacctgggcactgcaagtgaaactccgctagatgacggtgcttcaaaattagatgatctgcacactctgtatcataaaaaatcttattaaattgaccatatctccagacaagattgttaatcagactattctgaatttggggcactggggaagatggtgacaaagactacaaaatcaggggaggctgtttgttgcctaaatgaaaggcgggtacctcagggcttcatgtgaacaattctcaatgcataaaacaccctgttttctgtggtagaccataattagctattgcatgtaaagcaattttgattttcttgaacttgtaagcaccaaagcatgtgtttcccaaaggggtattactgggctcttaagtaccaaatgaaaccctactgttttacttggttccttttccctttagtaggaggacagtgctaactggaattttataaggagtaccctttaaaatacagagagtaagtgaattcatattttatattctagaatgttaactgtggtatttcagaagacagagcttgactcaatgaattgtagaaatataggcttgacttaatttttgtaactgaaaggctttagacttaaaaaaatttattgtgcatcctaaaatctaaaccaattattaatgatcatttattgtaatgagtttgcatttcagctttattcaatgcagtacaaaatagttttctttaagcagtcttttatcaatcaatgctgcactagaaatagattctcaaaagttactaaacattttactttttttgttttttaaaagaaatgcagatgagtgtaaaacatctgttctcaattatgttgatctgtgtgcgcagtactggagcatttacccattcatgttgagcctcaaatgcttgttttctggggtccacaaaagacagttttatacattttgagttgttcataaagtttgtcttgtgatagtcctggcacttaaagacaaatttttctggtagtaaaagttcagatttattactatgtcatgaaacacagtacattcaaatcaaacggcagttttctttctaagtaaatgatttccagtcatctaaaaggtgggcaagatgagataaagacattttgatacagtaattgttttggttgggttttcatgtcagtttatgtttgactaaagctctcttcatatgcaggtttataaatttgttaggtctgttgtcccatgattaaacatggagtgcctcctctctgatttaatattctgcaggtcattgtaacctgctaggcaaagtcacaacattgcattaaagaggtgatagctttgctaatatcactgttttaaaggacgtacagttaaaggaatattaagtgggagaaagcctacaaggcttttagaatattatcagtatcttcatttctggtattcagatgttatgtgataaaacacattttttttggctttcccagatacactatatatttgttcaagggtaaatctataaaatgtatatactttattttgtggttttgctatttataaatttaatgttttaactgttgctcatttatggtttgttttgggtggtggtgttcatctgtatatcaccatgttaatttgtaatggaagtgcacttcgtagtgtatattgttactgacattaaaatactttatagcattgtctctgagcaaaagctagtatttaattgtacaaatgaataagcaagttacatgttattgtttgctcttgacagggtaggcctcttaaaagaaaaaaaacaacttgttttttctttatgaatcccctatgccaaacacataccttccatgcatgacatgagatctgcaaactggattttagccaccgtatttatttagtcaaaaaaattgtccattgtagcagacccgaaaacctttttgctgtgacatgaaaccatgttattcttatcttcttaaaacacagcctgggatggaatggccatggcatttttttcagagaacatcctttatctgctatgactgaatccttaggaaatgtaagctataaccctttgattttcaagaactaccgaataagtgtatgaagaggtggttttttaaaacttcaagttggaatttttatgaggtcactgtgtaatttgaagaattgtgtgagattgtcatgatataaattccttttaaggactgataaatagaatgaaaagtttccaggtagtttaaaactccacaggtcagtttccttttcattcctgcttcactgtggtttataagcctacgggagagcaccgttgctcagatgctactgtgagcttcctgtccggtgttagaaagtaactagttaaaagttcattttagaatgtatggtttttggggatgaactaagaattagttattagttccaaaggactgagaaccaattttaatattttcacatttataggaaagaaattcatatgtccctgaaacttctaggacaaaaccaaacaagtaaggagggaactgttgcaaagccatttcatcgagaaggggacagaaggagaaatacacacatgtatacacaaacagaatggttgagaaaacgttttaataaaatgtgagggttgtatgtgtgcgtgtatatatttacacttaacctctaaaattctcttctacagtatctctgttatgaatatgatggaaaagcaacattttggtggtgagactattgttaaaataaatttgagaaagacgaaaattttgtgagtcttgataattacaagtcaacagctatcgaaagttagcacagcttgtctgtggtgctgtttttttccccactgcagtggacttatgctgttttcatgtttagaaacaaaaaggtttcatgtgattcatgtgtaagatgcacagtatttgacatcctgattatgtaatccctattccatctatccagtcttacacttatggttggcctcaaatctattgcatttatgataatgtattatatctagttgagtttaatatttttttattagcctgtaaataaagatggcatcttctacattaaaatgatattgatctcatttttttaaataaacattttgtttccttgacgttaaa

SEQ ID NO: 12680 - DNA, 4450 bp, Homo sapiens
  source 1..4450: mol_type = unassigned DNA
tcagtcccagcagttcccttcgtgcgcggggggcggcgagggtcttcagcagtcgggagaggcccttgacggcgccatgtcggcgggcggtccatgcccagcagcagccggagggggcccagggggcgcctcctgctccgtgggggcccctggcggggtatccatgttccggtggctggaggtgctggagaaggagttcgacaaagcttttgtggatgtggatctgctcctgggagagatcgatccagaccaagcggacatcacttatgaggggcgacagaagatgaccagcctgagctcctgctttgcacagctttgccacaaagcccagtctgtgtctcaaatcaaccacaagctggaggcacagttggtggatctgaaatctgaactgacagaaacccaagcagagaaagttgttttggagaaagaagtacatgatcagcttttacagctgcactctattcagctgcagcttcatgctaaaactggtcaaagtgctgactctggtaccattaaggcaaaattgtctggcccctctgtggaggagctggaaagagagcttgaggcaaacaaaaaagaaaaaatgaaagaagcacaacttgaagctgaagtgaaattgttgagaaaagagaatgaagcccttcgtagacatatagctgttctccaggctgaagtatatggggcgagactagctgccaagtacttggataaggaactggcaggaagggtccaacagatacaattgctaggacgagatatgaagggacctgctcatgataagctttggaaccaattagaagctgaaatacatttgcatcgtcacaaaactgtgatccgagcctgcagaggacgtaatgacttgaaacgaccaatgcaagcaccaccaggccatgatcaagattccctaaagaaaagccaaggtgttggtccaattagaaaagttctcctccttaaggaagatcatgaaggccttggcatttcaattacaggtgggaaagaacatggtgttccaatcctcatctctgagatccatccggggcaacctgctgatagatgcggagggctgcacgttggggatgctattttggcagtcaacggagttaacctaagggacacaaagcataaagaagctgtaactattctttctcagcagagaggagagattgaatttgaagtagtttatgtggctcctgaagtggattctgatgatgaaaacgtagagtatgaagatgagagtggacatcgttaccgtttgtaccttgatgagttagaaggaggtggtaaccctggtgctagttgcaaagacacaagtggggaaatcaaagtattacaaggatttaataagaaggcagtaactgacacacatgaaaatggagacctgggcactgcaagtgaaactccgctagatgacggtgcttcaaaattagatgatctgcacactctgtatcataaaaaatcttattaaattgaccatatctccagacaagattgttaatcagactattctgaatttggggcactggggaagatggtgacaaagactacaaaatcaggggaggctgtttgttgcctaaatgaaaggcgggtacctcagggcttcatgtgaacaattctcaatgcataaaacaccctgttttctgtggtagaccataattagctattgcatgtaaagcaattttgattttcttgaacttgtaagcaccaaagcatgtgtttcccaaaggggtattactgggctcttaagtaccaaatgaaaccctactgttttacttggttccttttccctttagtaggaggacagtgctaactggaattttataaggagtaccctttaaaatacagagagtaagtgaattcatattttatattctagaatgttaactgtggtatttcagaagacagagcttgactcaatgaattgtagaaatataggcttgacttaatttttgtaactgaaaggctttagacttaaaaaaatttattgtgcatcctaaaatctaaaccaattattaatgatcatttattgtaatgagtttgcatttcagctttattcaatgcagtacaaaatagttttctttaagcagtcttttatcaatcaatgctgcactagaaatagattctcaaaagttactaaacattttactttttttgttttttaaaagaaatgcagatgagtgtaaaacatctgttctcaattatgttgatctgtgtgcgcagtactggagcatttacccattcatgttgagcctcaaatgcttgttttctggggtccacaaaagacagttttatacattttgagttgttcataaagtttgtcttgtgatagtcctggcacttaaagacaaatttttctggtagtaaaagttcagatttattactatgtcatgaaacacagtacattcaaatcaaacggcagttttctttctaagtaaatgatttccagtcatctaaaaggtgggcaagatgagataaagacattttgatacagtaattgttttggttgggttttcatgtcagtttatgtttgactaaagctctcttcatatgcaggtttataaatttgttaggtctgttgtcccatgattaaacatggagtgcctcctctctgatttaatattctgcaggtcattgtaacctgctaggcaaagtcacaacattgcattaaagaggtgatagctttgctaatatcactgttttaaaggacgtacagttaaaggaatattaagtgggagaaagcctacaaggcttttagaatattatcagtatcttcatttctggtattcagatgttatgtgataaaacacattttttttggctttcccagatacactatatatttgttcaagggtaaatctataaaatgtatatactttattttgtggttttgctatttataaatttaatgttttaactgttgctcatttatggtttgttttgggtggtggtgttcatctgtatatcaccatgttaatttgtaatggaagtgcacttcgtagtgtatattgttactgacattaaaatactttatagcattgtctctgagcaaaagctagtatttaattgtacaaatgaataagcaagttacatgttattgtttgctcttgacagggtaggcctcttaaaagaaaaaaaacaacttgttttttctttatgaatcccctatgccaaacacataccttccatgcatgacatgagatctgcaaactggattttagccaccgtatttatttagtcaaaaaaattgtccattgtagcagacccgaaaacctttttgctgtgacatgaaaccatgttattcttatcttcttaaaacacagcctgggatggaatggccatggcatttttttcagagaacatcctttatctgctatgactgaatccttaggaaatgtaagctataaccctttgattttcaagaactaccgaataagtgtatgaagaggtggttttttaaaacttcaagttggaatttttatgaggtcactgtgtaatttgaagaattgtgtgagattgtcatgatataaattccttttaaggactgataaatagaatgaaaagtttccaggtagtttaaaactccacaggtcagtttccttttcattcctgcttcactgtggtttataagcctacgggagagcaccgttgctcagatgctactgtgagcttcctgtccggtgttagaaagtaactagttaaaagttcattttagaatgtatggtttttggggatgaactaagaattagttattagttccaaaggactgagaaccaattttaatattttcacatttataggaaagaaattcatatgtccctgaaacttctaggacaaaaccaaacaagtaaggagggaactgttgcaaagccatttcatcgagaaggggacagaaggagaaatacacacatgtatacacaaacagaatggttgagaaaacgttttaataaaatgtgagggttgtatgtgtgcgtgtatatatttacacttaacctctaaaattctcttctacagtatctctgttatgaatatgatggaaaagcaacattttggtggtgagactattgttaaaataaatttgagaaagacgaaaattttgtgagtcttgataattacaagtcaacagctatcgaaagttagcacagcttgtctgtggtgctgtttttttccccactgcagtggacttatgctgttttcatgtttagaaacaaaaaggtttcatgtgattcatgtgtaagatgcacagtatttgacatcctgattatgtaatccctattccatctatccagtcttacacttatggttggcctcaaatctattgcatttatgataatgtattatatctagttgagtttaatatttttttattagcctgtaaataaagatggcatcttctacattaaaatgatattgatctcatttttttaaataaacattttgtttccttgacgttaaa

SEQ ID NO: 12681 - DNA, 4604 bp, Homo sapiens
  source 1..4604: mol_type = unassigned DNA
gggaggtgggactgactgagtcttccgtgtgtcgccgccgttgccgcctcagcttcagcctcgttactcctgcggttctgtgactgtgctgctggcgttaacggcgcgaggtgaagggaggtgacggagtgtgcccgcgcgcgcgggggtcccctcagtcccagcagttcccttcgtgcgcggggggcggcgagggtcttcagcagtcgggagaggcccttgacggcgccatgtcggcgggcggtccatgcccagcagcagccggagggggcccagggggcgcctcctgctccgtgggggcccctggcggggtatccatgttccggtggctggaggtgctggagaaggagttcgacaaagcttttgtggatgtggatctgctcctgggagagatcgatccagaccaagcggacatcacttatgaggggcgacagaagatgaccagcctgagctcctgctttgcacagctttgccacaaagcccagtctgtgtctcaaatcaaccacaagctggaggcacagttggtggatctgaaatctgaactgacagaaacccaagcagagaaagttgttttggagaaagaagtacatgatcagcttttacagctgcactctattcagctgcagcttcatgctaaaactggtcaaagtgctgactctggtaccattaaggcaaaattggtaagtagaagtagttccaagatggaaagagagcttgaggcaaacaaaaaagaaaaaatgaaagaagcacaacttgaagctgaagtgaaattgttgagaaaagagaatgaagcccttcgtagacatatagctgttctccaggctgaagtatatggggcgagactagctgccaagtacttggataaggaactggcaggaagggtccaacagatacaattgctaggacgagatatgaagggacctgctcatgataagctttggaaccaattagaagctgaaatacatttgcatcgtcacaaaactgtgatccgagcctgcagaggacgtaatgacttgaaacgaccaatgcaagcaccaccaggccatgatcaagattccctaaagaaaagccaaggtgttggtccaattagaaaagttctcctccttaaggaagatcatgaaggccttggcatttcaattacaggtgggaaagaacatggtgttccaatcctcatctctgagatccatccggggcaacctgctgatagatgcggagggctgcacgttggggatgctattttggcagtcaacggagttaacctaagggacacaaagcataaagaagctgtaactattctttctcagcagagaggagagattgaatttgaagtagtttatgtggctcctgaagtggattctgatgatgaaaacgtagagtatgaagatgagagtggacatcgttaccgtttgtaccttgatgagttagaaggaggtggtaaccctggtgctagttgcaaagacacaagtggggaaatcaaagtattacaaggatttaataagaaggcagtaactgacacacatgaaaatggagacctgggcactgcaagtgaaactccgctagatgacggtgcttcaaaattagatgatctgcacactctgtatcataaaaaatcttattaaattgaccatatctccagacaagattgttaatcagactattctgaatttggggcactggggaagatggtgacaaagactacaaaatcaggggaggctgtttgttgcctaaatgaaaggcgggtacctcagggcttcatgtgaacaattctcaatgcataaaacaccctgttttctgtggtagaccataattagctattgcatgtaaagcaattttgattttcttgaacttgtaagcaccaaagcatgtgtttcccaaaggggtattactgggctcttaagtaccaaatgaaaccctactgttttacttggttccttttccctttagtaggaggacagtgctaactggaattttataaggagtaccctttaaaatacagagagtaagtgaattcatattttatattctagaatgttaactgtggtatttcagaagacagagcttgactcaatgaattgtagaaatataggcttgacttaatttttgtaactgaaaggctttagacttaaaaaaatttattgtgcatcctaaaatctaaaccaattattaatgatcatttattgtaatgagtttgcatttcagctttattcaatgcagtacaaaatagttttctttaagcagtcttttatcaatcaatgctgcactagaaatagattctcaaaagttactaaacattttactttttttgttttttaaaagaaatgcagatgagtgtaaaacatctgttctcaattatgttgatctgtgtgcgcagtactggagcatttacccattcatgttgagcctcaaatgcttgttttctggggtccacaaaagacagttttatacattttgagttgttcataaagtttgtcttgtgatagtcctggcacttaaagacaaatttttctggtagtaaaagttcagatttattactatgtcatgaaacacagtacattcaaatcaaacggcagttttctttctaagtaaatgatttccagtcatctaaaaggtgggcaagatgagataaagacattttgatacagtaattgttttggttgggttttcatgtcagtttatgtttgactaaagctctcttcatatgcaggtttataaatttgttaggtctgttgtcccatgattaaacatggagtgcctcctctctgatttaatattctgcaggtcattgtaacctgctaggcaaagtcacaacattgcattaaagaggtgatagctttgctaatatcactgttttaaaggacgtacagttaaaggaatattaagtgggagaaagcctacaaggcttttagaatattatcagtatcttcatttctggtattcagatgttatgtgataaaacacattttttttggctttcccagatacactatatatttgttcaagggtaaatctataaaatgtatatactttattttgtggttttgctatttataaatttaatgttttaactgttgctcatttatggtttgttttgggtggtggtgttcatctgtatatcaccatgttaatttgtaatggaagtgcacttcgtagtgtatattgttactgacattaaaatactttatagcattgtctctgagcaaaagctagtatttaattgtacaaatgaataagcaagttacatgttattgtttgctcttgacagggtaggcctcttaaaagaaaaaaaacaacttgttttttctttatgaatcccctatgccaaacacataccttccatgcatgacatgagatctgcaaactggattttagccaccgtatttatttagtcaaaaaaattgtccattgtagcagacccgaaaacctttttgctgtgacatgaaaccatgttattcttatcttcttaaaacacagcctgggatggaatggccatggcatttttttcagagaacatcctttatctgctatgactgaatccttaggaaatgtaagctataaccctttgattttcaagaactaccgaataagtgtatgaagaggtggttttttaaaacttcaagttggaatttttatgaggtcactgtgtaatttgaagaattgtgtgagattgtcatgatataaattccttttaaggactgataaatagaatgaaaagtttccaggtagtttaaaactccacaggtcagtttccttttcattcctgcttcactgtggtttataagcctacgggagagcaccgttgctcagatgctactgtgagcttcctgtccggtgttagaaagtaactagttaaaagttcattttagaatgtatggtttttggggatgaactaagaattagttattagttccaaaggactgagaaccaattttaatattttcacatttataggaaagaaattcatatgtccctgaaacttctaggacaaaaccaaacaagtaaggagggaactgttgcaaagccatttcatcgagaaggggacagaaggagaaatacacacatgtatacacaaacagaatggttgagaaaacgttttaataaaatgtgagggttgtatgtgtgcgtgtatatatttacacttaacctctaaaattctcttctacagtatctctgttatgaatatgatggaaaagcaacattttggtggtgagactattgttaaaataaatttgagaaagacgaaaattttgtgagtcttgataattacaagtcaacagctatcgaaagttagcacagcttgtctgtggtgctgtttttttccccactgcagtggacttatgctgttttcatgtttagaaacaaaaaggtttcatgtgattcatgtgtaagatgcacagtatttgacatcctgattatgtaatccctattccatctatccagtcttacacttatggttggcctcaaatctattgcatttatgataatgtattatatctagttgagtttaatatttttttattagcctgtaaataaagatggcatcttctacattaaaatgatattgatctcatttttttaaataaacattttgtttccttgacgttaaa

SEQ ID NO: 12682 - DNA, 2528 bp, Homo sapiens
  source 1..2528: mol_type = unassigned DNA
tgggggccggtggcggatggagcccgcgatggagccggagactctggaggcgcgaatcaatagagccacgaaccccctgaacaaggagctcgactgggccagcatcaacggcttctgcgagcagctcaacgaggactttgaggggcctccactcgccacccggctgctggcccacaagatccagtccccacaggagtgggaggcgatccaggccttgacggtgctggaaacatgcatgaagagctgcggcaagcggttccacgacgaagtgggcaagttccgctttctcaacgagctcatcaaggtcgtgtctcccaagtatctgggctctcggacatcggagaaggtgaagaacaagatcttggagctcctctacagctggacagtgggcctgcccgaggaggtgaaaatcgcagaggcctaccagatgctaaagaagcaggggattgtaaagtccgaccccaagcttccagatgacactacctttccccttcctcctccacggccgaagaatgtgatctttgaagatgaggagaaatccaagatgctggcccgcctgctgaagagctcccatcccgaagacctccgcgcagccaataagctcatcaaagagatggtgcaggaggaccagaagcggatggagaagatctcgaagagggtgaatgccatcgaggaggtgaacaacaatgtgaaactgctcacggagatggtgatgagccacagccagggcggcgcagcagctggcagcagcgaggacctcatgaaggaactgtaccagcgctgtgagcggatgcggcccacgctcttccgactggcgagtgacacagaggacaatgatgaggccttaggcctcagtgaccccacacccccttcaggcccaagcctggatggtaccggatggaacagcttccagtcgtcggatgccactgagcccccagcccctgctctggcccaggcccccagtatggaaagccgacccccagcgcagacatccctgccagcaagcagcggtctggacgacctagacctcctggggaagaccctcctgcagcagtcgctgcccccggaatcccagcaagtgcggtgggagaagcagcagccaaccccccggctcacactccgggacctgcagaataagagcagcagctgcagctcccccagctccagcgccaccagccttctccacaccgtgtccccagagccccccaggcctccgcagcagcccgtaccaaccgagctctcactggccagcatcactgtgcccctggagtccatcaaacccagcaacatcctgcccgtgactgtgtatgaccagcacggcttccgcatcctcttccattttgcccgggacccactgccagggcgctccgacgtgctggtggtggtggtttccatgctgagcaccgccccccagcccatccgcaacatcgtgttccagtcagctgtccccaaggttatgaaggtgaagctgcagccaccctcgggcacggagctgccagcttttaaccccatcgtccacccctcagcaatcacccaggtcctgctgcttgccaacccccagaaggagaaggttcgcctccgctacaagctcaccttcaccatgggtgaccagacctacaacgagatgggggatgtggaccagttccccccacctgaaacctggggtagcctctagaacagaggggctggggagaggaaggggcagagggaccggtcactgtccagcctggagggaggcattggtggccaaggacaccctttgttgcccatggccattcacccccaggcctggtgcttctccccacacccctgtaggcctcaagtgactcttccccctcctgctccggccccgcccctgctgagccaaacccagtaggaggctgggcctgggtttgtgccgctggggtctccatcaccgggacctggagagggaggggctgtgtagccttggaagaacttgggtcatggggaggaagcacagctgttggggaagggccaggacctcaggcccagccccaaccccagctggggtggggtcttccccacctgtctcttatgccttatgggaaggcccagccataactcgggggccatgctggagctggggaccagcttaggcctcctccataggaacccagtgactggggggtgacgcctacacccccagctatttgcactctggtgtgtggtttgactctgcttttcttccggattggccctgtggtcacagcctcagggggccaggctgggggaacctcacctggcccgtactcctgggggtttccctttgccattgggccccctgagggactgtgggggctcaagggtaatgccagaggcccatggccccagcgaggggctgtggggcacctagagttctcggtgtgtctccttcattcattggcctctgctggggcctcctatgggtgtcttacgtctgtccatccatctgtccgtggtcagaagtggggtcagtgtgtgagtgagagcaggagtatttatgaaaataaaacgtcgtttttcctgga

SEQ ID NO: 12683 - DNA, 946 bp, Homo sapiens
  source 1..946: mol_type = unassigned DNA
ccaaggtgggcggatcacaaggtcaggagattgagaccatcctggctaacatggtgaaaccctgtctctactaaaaatacaaaaaaaaattagccgggcgtggtggcgggtgcctgtagtcccagctactcgggaggctgaggaaggagaatggcatgaacctgggaggcggagcttgcagtgagccgagatcgtgccactgcactccagcctgggcaacagcgtgagactcgtctcaaaaaaaaaaaaaaatccatatttcattccagctttacaagatggggaaatggaggttcagggaagcatgtaagctagattgttgtttaaccagtattgggggttaaaggggtagctgtctggtcgtgtttacaccacttcatgtagacctgttggccctctttccttgccactatccatttctggattcagtcttccccagaacctcaccctttgcctgccctcagctgactgctcattcatttgccaaggggagacaggtgtggacatgagtggctgggatgcagtgccgtagcaggctgggggacacaaaagagaactgacccagcactgctaccctgggcaggagtagaggattagagaaggggacaccggagccactcccaagggaatgaaggctttctgaacctggtgtgatgatagagccacgaaccccctgaacaaggagctcgactgggccagcatcaacggcttctgcgagcagctcaacgaggactttgaggggcctccactcgccacccggctgctggcccacaagatccagtccccacaggagtgggaggcgatccaggccttgacggtgctggaaacatgcatgaagagctgcggcaagcggttccacgacgaagtgggcaagttccgctttctcaacgagctcatcaaggtcgtgtctcccaagtatctgggctctcggacatcggagaaggtg

SEQ ID NO: 12684 - DNA, 2688 bp, Homo sapiens
  source 1..2688: mol_type = unassigned DNA
gggggccggtggcggatggagcccgcgatggagccggagactctggaggcgcgaatcaatagagccacgaaccccctgaacaaggagctcgactgggccagcatcaacggcttctgcgagcagctcaacgaggactttgaggggcctccactcgccacccggctgctggcccacaagatccagtccccacaggagtgggaggcgatccaggccttgacgtatctgggctctcggacatcggagaaggtgaagaacaagatcttggagctcctctacagctggacagtgggcctgcccgaggaggtgaaaatcgcagaggcctaccagatgctaaagaagcaggggattgtaaagtccgaccccaagcttccagatgacactacctttccccttcctcctccacggccgaagaatgtgatctttgaagatgaggagaaatccaagatgctggcccgcctgctgaagagctcccatcccgaagacctccgcgcagccaataagctcatcaaagagatggtgcaggaggaccagaagcggatggagaagatctcgaagagggtgaatgccatcgaggaggtgaacaacaatgtgaaactgctcacggagatggtgatgagccacagccagggcggcgcagcagctggcagcagcgaggacctcatgaaggaactgtaccagcgctgtgagcggatgcggcccacgctcttccgactggcgagtgacacagaggacaatgatgaggccttagcggagatcctgcaggccaatgacaacctcacccaggtgatcaacctgtataagcagctggtgcggggtgaggaggtcaacggtgatgccacagccggctccatccctgggagcacctcggccctgctggatctctcaggcctggatctcccgcctgcgggcaccacctacccagctatgcccacccgccctggcgagcaggccagccctgagcagcccagtgcctcagtttccctgcttgacgacgagctcatgtctctgggcctcagtgaccccacacccccttcaggcccaagcctggatggtaccggatggaacagcttccagtcgtcggatgccactgagcccccagcccctgctctggcccaggcccccagtatggaaagccgacccccagcgcagacatccctgccagcaagcagcggtctggacgacctagacctcctggggaagaccctcctgcagcagtcgctgcccccggaatcccagcaagtgcggtgggagaagcagcagccaaccccccggctcacactccgggacctgcagaataagagcagcagctgcagctcccccagctccagcgccaccagccttctccacaccgtgtccccagagccccccaggcctccgcagcagcccgtaccaaccgagctctcactggccagcatcactgtgcccctggagtccatcaaacccagcaacatcctgcccgtgactgtgtatgaccagcacggcttccgcatcctcttccattttgcccgggacccactgccagggcgctccgacgtgctggtggtggtggtttccatgctgagcaccgccccccagcccatccgcaacatcgtgttccagtcagctgtccccaaggttatgaaggtgaagctgcagccaccctcgggcacggagctgccagcttttaaccccatcgtccacccctcagcaatcacccaggtcctgctgcttgccaacccccagaaggagaaggttcgcctccgctacaagctcaccttcaccatgggtgaccagacctacaacgagatgggggatgtggaccagttccccccacctgaaacctggggtagcctctagaacagaggggctggggagaggaaggggcagagggaccggtcactgtccagcctggagggaggcattggtggccaaggacaccctttgttgcccatggccattcacccccaggcctggtgcttctccccacacccctgtaggcctcaagtgactcttccccctcctgctccggccccgcccctgctgagccaaacccagtaggaggctgggcctgggtttgtgccgctggggtctccatcaccgggacctggagagggaggggctgtgtagccttggaagaacttgggtcatggggaggaagcacagctgttggggaagggccaggacctcaggcccagccccaaccccagctggggtggggtcttccccacctgtctcttatgccttatgggaaggcccagccataactcgggggccatgctggagctggggaccagcttaggcctcctccataggaacccagtgactggggggtgacgcctacacccccagctatttgcactctggtgtgtggtttgactctgcttttcttccggattggccctgtggtcacagcctcagggggccaggctgggggaacctcacctggcccgtactcctgggggtttccctttgccattgggccccctgagggactgtgggggctcaagggtaatgccagaggcccatggccccagcgaggggctgtggggcacctagagttctcggtgtgtctccttcattcattggcctctgctggggcctcctatgggtgtcttacgtctgtccatccatctgtccgtggtcagaagtggggtcagtgtgtgagtgagagcaggagtatttatgaaaataaaacgtcgtttttcctgg

SEQ ID NO: 12685 - DNA, 3159 bp, Homo sapiens
  source 1..3159: mol_type = unassigned DNA
gaagtggcctcagagcccctcagcaacatgcccgcagagaattcttccggaggcggtcacagacatctccgtgacgcagaacgagttagagcgtcccttggggtttccatggtgctgcccttagcctgcagtatctccacttcctctcccgcctgagcgccgggaacggaaaagcaggcggccggtcccagctgcgacgtagacgccgcgtgggggtggggttgggcgagtaggtgacgctctaggcgagctcgttggcctctctatggtgccgagcgcgcccgttcggacgttgcccctttaatcggcagagggcggtgcccaggaggtcccgcgagagctgcggggggcgggggggcggtgccgaggctgggggccggtggcggatggagcccgcgatggagccggagactctggaggcgcgaatcaatagagccacgaaccccctgaacaaggagctcgactgggccagcatcaacggcttctgcgagcagctcaacgaggactttgaggggcctccactcgccacccggctgctggcccacaagatccagtccccacaggagtgggaggcgatccaggccttgacggtgctggaaacatgcatgaagagctgcggcaagcggttccacgacgaagtgggcaagttccgctttctcaacgagctcatcaaggtcgtgtctcccaagtatctgggctctcggacatcggagaaggtgaagaacaagatcttggagctcctctacagctggacagtgggcctgcccgaggaggtgaaaatcgcagaggcctaccagatgctaaagaagcaggggattgtaaagtccgaccccaagcttccagatgacactacctttccccttcctcctccacggccgaagaatgtgatctttgaagatgaggagaaatccaagatgctggcccgcctgctgaagagctcccatcccgaagacctccgcgcagccaataagctcatcaaagagatggtgcaggaggaccagaagcggatggagaagatctcgaagagggtgaatgccatcgaggaggtgaacaacaatgtgaaactgctcacggagatggtgatgagccacagccagggcggcgcagcagctggcagcagcgaggacctcatgaaggaactgtaccagcgctgtgagcggatgcggcccacgctcttccgactggcgagtgacacagaggacaatgatgaggccttagcggagatcctgcaggccaatgacaacctcacccaggtgatcaacctgtataagcagctggtgcggggtgaggaggtcaacggtgatgccacagccggctccatccctgggagcacctcggccctgctggatctctcaggcctggatctcccgcctgcgggcaccacctacccagctatgcccacccgccctggcgagcaggccagccctgagcagcccagtgcctcagtttccctgcttgacgacgagctcatgtctctgggcctcagtgaccccacacccccttcaggcccaagcctggatggtaccggatggaacagcttccagtcgtcggatgccactgagcccccagcccctgctctggcccaggcccccagtatggaaagccgacccccagcgcagacatccctgccagcaagcagcggtctggacgacctagacctcctggggaagaccctcctgcagcagtcgctgcccccggaatcccagcaagtgcggtgggagaagcagcagccaaccccccggctcacactccgggacctgcagaataagagcagcagctgcagctcccccagctccagcgccaccagccttctccacaccgtgtccccagagccccccaggcctccgcagcagcccgtaccaaccgagctctcactggccagcatcactgtgcccctggagtccatcaaacccagcaacatcctgcccgtgactgtgtatgaccagcacggcttccgcatcctcttccattttgcccgggacccactgccagggcgctccgacgtgctggtggtggtggtttccatgctgagcaccgccccccagcccatccgcaacatcgtgttccagtcagctgtccccaaggttatgaaggtgaagctgcagccaccctcgggcacggagctgccagcttttaaccccatcgtccacccctcagcaatcacccaggtcctgctgcttgccaacccccagaaggagaaggttcgcctccgctacaagctcaccttcaccatgggtgaccagacctacaacgagatgggggatgtggaccagttccccccacctgaaacctggggtagcctctagaacagaggggctggggagaggaaggggcagagggaccggtcactgtccagcctggagggaggcattggtggccaaggacaccctttgttgcccatggccattcacccccaggcctggtgcttctccccacacccctgtaggcctcaagtgactcttccccctcctgctccggccccgcccctgctgagccaaacccagtaggaggctgggcctgggtttgtgccgctggggtctccatcaccgggacctggagagggaggggctgtgtagccttggaagaacttgggtcatggggaggaagcacagctgttggggaagggccaggacctcaggcccagccccaaccccagctggggtggggtcttccccacctgtctcttatgccttatgggaaggcccagccataactcgggggccatgctggagctggggaccagcttaggcctcctccataggaacccagtgactggggggtgacgcctacacccccagctatttgcactctggtgtgtggtttgactctgcttttcttccggattggccctgtggtcacagcctcagggggccaggctgggggaacctcacctggcccgtactcctgggggtttccctttgccattgggccccctgagggactgtgggggctcaagggtaatgccagaggcccatggccccagcgaggggctgtggggcacctagagttctcggtgtgtctccttcattcattggcctctgctggggcctcctatgggtgtcttacgtctgtccatccatctgtccgtggtcagaagtggggtcagtgtgtgagtgagagcaggagtatttatgaaaataaaacgtcgtttttcctgga

SEQ ID NO: 12686 - DNA, 2107 bp, Homo sapiens
  source 1..2107: mol_type = unassigned DNA
ctcgttggcctctctatggtgccgagcgcgcccgttcggacgttgcccctttaatcggcagagggcggtgcccaggaggtcccgcgagagctgcggggggcgggggggcggtgccgaggctgggggccggtggcggatggagcccgcgatggagccggagactctggaggcgcgaatcaatagagccacgaaccccctgaacaaggagctcgactgggccagcatcaacggcttctgcgagcagctcaacgaggactttgaggggcctccactcgccacccggctgctggcccacaagatccagtccccacaggagtgggaggcgatccaggccttgacggtgagaaggggagaggccaccatccgtcccccgccatgtgacgacaccaaggtgctggaaacatgcatgaagagctgcggcaagcggttccacgacgaagtgggcaagttccgctttctcaacgagctcatcaaggtcgtgtctcccaagtatctgggctctcggacatcggagaaggtgaagaacaagatcttggagctcctctacagctggacagtgggcctgcccgaggaggtgaaaatcgcagaggcctaccagatgctaaagaagcaggggattgtaaagtccgaccccaagcttccagatgacactacctttccccttcctcctccacggccgaagaatgtgatctttgaagatgaggagaaatccaagatgctggcccgcctgctgaagagctcccatcccgaagacctccgcgcagccaataagctcatcaaagagatggtgcaggaggaccagaagcggatggagaagatctcgaagagggtgaatgccatcgaggaggtgaacaacaatgtgaaactgctcacggagatggtgatgagccacagccagggcggcgcagcagctggcagcagcgaggacctcatgaaggaactgtaccagcgctgtgagcggatgcggcccacgctcttccgactggcgagtgacacagaggacaatgatgaggccttagcggagatcctgcaggccaatgacaacctcacccaggtgatcaacctgtataagcagctggtgcggggtgaggaggtcaacggtgatgccacagccggctccatccctgggagcacctcggccctgctggatctctcaggcctggatctcccgcctgcgggcaccacctacccagctatgcccacccgccctggcgagcaggccagccctgagcagcccagtgcctcagtttccctgcttgacgacgagctcatgtctctgggcctcagtgaccccacacccccttcaggcccaagcctggatggtaccggatggaacagcttccagtcgtcggatgccactgagcccccagcccctgctctggcccaggcccccagtatggaaagccgacccccagcgcagacatccctgccagcaagcagcggtctggacgacctagacctcctggggaagaccctcctgcagcagtcgctgcccccggaatcccagcaagtgcggtgggagaagcagcagccaaccccccggctcacactccgggacctgcagaataagagcagcagctgcagctcccccagctccagcgccaccagccttctccacaccgtgtccccagagccccccaggcctccgcagcagcccgtaccaaccgagctctcactggccagcatcactgtgcccctggagtccatcaaacccagcaacatcctgcccgtgactgtgtatgaccagcacggcttccgcatcctcttccattttgcccgggacccactgccagggcgctccgacgtgctggtggtggtggtttccatgctgagcaccgccccccagcccatccgcaacatcgtgttccagtcagctgtccccaaggttatgaaggtgaagctgcagccaccctcgggcacggagctgccagcttttaaccccatcgtccacccctcagcaatcacccaggtcctgctgcttgccaacccccagaaggagaaggttcgcctccgctacaagctcaccttcaccatgggtgaccagacctacaacgagatgggggatgtggaccagttccccccacctgaaacctggggtagcctctag

SEQ ID NO: 12687 - DNA, 3205 bp, Homo sapiens
  source 1..3205: mol_type = unassigned DNA
agtcggcccctcagaccctggagcgatggaggaccccggccccggcgcggtccagcggtgggagcgggcgccgcccacctgtcggatccctgggccatgacccctgggacggcgagtgagctgcgccgggaacccccgggacggagagagcagcctccaacccccaaggctcacattgcttcacggagtagcggcccggggaaggagcacgcgagcggttccccggggttgcatctcacacccgggagggagggaccctactattttcaggccccgaatcctccactctctggccctgcatggcgttcctggagcccgtgtggacatgagtggctgggatgcagtgccgtagcaggctgggggacacaaaagagaactgacccagcactgctaccctgggcaggagtagaggattagagaaggggacaccggagccactcccaagggaatgaaggctttctgaacctggtgtgatgatagagccacgaaccccctgaacaaggagctcgactgggccagcatcaacggcttctgcgagcagctcaacgaggactttgaggggcctccactcgccacccggctgctggcccacaagatccagtccccacaggagtgggaggcgatccaggccttgacggtgctggaaacatgcatgaagagctgcggcaagcggttccacgacgaagtgggcaagttccgctttctcaacgagctcatcaaggtcgtgtctcccaagtatctgggctctcggacatcggagaaggtgaagaacaagatcttggagctcctctacagctggacagtgggcctgcccgaggaggtgaaaatcgcagaggcctaccagatgctaaagaagcaggggattgtaaagtccgaccccaagcttccagatgacactacctttccccttcctcctccacggccgaagaatgtgatctttgaagatgaggagaaatccaagatgctggcccgcctgctgaagagctcccatcccgaagacctccgcgcagccaataagctcatcaaagagatggtgcaggaggaccagaagcggatggagaagatctcgaagagggtgaatgccatcgaggaggtgaacaacaatgtgaaactgctcacggagatggtgatgagccacagccagggcggcgcagcagctggcagcagcgaggacctcatgaaggaactgtaccagcgctgtgagcggatgcggcccacgctcttccgactggcgagtgacacagaggacaatgatgaggccttagcggagatcctgcaggccaatgacaacctcacccaggtgatcaacctgtataagcagctggtgcggggtgaggaggtcaacggtgatgccacagccggctccatccctgggagcacctcggccctgctggatctctcaggcctggatctcccgcctgcgggcaccacctacccagctatgcccacccgccctggcgagcaggccagccctgagcagcccagtgcctcagtttccctgcttgacgacgagctcatgtctctgggcctcagtgaccccacacccccttcaggcccaagcctggatggtaccggatggaacagcttccagtcgtcggatgccactgagcccccagcccctgctctggcccaggcccccagtatggaaagccgacccccagcgcagacatccctgccagcaagcagcggtctggacgacctagacctcctggggaagaccctcctgcagcagtcgctgcccccggaatcccagcaagtgcggtgggagaagcagcagccaaccccccggctcacactccgggacctgcagaataagagcagcagctgcagctcccccagctccagcgccaccagccttctccacaccgtgtccccagagccccccaggcctccgcagcagcccgtaccaaccgagctctcactggccagcatcactgtgcccctggagtccatcaaacccagcaacatcctgcccgtgactgtgtatgaccagcacggcttccgcatcctcttccattttgcccgggacccactgccagggcgctccgacgtgctggtggtggtggtttccatgctgagcaccgccccccagcccatccgcaacatcgtgttccagtcagctgtccccaaggttatgaaggtgaagctgcagccaccctcgggcacggagctgccagcttttaaccccatcgtccacccctcagcaatcacccaggtcctgctgcttgccaacccccagaaggagaaggttcgcctccgctacaagctcaccttcaccatgggtgaccagacctacaacgagatgggggatgtggaccagttccccccacctgaaacctggggtagcctctagaacagaggggctggggagaggaaggggcagagggaccggtcactgtccagcctggagggaggcattggtggccaaggacaccctttgttgcccatggccattcacccccaggcctggtgcttctccccacacccctgtaggcctcaagtgactcttccccctcctgctccggccccgcccctgctgagccaaacccagtaggaggctgggcctgggtttgtgccgctggggtctccatcaccgggacctggagagggaggggctgtgtagccttggaagaacttgggtcatggggaggaagcacagctgttggggaagggccaggacctcaggcccagccccaaccccagctggggtggggtcttccccacctgtctcttatgccttatgggaaggcccagccataactcgggggccatgctggagctggggaccagcttaggcctcctccataggaacccagtgactggggggtgacgcctacacccccagctatttgcactctggtgtgtggtttgactctgcttttcttccggattggccctgtggtcacagcctcagggggccaggctgggggaacctcacctggcccgtactcctgggggtttccctttgccattgggccccctgagggactgtgggggctcaagggtaatgccagaggcccatggccccagcgaggggctgtggggcacctagagttctcggtgtgtctccttcattcattggcctctgctggggcctcctatgggtgtcttacgtctgtccatccatctgtccgtggtcagaagtggggtcagtgtgtgagtgagagcaggagtatttatgaaaataaaacgtcgtttttcctgg

SEQ ID NO: 12688 - DNA, 661 bp, Homo sapiens
  source 1..661: mol_type = unassigned DNA
gggccccttcccggcgggggcggggtacgggtcgccccctcctcacgccccgcccccggcccgggaggggcggtgtcctcagtcggcccctcagaccctggagcgatggaggaccccggccccggcgcggtccagcggtgggagcgggcgccgcccacctgtcggatccctgggccatgacccctgggacggcgagggagacaggtgtggacatgagtggctgggatgcagtgccgtagcaggctgggggacacaaaagagaactgacccagcactgctaccctgggcaggagtagaggattagagaaggggacaccggagccactcccaagggaatgaaggctttctgaacctggtgtgatgatagagccacgaaccccctgaacaaggagctcgactgggccagcatcaacggcttctgcgagcagctcaacgaggactttgaggggcctccactcgccacccggctgctggcccacaagatccagtccccacaggagtgggaggcgatccaggccttgacggtgctggaaacatgcatgaagagctgcggcaagcggttccacgacgaagtgggcaagttccgctttctcaacgagctcatcaaggtcgtgtctcccaagtatctgggctctcggacatcggagaaggtgaagaacaa

SEQ ID NO: 12689 - DNA, 565 bp, Homo sapiens
  source 1..565: mol_type = unassigned DNA
ctctaaaagtggggccctttggagggcagctgtgctcatctgtctgtctacacccacaatcagatagagccacgaaccccctgaacaaggagctcgactgggccagcatcaacggcttctgcgagcagctcaacgaggactttgaggggcctccactcgccacccggctgctggcccacaagatccagtccccacaggagtgggaggcgatccaggccttgacggtgctggaaacatgcatgaagagctgcggcaagcggttccacgacgaagtgggcaagttccgctttctcaacgagctcatcaaggtcgtgtctcccaagtatctgggctctcggacatcggagaaggtgaagaacaagatcttggagctcctctacagctggacagtgggcctgcccgaggaggtgaaaatcgcagaggcctaccagatgctaaagaagcaggggattgtaaagtccgaccccaagcttccagatgacactacctttccccttcctcctccacggccgaagaatgtgatctttgaagatgaggagaaatccaagatgctggcccgcctgct

SEQ ID NO: 12690 - DNA, 1714 bp, Homo sapiens
  source 1..1714: mol_type = unassigned DNA
ggaagtggcctcagagcccctcagcaacatgcccgcagagaattcttccggaggcggtcacagacatctccgtgacgcagaacgagttagagcgtcccttggggtttccatggtgctgcccttagcctgcagtatctccacttcctctcccgcctgagcgccgggaacggaaaagcaggcggccggtcccagctgcgacgtagacgccgcgtgggggtggggttgggcgagtaggtgacgctctaggcgagctcgttggcctctctatggtgccgagcgcgcccgttcggacgttgcccctttaatcggcagagggcggtgcccaggaggtcccgcgagagctgcggggggcgggggggcggtgccgaggctgggggccggtggcggatggagcccgcgatggagccggagactctggaggcgcgaatcaatagagccacgaaccccctgaacaaggagctcgactgggccagcatcaacggcttctgcgagcagctcaacgaggactttgaggggcctccactcgccacccggctgctggcccacaagatccagtccccacaggagtgggaggcgatccaggccttgacggtgagaaggggagaggccaccatccgtcccccgccatgtgacgacaccaagggaggccaagactgaggttcttggggtccataaggctcttcagagcccaagagagttgtgctaagatggcccaggatggaggtccgggcctgccccaagggtcccaccacagccagcgggctggcctcccaccccagcatccatacacgtaggcctgttgctgagggaaggccctctagggtcatctggtccaggggttctttgcttcagctgcacatcggctgcctctccaggaagcgtgttcaacacatggaatcagggctccacccagacctgccgaggccacactcctggagtatctgcatccagagatctgcacgtttgtaaagctaaggggtggtgcttgggctcaggcctgaggttttgcatctgttcaatagcagaggagagaggggtgtactgtctgtggcccccagcatgggccacataccaacccaccatggagcaaagctgattttaagtggtggtagagatacagtttctcttttaatacttacgtgtttagttgggtgcagtggcttatacctgtaatttcagcacttggggaggccaaggcaggaggcttgcttgaggcaaggagttcaaggctacagtgagctatgattgtgccactgtactccagactggacaacagagtgagaccccatctctaaataataatcattattgttacatatttgttttaacatttttttctcaagtataactagtcctatgatttcatagatgtagcttaggataaggccaaggtaggtgttgcctatataaggtttttttaaaaaaggaaaaataggccgggctggtggctcacgcctgtaatcccagcactttggcaggctgaggcgggcagatcacctgagatcaggagttcaagatcagcctgaccaacatggagaagccccatgtctactaaaaataaaaaattagcgaggcgtggtgggcgggcgcctgtaatcccagctacttgggaggctgaggcagaagaatcatttgaacccaggaggcagaggttacagtgagccgagatcgtgctactgcattccaacctgggcaacaagagtgaaactctgtc

SEQ ID NO: 12691 - DNA, 559 bp, Homo sapiens
  source 1..559: mol_type = unassigned DNA
gtggaagagcaggaatcccactgccgggccacaatgaccccagctctcctcttccagatagagccacgaaccccctgaacaaggagctcgactgggccagcatcaacggcttctgcgagcagctcaacgaggactttgaggggcctccactcgccacccggctgctggcccacaagatccagtccccacaggagtgggaggcgatccaggccttgacggtgctggaaacatgcatgaagagctgcggcaagcggttccacgacgaagtgggcaagttccgctttctcaacgagctcatcaaggtcgtgtctcccaagtatctgggctctcggacatcggagaaggtgaagaacaagatcttggagctcctctacagctggacagtgggcctgcccgaggaggtgaaaatcgcagaggcctaccagatgctaaagaagcaggggattgtaaagtccgaccccaagcttccagatgacactacctttccccttcctcctccacggccgaagaatgtgatctttgaagatgaggagaaatccaagatgctggcccgcctgct

SEQ ID NO: 12692 - DNA, 566 bp, Homo sapiens
  source 1..566: mol_type = unassigned DNA
gtgccgaggctgggggccggtggcggatggagcccgcgatggagccggagactctggaggcgcgaatcaagccacgaaccccctgaacaaggagctcgactgggccagcatcaacggcttctgcgagcagctcaacgaggactttgaggggcctccactcgccacccggctgctggcccacaagatccagtccccacaggagtgggaggcgatccaggccttgacggtgctggaaacatgcatgaagagctgcggcaagcggttccacgacgaagtgggcaagttccgctttctcaacgagctcatcaaggtcgtgtctcccaagtatctgggctctcggacatcggagaaggtgaagaacaagatcttggagctcctctacagctggacagtgggcctgcccgaggaggtgaaaatcgcagaggcctaccagatgctaaagaagcaggggattgtaaagtccgaccccaagcttccagatgacactacctttccccttcctcctccacggccgaagaatgtgatctttgaagatgaggagaaatccaagatgctggcccgcctgc

SEQ ID NO: 12693 - DNA, 483 bp, Homo sapiens
  source 1..483: mol_type = unassigned DNA
gagcgatggaggaccccggccccggcgcggtccagcggtgggagcgggcgccgcccacctgtcggatccctgggccatgacccctgggacggcgagtgtggacatgagtggctgggatgcagtgccgtagcaggctgggggacacaaaagagaactgacccagcactgctaccctgggcaggagtagaggattagagaaggggacaccggagccactcccaagggaatgaaggctttctgaacctggtgtgatgatagagccacgaaccccctgaacaaggagctcgactgggccagcatcaacggcttctgcgagcagctcaacgaggactttgaggggcctccactcgccacccggctgctggcccacaagatccagtccccacaggagtgggaggcgatccaggccttgacggtgctggaaacatgcatgaagagctgcggcaagcggttccacgacgaagtgggcaagttccgctttct

SEQ ID NO: 12694 - DNA, 568 bp, Homo sapiens
  source 1..568: mol_type = unassigned DNA
ggaaccggaaccgggggcacgaggcgggccccttcccggcgggggcggggggagacaggtgtggacatgagtggctgggatgcagtgccgtagcaggctgggggacacaaaagagaactgacccagcactgctaccctgggcaggagtagaggattagagaaggggacaccggagccactcccaagggaatgaaggctttctgaacctggtgtgatgagccacgaaccccctgaacaaggagctcgactgggccagcatcaacggcttctgcgagcagctcaacgaggactttgaggggcctccactcgccacccggctgctggcccacaagatccagtccccacaggagtgggaggcgatccaggccttgacggtgctggaaacatgcatgaagagctgcggcaagcggttccacgacgaagtgggcaagttccgctttctcaacgagctcatcaaggtcgtgtctcccaagtatctgggctctcggacatcggagaaggtgaagaacaagatcttggagctcctctacagctggacagtgggcctgcccgaggaggtgaaaatcgc

SEQ ID NO: 12695 - DNA, 577 bp, Homo sapiens
  source 1..577: mol_type = unassigned DNA
agtcggcccctcagaccctggagcgatggaggaccccggccccggcgcggtccagcggtgggagcgggcgccgcccacctgtcggatccctgggccatgacccctgggacggcgagtgagctgcgccgggaacccccgggacggagagagcagcctccaacccccaaggctcacattgcttcacggagtagcggcccggggaaggagcacgcgagcggttccccggggttgcatctcacacccgggagggagggaccctactattttcaggccccgaatcctccactctctggccctgcatggcgttcctggagcccatagagccacgaaccccctgaacaaggagctcgactgggccagcatcaacggcttctgcgagcagctcaacgaggactttgaggggcctccactcgccacccggctgctggcccacaagatccagtccccacaggagtgggaggcgatccaggccttgacggtgctggaaacatgcatgaagagctgcggcaagcggttccacgacgaagtgggcaagttccgctttctcaacgagctcatcaaggtcgtgtctcccaag

SEQ ID NO: 12696 - DNA, 927 bp, Homo sapiens
  source 1..927: mol_type = unassigned DNA
ggggcacgaggcgggccccttcccggcgggggcggggtacgggtcgccccctcctcacgccccgcccccggcccgggaggggcggtgtcctcagtcggcccctcagaccctggagcgatggaggaccccggccccggcgcggtccagcggtgggagcgggcgccgcccacctgtcggatccctgggccatgacccctgggacggcgaatagagccacgaaccccctgaacaaggagctcgactgggccagcatcaacggcttctgcgagcagctcaacgaggactttgaggggcctccactcgccacccggctgctggcccacaagatccagtccccacaggagtgggaggcgatccaggccttgacggtgctggaaacatgcatgaagagctgcggcaagcggttccacgacgaagtgggcaagttccgctttctcaacgagctcatcaaggtcgtgtctcccaagtatctgggctctcggacatcggagaaggtgaagaacaagatcttggagctcctctacagctggacagtgggcctgcccgaggaggtgaaaatcgcagaggcctaccagatgctaaagaagcaggggattgtaaagtccgaccccaagcttccagatgacactacctttccccttcctcctccacggccgaagaatgtgatctttgaagatgaggagaaatccaagatgctggcccgcctgctgaagagctcccatcccgaagacctccgcgcagccaataagctcatcaaagagatggtgcaggaggaccagaagcggatggagaagatctcgaagagggtgaatgccatcgaggaggtgaacaacaatgtgaaactgctcacggagatggtgatgagccacagccagggcggcgcagcagctggcagcagcgaggacctcatgaaggaactgtaccagc

SEQ ID NO: 12697 - DNA, 639 bp, Homo sapiens
  source 1..639: mol_type = unassigned DNA
gggcggggtacgggtcgccccctcctcacgccccgcccccggcccgggaggggcggtgtcctcagtcggcccctcagaccctggagcgatggaggaccccggccccggcgcggtccagcggtgggagcgggcgccgcccacctgtcggatccctgggccatgacccctgggacggcgagagtagaggattagagaaggggacaccggagccactcccaagggaatgaaggctttctgaacctggtgtgatgatagagccacgaaccccctgaacaaggagctcgactgggccagcatcaacggcttctgcgagcagctcaacgaggactttgaggggcctccactcgccacccggctgctggcccacaagatccagtccccacaggagtgggaggcgatccaggccttgacggtgctggaaacatgcatgaagagctgcggcaagcggttccacgacgaagtgggcaagttccgctttctcaacgagctcatcaaggtcgtgtctcccaagtatctgggctctcggacatcggagaaggtgaagaacaagatcttggagctcctctacagctggacagtgggcctgcccgaggaggtgaaaatcgcagaggcctaccagatgctaaagaagcaggggat

SEQ ID NO: 12698 - DNA, 3876 bp, Homo sapiens
  source 1..3876: mol_type = unassigned DNA
ctcgcgagttttgaagccgcggggccgggcggctgcaatatggcggaggcggaaggggaaagcctggagtcctggctcaataaagccaccaatccttccaaccgccaggaggactgggaatacataattggcttctgtgatcagatcaacaaggagctggaagggccacagatcgccgtccgactgctggcccacaagatccagtccccacaggaatgggaggcgctccaggccctgacggtgctggaggcatgcatgaagaactgtgggaggagatttcataacgaagtggggaagttccgctttttgaatgagttaatcaaagtcgtctctccaaagtacctgggggacagggtgtctgagaaagtgaagaccaaggttattgagctgctgtacagctggaccatggccctgccagaagaagcaaagatcaaagacgcctaccacatgctgaagagacagggcatagtgcagtctgacccaccaattcctgtggataggacgctgatcccctctccaccacctcgtcccaaaaaccctgtttttgatgatgaggagaagtccaagcttttagccaagctgctgaaaagcaaaaacccagatgacctgcaggaggccaacaagctcatcaagtccatggtgaaggaagacgaggcacggatccagaaggtgaccaagcgtctgcacacgttagaggaagttaacaacaacgtgagactgctcagtgagatgctgcttcattacagccaggaggactcttcggacggggacagagagctgatgaaggagctgtttgatcagtgtgagaacaagaggcggactttatttaaactcgccagtgagactgaggacaatgataacagtttgggggacatcctgcaagccagtgacaacctctcccgggtcatcaactcttacaaaacaattattgaagggcaggtcatcaatggcgaggtggctaccttaaccctgcctgactcggaaggaaacagtcagtgcagtaaccaaggcacgctcatcgaccttgcggagctggacacgaccaacagtttgtcctccgtgttggccccagcacctactccaccctcctcaggcatcccaatcctccctccaccaccccaggcctcaggacctccacggagccgctcctctagccaggccgaggccaccctggggcccagcagcacaagcaacgccctctcctggctggacgaggagctactctgcttgggcctcgccgacccagcccctaatgttcctcccaaagagtcagctgggaacagccagtggcacctgctccagagggaacagtccgacctggacttcttcagccccaggccggggaccgctgcctgtggcgcctccgatgctcctctgctccagccctcagccccctcctcaagcagctcccaagctccactgccgcctcccttcccagctcctgtggtcccagccagtgttcctgcccccagtgcgggctcctccttgttttctactggagtggccccagccttggccccaaaagttgagcccgcagtccctgggcaccatggcttggcgttgggcaacagcgcgctgcaccacctggatgccctcgatcagcttctagaagaggccaaagtgacctcgggcttggtgaaacccactacctcccctctcatccccaccaccaccccagccaggcccctcctgcccttctccacggggcccggcagcccgctcttccagccactgagtttccagtcccagggcagccccccgaaggggcctgagctctccctggccagcatccacgtgcccctggaatcgatcaagcctagcagtgcccttcctgtgacagcctacgataaaaacggcttccgcatcctcttccactttgccaaggagtgtcccccaggacgacctgacgtgctggtggtggtggtgtccatgctgaacacggctcccttacctgtcaagagcatcgtgctgcaggctgcagtgcccaagtcaatgaaagtgaagttgcagccaccttctgggacagaactctctccatttagccccatccagccacctgcagccatcacccaggtcatgttgctggccaatccactgaaggagaaggtgcggcttcggtataagctgaccttcgccctgggggagcagctgagcacagaggtgggcgaggtggaccagttccctcctgtggaacagtgggggaacctatgaccccagaggacgctgtgatctccaccttgaagccaggcaggctgccctgagacgaggagggctctggtcccgtcactctccatgccctgacaacagtgcttgtagctttgatgtggaacaggggccctgggcatttctgctgagaaccaaactgctgctgtgataacctctcctttggcccctaaaaggacctgtttttatctacctgtgtgacttgaagtggccatatgctgtcaggggtgcggagtggcccctgacttcactgctgtcccgggaacatggacccccaggcttggcgtaggtgtttgcttccttctactggcattcactgaagccactggggtgggggtctctaaagagagactgtcatgggtcattccccacaagagccacatcctcacacctgacagatgcacggcccaaggggctgcagccctgttgcaattccatgcttcccccgccaaccagctcctgctgccatccccagggaggtggcccaggaaggtgcctggcccagaataaggaactggcatactgcaaagtccccagccctgcctctggtggacagcatcgtcctggaatggccacggagtgatgagttgtgtgcttgtccctggcagtggcaggctgtgtcctatggacatcttggcaggacatggaatttggcctcatgacaggcccaactagggataggaaggaaaatgaagagagccagtatttccccttctccagaagcaggtactcagctttctgggaaaagcgtgcctccagccgtggggacaggccatcctactgactacctcttgcttggcatgaaataaactgctatcctccccttggaatctaccgccactctacatcctactgctttggcctccctctcctctcaccagatggcatgtggtgtggcacctgtggctggacacaggaggcctcaggatcacaaatgttacactagacatatgtcctaatgtgctgcccagaaacctcaactgttccccagctactgaggggcactgtcagcgagatgttgggtctggaggtgatgagatcgggccacacttgagctgagtcaccagaccctattgcttcaacagtgcttggcccccgccagcttgtcccagccactctagctgctggatgtgatcctgggacatgtactccaagcctccgtcacaaaaaaaaaatcaccagctgccatagacacgggggaagcttgcggagcccaggtgaacaagctcagcaatcggacatctctggggaaaggaaggtggcacagaccatgttccctggttcctccctgccccttgccaggcttccttattccttactatgggaagaggtcatatcccttccctgcccctcgctgtctttagcaagcaggtttcactgcttcattagaagaggacaagtcaaaagtgaatcatttttcactacttaaggaataaatccaagagctttccagagactggctgctgcagccctgggaatgtctgtggaattactatgtggaaatggaactttgtgttatgctctagacattacagttatttgagtgttactcgttactgttgaggtcagtgcttcgtggcaaatggctgtactggatatcccagctctgctgcccttgttttgctgcatgttaaataaaaccattttcactgt

SEQ ID NO: 12699 - DNA, 3777 bp, Homo sapiens
  source 1..3777: mol_type = unassigned DNA
ctcgcgagttttgaagccgcggggccgggcggctgcaatatggcggaggcggaaggggaaagcctggagtcctggctcaataaagccaccaatccttccaaccgccaggaggactgggaatacataattggcttctgtgatcagatcaacaaggagctggaagggccacagatcgccgtccgactgctggcccacaagatccagtccccacaggaatgggaggcgctccaggccctgacgtacctgggggacagggtgtctgagaaagtgaagaccaaggttattgagctgctgtacagctggaccatggccctgccagaagaagcaaagatcaaagacgcctaccacatgctgaagagacagggcatagtgcagtctgacccaccaattcctgtggataggacgctgatcccctctccaccacctcgtcccaaaaaccctgtttttgatgatgaggagaagtccaagcttttagccaagctgctgaaaagcaaaaacccagatgacctgcaggaggccaacaagctcatcaagtccatggtgaaggaagacgaggcacggatccagaaggtgaccaagcgtctgcacacgttagaggaagttaacaacaacgtgagactgctcagtgagatgctgcttcattacagccaggaggactcttcggacggggacagagagctgatgaaggagctgtttgatcagtgtgagaacaagaggcggactttatttaaactcgccagtgagactgaggacaatgataacagtttgggggacatcctgcaagccagtgacaacctctcccgggtcatcaactcttacaaaacaattattgaagggcaggtcatcaatggcgaggtggctaccttaaccctgcctgactcggaaggaaacagtcagtgcagtaaccaaggcacgctcatcgaccttgcggagctggacacgaccaacagtttgtcctccgtgttggccccagcacctactccaccctcctcaggcatcccaatcctccctccaccaccccaggcctcaggacctccacggagccgctcctctagccaggccgaggccaccctggggcccagcagcacaagcaacgccctctcctggctggacgaggagctactctgcttgggcctcgccgacccagcccctaatgttcctcccaaagagtcagctgggaacagccagtggcacctgctccagagggaacagtccgacctggacttcttcagccccaggccggggaccgctgcctgtggcgcctccgatgctcctctgctccagccctcagccccctcctcaagcagctcccaagctccactgccgcctcccttcccagctcctgtggtcccagccagtgttcctgcccccagtgcgggctcctccttgttttctactggagtggccccagccttggccccaaaagttgagcccgcagtccctgggcaccatggcttggcgttgggcaacagcgcgctgcaccacctggatgccctcgatcagcttctagaagaggccaaagtgacctcgggcttggtgaaacccactacctcccctctcatccccaccaccaccccagccaggcccctcctgcccttctccacggggcccggcagcccgctcttccagccactgagtttccagtcccagggcagccccccgaaggggcctgagctctccctggccagcatccacgtgcccctggaatcgatcaagcctagcagtgcccttcctgtgacagcctacgataaaaacggcttccgcatcctcttccactttgccaaggagtgtcccccaggacgacctgacgtgctggtggtggtggtgtccatgctgaacacggctcccttacctgtcaagagcatcgtgctgcaggctgcagtgcccaagtcaatgaaagtgaagttgcagccaccttctgggacagaactctctccatttagccccatccagccacctgcagccatcacccaggtcatgttgctggccaatccactgaaggagaaggtgcggcttcggtataagctgaccttcgccctgggggagcagctgagcacagaggtgggcgaggtggaccagttccctcctgtggaacagtgggggaacctatgaccccagaggacgctgtgatctccaccttgaagccaggcaggctgccctgagacgaggagggctctggtcccgtcactctccatgccctgacaacagtgcttgtagctttgatgtggaacaggggccctgggcatttctgctgagaaccaaactgctgctgtgataacctctcctttggcccctaaaaggacctgtttttatctacctgtgtgacttgaagtggccatatgctgtcaggggtgcggagtggcccctgacttcactgctgtcccgggaacatggacccccaggcttggcgtaggtgtttgcttccttctactggcattcactgaagccactggggtgggggtctctaaagagagactgtcatgggtcattccccacaagagccacatcctcacacctgacagatgcacggcccaaggggctgcagccctgttgcaattccatgcttcccccgccaaccagctcctgctgccatccccagggaggtggcccaggaaggtgcctggcccagaataaggaactggcatactgcaaagtccccagccctgcctctggtggacagcatcgtcctggaatggccacggagtgatgagttgtgtgcttgtccctggcagtggcaggctgtgtcctatggacatcttggcaggacatggaatttggcctcatgacaggcccaactagggataggaaggaaaatgaagagagccagtatttccccttctccagaagcaggtactcagctttctgggaaaagcgtgcctccagccgtggggacaggccatcctactgactacctcttgcttggcatgaaataaactgctatcctccccttggaatctaccgccactctacatcctactgctttggcctccctctcctctcaccagatggcatgtggtgtggcacctgtggctggacacaggaggcctcaggatcacaaatgttacactagacatatgtcctaatgtgctgcccagaaacctcaactgttccccagctactgaggggcactgtcagcgagatgttgggtctggaggtgatgagatcgggccacacttgagctgagtcaccagaccctattgcttcaacagtgcttggcccccgccagcttgtcccagccactctagctgctggatgtgatcctgggacatgtactccaagcctccgtcacaaaaaaaaaatcaccagctgccatagacacgggggaagcttgcggagcccaggtgaacaagctcagcaatcggacatctctggggaaaggaaggtggcacagaccatgttccctggttcctccctgccccttgccaggcttccttattccttactatgggaagaggtcatatcccttccctgcccctcgctgtctttagcaagcaggtttcactgcttcattagaagaggacaagtcaaaagtgaatcatttttcactacttaaggaataaatccaagagctttccagagactggctgctgcagccctgggaatgtctgtggaattactatgtggaaatggaactttgtgttatgctctagacattacagttatttgagtgttactcgttactgttgaggtcagtgcttcgtggcaaatggctgtactggatatcccagctctgctgcccttgttttgctgcatgttaaataaaaccattttcactgt

SEQ ID NO: 12700 - DNA, 3879 bp, Homo sapiens
  source 1..3879: mol_type = unassigned DNA
acaacaattcaggcccttgtcccaagtaggaggacattccccaagcaggcgggtaaagtctcctcctggtcaagtgctaacgataaagccaccaatccttccaaccgccaggaggactgggaatacataattggcttctgtgatcagatcaacaaggagctggaagggccacagatcgccgtccgactgctggcccacaagatccagtccccacaggaatgggaggcgctccaggccctgacggtgctggaggcatgcatgaagaactgtgggaggagatttcataacgaagtggggaagttccgctttttgaatgagttaatcaaagtcgtctctccaaagtacctgggggacagggtgtctgagaaagtgaagaccaaggttattgagctgctgtacagctggaccatggccctgccagaagaagcaaagatcaaagacgcctaccacatgctgaagagacagggcatagtgcagtctgacccaccaattcctgtggataggacgctgatcccctctccaccacctcgtcccaaaaaccctgtttttgatgatgaggagaagtccaagcttttagccaagctgctgaaaagcaaaaacccagatgacctgcaggaggccaacaagctcatcaagtccatggtgaaggaagacgaggcacggatccagaaggtgaccaagcgtctgcacacgttagaggaagttaacaacaacgtgagactgctcagtgagatgctgcttcattacagccaggaggactcttcggacggggacagagagctgatgaaggagctgtttgatcagtgtgagaacaagaggcggactttatttaaactcgccagtgagactgaggacaatgataacagtttgggggacatcctgcaagccagtgacaacctctcccgggtcatcaactcttacaaaacaattattgaagggcaggtcatcaatggcgaggtggctaccttaaccctgcctgactcggaaggaaacagtcagtgcagtaaccaaggcacgctcatcgaccttgcggagctggacacgaccaacagtttgtcctccgtgttggccccagcacctactccaccctcctcaggcatcccaatcctccctccaccaccccaggcctcaggacctccacggagccgctcctctagccaggccgaggccaccctggggcccagcagcacaagcaacgccctctcctggctggacgaggagctactctgcttgggcctcgccgacccagcccctaatgttcctcccaaagagtcagctgggaacagccagtggcacctgctccagagggaacagtccgacctggacttcttcagccccaggccggggaccgctgcctgtggcgcctccgatgctcctctgctccagccctcagccccctcctcaagcagctcccaagctccactgccgcctcccttcccagctcctgtggtcccagccagtgttcctgcccccagtgcgggctcctccttgttttctactggagtggccccagccttggccccaaaagttgagcccgcagtccctgggcaccatggcttggcgttgggcaacagcgcgctgcaccacctggatgccctcgatcagcttctagaagaggccaaagtgacctcgggcttggtgaaacccactacctcccctctcatccccaccaccaccccagccaggcccctcctgcccttctccacggggcccggcagcccgctcttccagccactgagtttccagtcccagggcagccccccgaaggggcctgagctctccctggccagcatccacgtgcccctggaatcgatcaagcctagcagtgcccttcctgtgacagcctacgataaaaacggcttccgcatcctcttccactttgccaaggagtgtcccccaggacgacctgacgtgctggtggtggtggtgtccatgctgaacacggctcccttacctgtcaagagcatcgtgctgcaggctgcagtgcccaagtcaatgaaagtgaagttgcagccaccttctgggacagaactctctccatttagccccatccagccacctgcagccatcacccaggtcatgttgctggccaatccactgaaggagaaggtgcggcttcggtataagctgaccttcgccctgggggagcagctgagcacagaggtgggcgaggtggaccagttccctcctgtggaacagtgggggaacctatgaccccagaggacgctgtgatctccaccttgaagccaggcaggctgccctgagacgaggagggctctggtcccgtcactctccatgccctgacaacagtgcttgtagctttgatgtggaacaggggccctgggcatttctgctgagaaccaaactgctgctgtgataacctctcctttggcccctaaaaggacctgtttttatctacctgtgtgacttgaagtggccatatgctgtcaggggtgcggagtggcccctgacttcactgctgtcccgggaacatggacccccaggcttggcgtaggtgtttgcttccttctactggcattcactgaagccactggggtgggggtctctaaagagagactgtcatgggtcattccccacaagagccacatcctcacacctgacagatgcacggcccaaggggctgcagccctgttgcaattccatgcttcccccgccaaccagctcctgctgccatccccagggaggtggcccaggaaggtgcctggcccagaataaggaactggcatactgcaaagtccccagccctgcctctggtggacagcatcgtcctggaatggccacggagtgatgagttgtgtgcttgtccctggcagtggcaggctgtgtcctatggacatcttggcaggacatggaatttggcctcatgacaggcccaactagggataggaaggaaaatgaagagagccagtatttccccttctccagaagcaggtactcagctttctgggaaaagcgtgcctccagccgtggggacaggccatcctactgactacctcttgcttggcatgaaataaactgctatcctccccttggaatctaccgccactctacatcctactgctttggcctccctctcctctcaccagatggcatgtggtgtggcacctgtggctggacacaggaggcctcaggatcacaaatgttacactagacatatgtcctaatgtgctgcccagaaacctcaactgttccccagctactgaggggcactgtcagcgagatgttgggtctggaggtgatgagatcgggccacacttgagctgagtcaccagaccctattgcttcaacagtgcttggcccccgccagcttgtcccagccactctagctgctggatgtgatcctgggacatgtactccaagcctccgtcacaaaaaaaaaatcaccagctgccatagacacgggggaagcttgcggagcccaggtgaacaagctcagcaatcggacatctctggggaaaggaaggtggcacagaccatgttccctggttcctccctgccccttgccaggcttccttattccttactatgggaagaggtcatatcccttccctgcccctcgctgtctttagcaagcaggtttcactgcttcattagaagaggacaagtcaaaagtgaatcatttttcactacttaaggaataaatccaagagctttccagagactggctgctgcagccctgggaatgtctgtggaattactatgtggaaatggaactttgtgttatgctctagacattacagttatttgagtgttactcgttactgttgaggtcagtgcttcgtggcaaatggctgtactggatatcccagctctgctgcccttgttttgctgcatgttaaataaaaccattttcactgt

SEQ ID NO: 12701 - DNA, 976 bp, Homo sapiens
  source 1..976: mol_type = unassigned DNA
gaagccgcggggccgggcggctgcaatatggcggaggcggaaggggaaagcctggagtcctggctcaataaagccaccaatccttccaaccgccaggaggactgggaatacataattggcttctgtgatcagatcaacaaggagctggaagggccacagatcgccgtccgactgctggcccacaagatccagtccccacaggaatgggaggcgctccaggccctgacggtgctggaggcatgcatgaagaactgtgggaggagatttcataacgaagtggggaagttccgctttttgaatgagttaatcaaagtcgtctctccaaagtacctgggggacagggtgtctgagaaagtgaagaccaaggttattgagctgctgtacagctggaccatggccctgccagaagaagcaaagatcaaagacgcctaccacatgctgaagagacaggcttttagccaagctgctgaaaagcaaaaacccagatgacctgcaggaggccaacaagctcatcaagtccatggtgaaggaagacgaggcacggatccagaaggtgaccaagcgtctgcacacgttagaggaagttaacaacaacgtgagactgctcagtgagatgctgcttcattacagccaggaggactcttcggacggggacagagagctgatgaaggagctgtttgatcagtgtgagaacaagaggcggactttatttaaactcgccagtgagactgaggacaatgataacagtttgggggacatcctgcaagccagtgacaacctctcccgggtcatcaactcttacaaaacaattattgaagggcaggtcatcaatggcgaggtggctaccttaaccctgcctgactcggaaggaaacagtcagtgcagtaaccaaggcacgctcatcgaccttgcggagctggacacgaccaacagtttgtcctccgtgttggccccagcacctactccaccctcctca

SEQ ID NO: 12702 - DNA, 1967 bp, Homo sapiens
  source 1..1967: mol_type = unassigned DNA
tgcaatatggcggaggcggaaggggaaagcctggagtcctggctcatacctgggggacagggtgtctgagaaagtgaagaccaaggttattgagctgctgtacagctggaccatggccctgccagaagaagcaaagatcaaagacgcctaccacatgctgaagagacagggcatagtgcagtctgacccaccaattcctgtggataggacgctgatcccctctccaccacctcgtcccaaaaaccctgtttttgatgatgaggagaagtccaagcttttagccaagctgctgaaaagcaaaaacccagatgacctgcaggaggccaacaagctcatcaagtccatggtgaaggaagacgaggcacggatccagaaggtgaccaagcgtctgcacacgttagaggaagttaacaacaacgtgagactgctcagtgagatgctgcttcattacagccaggaggactcttcggacggggacagagagctgatgaaggagctgtttgatcagtgtgagaacaagaggcggactttatttaaactcgccagtgagactgaggacaatgataacagtttgggggacatcctgcaagccagtgacaacctctcccgggtcatcaactcttacaaaacaattattgaagggcaggtcatcaatggcgaggtggctaccttaaccctgcctgactcggaaggaaacagtcagtgcagtaaccaaggcacgctcatcgaccttgcggagctggacacgaccaacagtttgtcctccgtgttggccccagcacctactccaccctcctcaggcatcccaatcctccctccaccaccccaggcctcaggacctccacggagccgctcctctagccaggccgaggccaccctggggcccagcagcacaagcaacgccctctcctggctggacgaggagctactctgcttgggcctcgccgacccagcccctaatgttcctcccaaagagtcagctgggaacagccagtggcacctgctccagagggaacagtccgacctggacttcttcagccccaggccggggaccgctgcctgtggcgcctccgatgctcctctgctccagccctcagccccctcctcaagcagctcccaagctccactgccgcctcccttcccagctcctgtggtcccagccagtgttcctgcccccagtgcgggctcctccttgttttctactggagtggccccagccttggccccaaaagttgagcccgcagtccctgggcaccatggcttggcgttgggcaacagcgcgctgcaccacctggatgccctcgatcagcttctagaagaggccaaagtgacctcgggcttggtgaaacccactacctcccctctcatccccaccaccaccccagccaggcccctcctgcccttctccacggggcccggcagcccgctcttccagccactgagtttccagtcccagggcagccccccgaaggggcctgagctctccctggccagcatccacgtgcccctggaatcgatcaagcctagcagtgcccttcctgtgacagcctacgataaaaacggcttccgcatcctcttccactttgccaaggagtgtcccccaggacgacctgacgtgctggtggtggtggtgtccatgctgaacacggctcccttacctgtcaagagcatcgtgctgcaggctgcagtgcccaagtcaatgaaagtgaagttgcagccaccttctgggacagaactctctccatttagccccatccagccacctgcagccatcacccaggtcatgttgctggccaatccactgaaggagaaggtgcggcttcggtataagctgaccttcgccctgggggagcagctgagcacagaggtgggcgaggtggaccagttccctcctgtggaacagtgggggaacctatgaccccagaggacgctgtgatctccaccttgaagccaggcaggctgccctg

SEQ ID NO: 12703 - DNA, 9252 bp, Homo sapiens
  source 1..9252: mol_type = unassigned DNA
ggcctgggcgcgtccctgcagcgtggcgggacggccccgttccagtcacccccgcctcgctgcggtggcctcgggcctgggcgcccgccttcagctgcggcggagctggctctgtaaatgccggtgcccgcgagccctcctgaatgcttgtctgcgcccgacgagcgcggcctgtcccgaagctgtccactgccaccactcgggcagtgcttgctttagcctggccctttgcagctgaaaggcgtgacatggtgtcgggtggttcgtgggaagtcggggtttcaggagtccgtgtacttccttgtttgtctttgtcgctggccgacttgtcttcattccaggtggccagagcgagtggggccgggcgttgtcacgggtatcatgatattagctggtttgacatcaagtcatttgtgagtcatcagatcttctcctgaaaatgggagacacagtagggcccctcccaggagctcttggctgttgctgatggcagaagccaagcttgtccaaggttcacttgtagcccctcagcgtcagctcagctggtgtcgtcctgaccatggacggcgcgtcggccgagcaagatggcctccaggaggacagatcccacagtggcccctcgtctctccccgaggccccactgaagcccccgggcccactggtgccacctgaccagcaggacaaagtccagtgtgccgaggtaaacagagcatccacggaaggggaaagcccggatggacctggccagggaggcctctgtcagaacgggccaacgccacccttcccagaccctccgtcgtctctcgatcccaccacaagcccagtgggccctgatgcctctccaggtgtggctggtttccatgacaacctaaggaagtctcagggaactagtgctgagggcagtgttagaaaagaagctttgcagtctctcagactcagtcttcctatgcaagaaacgcaactgtgctctacagattctcccctgcccctggagaaggaggagcaggtccgacttcaggctcggaagtggctggaagagcagctcaaacagtacagggtgaagcgccagcaggagaggtccagtcaacctgcaaccaaaacgagactttttagcacgcttgatcctgagctcatgttaaacccagaaaacttaccaagggccagtaccctggctatgacaaaagaatattccttcctgcgcaccagtgtccctcgggggcctaaggtgggcagcctggggcttccggcacatcctagggagaaaaaaacttccaaatcaagcaaaatccggtctctggccgattacagaactgaagattcaaatgcggggaattctgggggaaatgtcccggctcccgattctaccaagggttccctgaagcagaacagaagcagtgcggcgtccgttgtgtctgagatcagcctgtcccccgacactgacgaccgtctggagaacacctccctggctggagacagcgtgtctgaggtggatggaaatgacagcgacagctcatcgtacagcagcgcctccacccgagggacctatggcattctgtcgaagacagtgggcacgcaggacaccccctatatggtcaacggccaggagattcctgcggataccctgggccagttcccctccattaaggacgtcctccaggccgcagccgctgagcaccaagaccaggggcaggaggtcaacggggaggtgcggagtcggagagacagcatctgcagcagcgtgtccttggagagctctgcagcagaaacacaggaggagatgctgcaggtgctcaaagagaaaatgcgactcgaaggacagctggaagccttgtcactggaggcgagtcaggcacttaaagagaaggctgagctgcaggcccagctggccgccctcagcacgaagctgcaggcgcaggtggagtgcagccacagcagccagcagcggcaggattcgctgagctcggaggtggacaccctgaagcagtcgtgctgggacctggagcgagccatgactgacctgcagaacatgctggaggcaaaaaatgccagcctggcgtcgtccaacaacgacttgcaggtggccgaggagcagtaccagaggcttatggccaaggtagaggacatgcagaggagcatgctcagcaaggacaacacagtgcacgacctgcgacagcagatgacagccttgcagagccagcttcagcaggtgcagctggagcggacgacgctgaccagcaagctgaaggcgtcgcaggcggagatctcgtccctgcagagtgtccggcagtggtaccagcagcagctcgccctggcacaggaggcccgcgtcaggctgcagggtgagatggcccacatccaggttggacagatgacccaggcaggtctcctggagcacctgaaactcgagaatgtgtccctgtcccagcagctgacggaaactcagcacaggtccatgaaggagaaggggcgcatcgcggcacagctgcagggcattgaggctgacatgttggatcaggaagcagccttcatgcagattcaggaggcaaagacgatggtggaggaggaccttcagaggaggctggaagagtttgaaggtgagagggagcggctgcagaggatggcggactcggcggcatccctggagcagcagctggagcaggtgaagttgactttactccagcgagaccagcagcttgaggctttgcagcaggagcacctggacctgatgaaacagctcaccttgactcaggaggctctgcagagcagggagcagtccctcgatgccctgcagacacactacgatgagctgcaggccaggctgggggagctgcagggcgaggccgcctccagggaggacacgatctgcctcctgcagaacgagaagatcatcttggaggcggctttgcaggcggccaagagtggcaaggaggagcttgacagaggagcaagacgcttggaagaaggtaccgaggaaacgtcggaaactttagagaagttaagagaagaattagctatcaaatccggccaggtggaacacctgcagcaggagactgctgctctgaaaaagcaaatgcaaaaaataaaggaacagtttctccaacaaaaggtgatggtggaggcctaccggcgcgacgccacctccaaagaccagctcatcagtgagctgaaagccaccaggaagaggctggactcggagctgaaggagctgcggcaggagctgatgcaagtgcacggggagaagcggactgccgaggcggagctctcgcgcctgcacagagaggtggcccaggtccgtcagcacatggcggaccttgaagggcatctccagtcggcgcagaaggagcgagacgagatggaaacacacttgcagtcgttgcagttcgataaggagcagatggtcgcggtcacagaggccaatgaggcgctgaagaaacaaatcgaagagttgcagcaagaggcccggaaggccatcacggaacagaagcagaagatgaggcggctgggctcagacttgaccagcgcccagaaggagatgaagaccaaacataaggcctacgagaacgccgtgggcatcctcagccgccgcctgcaggaggccctcgcggccaaggaggctgcggacgcggagctgggccagctccgagcccagggtggcagcagtgacagcagcctggctctacatgaaaggatccaggccctggaggcggagctgcaggctgtcagtcatagcaagacgctgctggaaaaggaactgcaggaggtcatagcgctgaccagccaggagctggaggagtcccgggagaaggtgctggagctggaggacgagcttcaagaatccagaggctttaggaagaagataaaacgccttgaggagtcaaacaagaagttggctcttgaattagagcacgagaaagggaagcttacgggcctcggtcagtccaacgcagctctgcgggaacacaacagcatcctagaaacagctttggccaagagggaggcagacctagtccagttgaaccttcaggtgcaggcagttttgcagcgcaaagaagaggaggatcgccagatgaagcatcttgtccaggccctgcaggcctcactagagaaggagaaggagaaggtgaacagcctcaaggagcaggtggctgctgccaaggtggaagccgggcataaccgccgccacttcaaggcggcctccttggagctgagtgaggtgaagaaggagctgcaggccaaggaacacctggtgcagaagctgcaggccgaggccgacgaccttcagattcgggaggggaaacattcccaggagatagcacagttccaagcagagctggccgaggcccgggcacagctccagctcctgcagaagcagctggacgagcagctcagcaaacagcccgtgggaaaccaagagatggaaaatctcaaatgggaggtggatcagaaagaaagagaaatccagtccttgaagcagcagctggacttgacggagcagcagggcaggaaggaactggaagggctacagcagctgctgcagaacgtcaagtctgagttggagatggcccaggaagacctgtccatgacccagaaggataaatttatgctccaggcaaaagtgtcggagctgaagaacaacatgaagaccctgctccagcagaaccagcagctcaagctggacctacgccgcggcgcggccaagacgagaaaggagccgaaaggcgaggccagctcttccaaccctgccacgcccatcaagatcccggactgcccagttcccgcctcgctgctggaggagctgctgagaccaccgcccgccgtgagcaaggagcccctcaagaacctgaacagctgcctccagcagctcaagcaggagatggacagcctgcagcgccagatggaggagcacgccctgacggtgcacgagtctctgtcctcgtggacgccgctggagccagccactgccagccctgtgcccccggggggtcacgccggcccacgcggcgacccacagagacacagtcagagcagggcttccaaagaagggccgggagagtgactgctgtggactcgcctccgtgcgccgctgccccagaaggctcttatcaatgttatttatttgattgtgtggtcgatgtttttctaagacatgaaatttaagttttgttttgcctttaacaagaagtaaaatatatagcagaatgagagccaaggactagaaaaacattcgaagatcacaattagcttttcacatggaatgaccaactcttaaaagcctgataggctctcggcgaggagctttgaacgtgtctgaagggttacttgtaggtcgtggcttctgagcggccaccgatgctgctctctgcgggtgacagggagaggctgcgtaactgggagcagctgtgtgacagggtctgcggcaccgcgcctggccaggccggctgcagtttctcacttccctgttccattcagtaagagctttacttttccgcagaaatgaaattttatctgtacctttggctttttacttgtttttttggatagccatcccaccataggatgtgtacatagatactgaatatcataatccaatctttgttttttttttttttttttttttgagacagagtctcgctttgttgcccaggctggagtgcagtggcacactctccgctcactgcaagctccgcctcccaggttcatgcgattctcctgcctcagcctctcgagtagctgggattacaggcgtgcgccactatgccaggctaatgtttgtatttttagtagcaatggggtttcaccatgttggccaggatggtctcgatctcctgacctcaagtgatctgcccatctcagcctcccaaagtgctgggattacaggcgtgagcccctgcgcccggcctgtcacccagtctttaagaagcatatgctcatgttattgaagaagaacctacttattattgattgccttttgaaaatttgttgggaataatttacctgcaggatttagggatagtcagaaaattctaagaaatataattattttatttaccttctaaagccaaatattcttacacagaaaggtcctctgttgttctggttttactttgttgctgaggatctttccttcctgctggtctcttcctctcaggccactggccctgtgtgattccaccgtggctggccactgggaaggggcagcttggacccttggtcaggcctgacggccatcaggaggcacaaggacactgaggccccatatctgatctgacctttgggggggcacagggagaggccggtggaggaggaggaggagagcagaccaggggctccctgcagcgactcccgcggtttcccctggagtcagccaggtgtaggtcgcaggcggtaacaaacctcacactcctgttccccaagtgaaaatctttaccattgtctgtgggagcgcctgtactcgtgtgtaggagcacctgtacttctgcagtcatcgagaagtcctggatcttttgtggttacaccagcatcatgtggcaagcagaggcgacttccggaagagacaggcaggcaccgtgaggaaggtggctgtgctctcccaggtgtctcagagacagatgccttatttaaaatcagcacgacatgtgtgagatcttctgtttcctaccccaaatcctgaaaccctgcagacactggctgactgggagaggtggggtctgtaagttgtcccctagtttgctaagaaaatctaaaataatatttattatatgagttaggagagagagaatgggtccgcgtggcctcctctgcagatgtactggtctgaaatgaggttctgagtcactggccaggccagatgtgctcatgtcggtgtctggtgtctgttttgtggagaaaacagtatggtgtgttttaagctatttgtgttctgttgtaatatacttttagaaggttaattggtaaggttaaggtagcattaaccacaaagatgtttggtatttaaaaaatattctctagcaaatattggaatttccaaaatatatcatttgtacagggttaattttgaaataatacttgaaaatttcattataaatatatcctactttttatcttaagttgaagatgttatttactaaattgttcttgtaccattagaaaaaaaaatacggcaatttacgttcttatttattttggctgtactacccctttgttttaattttaaaatcaagaaatcgggccgggcgcggtggctcatgcctgtaatcccagcactttgggaggccgaggcgggtggatcacctgaggtcaagaggtccagaccatcctggccaacatggcaaaaccccgtctttactaaacatacaaaaattagccgggtgtcgtagtgcgcacctataatcccagctacttgggaggctgaggcaggagaatcacttgaacccaggaggcggagcttgcagtgagccgagatcgcgccactgccctccagcctgggcaacagagcgagactccgtctcaaaaataaataaatgattttaaaaaatctaaaatcgagaaatcacacattcagtggggagcgacttctccttgcttatgggaagtcctcaagtgagtgatgttcaccatgtatttttttttctcttaggacagactaattctgaaaataccgaaggaaaagtagctctatgttctcaccccggttttcctgcgtgtgtgcccttgggtgcgatgcctcccccagcgctctgtggtcgccggtgccagggccccctctggtttggcagggcctggctgcctttgctccctgcagtgagtcttttggtgttttcatgcacggcttgtgcttctggatctgaggcctctcgtgttcacgcggacacttccttccttaagaagacgcctaaaagaggaagttggaattttttttttttttttttgagacagagtctcgctctgtcgcccaggctggagtgcagtggcgtgatctctgctcactgcaagctccgccatctgggttcaagcgattctcctgcctcattctccccagtagctgggattacaggtgcccgccaccacaccagcctaatttttgtatttttagaggggtggagttccaccatgttggccaggctggtcttgaactcttgacctcaggtgatcctgagcctcagcctcccaaagtgctggaattataggcgtgaaccaccgcccccggctgcagttggatttttaaattgcttttttttattgttgaggtttttttatctccaagggactctcccggcacttctaccttccagagttacttcagtgcataaagtttgaattattttgttcttgtgggcagaagtgggaatgatggaatatcctcacggaaaaggcagtgaagttgggagtactgcttacaaaacagggtcaccagtgcattatgtggcgtgttcatccccacgccgtgtgtcacgggctagggcggcgtgttcatccccacaccgtgtgtcacaacaggctagggcacttcacgatgtcactacttgtttttctgatgttccaaaaacaacgtaacttggttttcatgtgtttttccgtggtatatgtgagattgatgctacgggtcttacggactcacacccgttcccactctctgcaatatggatcaggcagtgtttctgataggatgtgaaatggactctcctcgggtgggtccagcaggggccctgcccaccagaacacagtccgtgctgtgctgcgctaaggagctggccctcaactctccttggtgcagggttcccacaaccgagttctagttccctgaggtctttaaaaacaaaaacagaatgttgtacgtgaagattctaggaggggagggaccagcaaatctgagagaaccgtcctggggcctcccttcgaggagccctctgatgtgaggagggacttgagttgagtgacgctgtggtgtgaggtgttctgagctcactgaccggaaggtccaggtgaatctcgtcataagtgatctcaggctctcacaggatccggagggaaatgtgttagagggtctggaaaattcagtgcttttgagttacttgtttttattaaaaatttcctcacaaaagagagtcctcaagttgtggctgttcttgggaaaggggtcaccgtgtctgacaaagtgtaactttaaaaagcacgttgattttttacaaatgtaagtgtgcttgggaattccttaaattttgtgcaataaactattttttggtaaagattttc

SEQ ID NO: 12704 - DNA, 8871 bp, Homo sapiens
  source 1..8871: mol_type = unassigned DNA
ggtatcatgatattagctggtttgacatcaagtcatttgtgagtcatcagatcttctcctgaaaatgggagacacagtagggcccctcccaggagctcttggctgttgctgatggcagaagccaagcttgtccaaggttcacttgtagcccctcagcgtcagctcagctggtgtcgtcctgaccatggacggcgcgtcggccgagcaagatggcctccaggaggacagatcccacagtggcccctcgtctctccccgaggccccactgaagcccccgggcccactggtgccacctgaccagcaggacaaagtccagtgtgccgaggtaaacagagcatccacggaaggggaaagcccggatggacctggccagggaggcctctgtcagaacgggccaacgccacccttcccagaccctccgtcgtctctcgatcccaccacaagcccagtgggccctgatgcctctccaggtgtggctggtttccatgacaacctaaggaagtctcagggaactagtgctgagggcagtgttagaaaagaagctttgcagtctctcagactcagtcttcctatgcaagaaacgcaactgtgctctacagattctcccctgcccctggagaaggaggagcaggtccgacttcaggctcggaagtggctggaagagcagctcaaacagtacagggtgaagcgccagcaggagaggtccagtcaacctgcaaccaaaacgagactttttagcacgcttgatcctgagctcatgttaaacccagaaaacttaccaagggccagtaccctggctatgacaaaagaatattccttcctgcgcaccagtgtccctcgggggcctaaggtgggcagcctggggcttccggcacatcctagggagaaaaaaacttccaaatcaagcaaaatccggtctctggccgattacagaactgaagattcaaatgcggggaattctgggggaaatgtcccggctcccgattctaccaagggttccctgaagcagaacagaagcagtgcggcgtccgttgtgtctgagatcagcctgtcccccgacactgacgaccgtctggagaacacctccctggctggagacagcgtgtctgaggtggatggaaatgacagcgacagctcatcgtacagcagcgcctccacccgagggacctatggcattctgtcgaagacagtgggcacgcaggacaccccctatatggtcaacggccaggagattcctgcggataccctgggccagttcccctccattaaggacgtcctccaggccgcagccgctgagcaccaagaccaggggcaggaggtcaacggggaggtgcggagtcggagagacagcatctgcagcagcgtgtccttggagagctctgcagcagaaacacaggaggagatgctgcaggtgctcaaagagaaaatgcgactcgaaggacagctggaagccttgtcactggaggcgagtcaggcacttaaagagaaggctgagctgcaggcccagctggccgccctcagcacgaagctgcaggcgcaggtggagtgcagccacagcagccagcagcggcaggattcgctgagctcggaggtggacaccctgaagcagtcgtgctgggacctggagcgagccatgactgacctgcagaacatgctggaggcaaaaaatgccagcctggcgtcgtccaacaacgacttgcaggtggccgaggagcagtaccagaggcttatggccaaggtagaggacatgcagaggagcatgctcagcaaggacaacacagtgcacgacctgcgacagcagatgacagccttgcagagccagcttcagcaggtgcagctggagcggacgacgctgaccagcaagctgaaggcgtcgcaggcggagatctcgtccctgcagagtgtccggcagtggtaccagcagcagctcgccctggcacaggaggcccgcgtcaggctgcagggtgagatggcccacatccaggttggacagatgacccaggcaggtctcctggagcacctgaaactcgagaatgtgtccctgtcccagcagctgacggaaactcagcacaggtccatgaaggagaaggggcgcatcgcggcacagctgcagggcattgaggctgacatgttggatcaggaagcagccttcatgcagattcaggaggcaaagacgatggtggaggaggaccttcagaggaggctggaagagtttgaaggtgagagggagcggctgcagaggatggcggactcggcggcatccctggagcagcagctggagcaggtgaagttgactttactccagcgagaccagcagcttgaggctttgcagcaggagcacctggacctgatgaaacagctcaccttgactcaggaggctctgcagagcagggagcagtccctcgatgccctgcagacacactacgatgagctgcaggccaggctgggggagctgcagggcgaggccgcctccagggaggacacgatctgcctcctgcagaacgagaagatcatcttggaggcggctttgcaggcggccaagagtggcaaggaggagcttgacagaggagcaagacgcttggaagaaggtaccgaggaaacgtcggaaactttagagaagttaagagaagaattagctatcaaatccggccaggtggaacacctgcagcaggagactgctgctctgaaaaagcaaatgcaaaaaataaaggaacagtttctccaacaaaaggtgatggtggaggcctaccggcgcgacgccacctccaaagaccagctcatcagtgagctgaaagccaccaggaagaggctggactcggagctgaaggagctgcggcaggagctgatgcaagtgcacggggagaagcggactgccgaggcggagctctcgcgcctgcacagagaggtggcccaggtccgtcagcacatggcggaccttgaagggcatctccagtcggcgcagaaggagcgagacgagatggaaacacacttgcagtcgttgcagttcgataaggagcagatggtcgcggtcacagaggccaatgaggcgctgaagaaacaaatcgaagagttgcagcaagaggcccggaaggccatcacggaacagaagcagaagatgaggcggctgggctcagacttgaccagcgcccagaaggagatgaagaccaaacataaggcctacgagaacgccgtgggcatcctcagccgccgcctgcaggaggccctcgcggccaaggaggctgcggacgcggagctgggccagctccgagcccagggtggcagcagtgacagcagcctggctctacatgaaaggatccaggccctggaggcggagctgcaggctgtcagtcatagcaagacgctgctggaaaaggaactgcaggaggtcatagcgctgaccagccaggagctggaggagtcccgggagaaggtgctggagctggaggacgagcttcaagaatccagaggctttaggaagaagataaaacgccttgaggagtcaaacaagaagttggctcttgaattagagcacgagaaagggaagcttacgggcctcggtcagtccaacgcagctctgcgggaacacaacagcatcctagaaacagctttggccaagagggaggcagacctagtccagttgaaccttcaggtgcaggcagttttgcagcgcaaagaagaggaggatcgccagatgaagcatcttgtccaggccctgcaggcctcactagagaaggagaaggagaaggtgaacagcctcaaggagcaggtggctgctgccaaggtggaagccgggcataaccgccgccacttcaaggcggcctccttggagctgagtgaggtgaagaaggagctgcaggccaaggaacacctggtgcagaagctgcaggccgaggccgacgaccttcagattcgggaggggaaacattcccaggagatagcacagttccaagcagagctggccgaggcccgggcacagctccagctcctgcagaagcagctggacgagcagctcagcaaacagcccgtgggaaaccaagagatggaaaatctcaaatgggaggtggatcagaaagaaagagaaatccagtccttgaagcagcagctggacttgacggagcagcagggcaggaaggaactggaagggctacagcagctgctgcagaacgtcaagtctgagttggagatggcccaggaagacctgtccatgacccagaaggataaatttatgctccaggcaaaagtgtcggagctgaagaacaacatgaagaccctgctccagcagaaccagcagctcaagctggacctacgccgcggcgcggccaagacgagaaaggagccgaaaggcgaggccagctcttccaaccctgccacgcccatcaagatcccggactgcccagttcccgcctcgctgctggaggagctgctgagaccaccgcccgccgtgagcaaggagcccctcaagaacctgaacagctgcctccagcagctcaagcaggagatggacagcctgcagcgccagatggaggagcacgccctgacggtgcacgagtctctgtcctcgtggacgccgctggagccagccactgccagccctgtgcccccggggggtcacgccggcccacgcggcgacccacagagacacagtcagagcagggcttccaaagaagggccgggagagtgactgctgtggactcgcctccgtgcgccgctgccccagaaggctcttatcaatgttatttatttgattgtgtggtcgatgtttttctaagacatgaaatttaagttttgttttgcctttaacaagaagtaaaatatatagcagaatgagagccaaggactagaaaaacattcgaagatcacaattagcttttcacatggaatgaccaactcttaaaagcctgataggctctcggcgaggagctttgaacgtgtctgaagggttacttgtaggtcgtggcttctgagcggccaccgatgctgctctctgcgggtgacagggagaggctgcgtaactgggagcagctgtgtgacagggtctgcggcaccgcgcctggccaggccggctgcagtttctcacttccctgttccattcagtaagagctttacttttccgcagaaatgaaattttatctgtacctttggctttttacttgtttttttggatagccatcccaccataggatgtgtacatagatactgaatatcataatccaatctttgttttttttttttttttttttttgagacagagtctcgctttgttgcccaggctggagtgcagtggcacactctccgctcactgcaagctccgcctcccaggttcatgcgattctcctgcctcagcctctcgagtagctgggattacaggcgtgcgccactatgccaggctaatgtttgtatttttagtagcaatggggtttcaccatgttggccaggatggtctcgatctcctgacctcaagtgatctgcccatctcagcctcccaaagtgctgggattacaggcgtgagcccctgcgcccggcctgtcacccagtctttaagaagcatatgctcatgttattgaagaagaacctacttattattgattgccttttgaaaatttgttgggaataatttacctgcaggatttagggatagtcagaaaattctaagaaatataattattttatttaccttctaaagccaaatattcttacacagaaaggtcctctgttgttctggttttactttgttgctgaggatctttccttcctgctggtctcttcctctcaggccactggccctgtgtgattccaccgtggctggccactgggaaggggcagcttggacccttggtcaggcctgacggccatcaggaggcacaaggacactgaggccccatatctgatctgacctttgggggggcacagggagaggccggtggaggaggaggaggagagcagaccaggggctccctgcagcgactcccgcggtttcccctggagtcagccaggtgtaggtcgcaggcggtaacaaacctcacactcctgttccccaagtgaaaatctttaccattgtctgtgggagcgcctgtactcgtgtgtaggagcacctgtacttctgcagtcatcgagaagtcctggatcttttgtggttacaccagcatcatgtggcaagcagaggcgacttccggaagagacaggcaggcaccgtgaggaaggtggctgtgctctcccaggtgtctcagagacagatgccttatttaaaatcagcacgacatgtgtgagatcttctgtttcctaccccaaatcctgaaaccctgcagacactggctgactgggagaggtggggtctgtaagttgtcccctagtttgctaagaaaatctaaaataatatttattatatgagttaggagagagagaatgggtccgcgtggcctcctctgcagatgtactggtctgaaatgaggttctgagtcactggccaggccagatgtgctcatgtcggtgtctggtgtctgttttgtggagaaaacagtatggtgtgttttaagctatttgtgttctgttgtaatatacttttagaaggttaattggtaaggttaaggtagcattaaccacaaagatgtttggtatttaaaaaatattctctagcaaatattggaatttccaaaatatatcatttgtacagggttaattttgaaataatacttgaaaatttcattataaatatatcctactttttatcttaagttgaagatgttatttactaaattgttcttgtaccattagaaaaaaaaatacggcaatttacgttcttatttattttggctgtactacccctttgttttaattttaaaatcaagaaatcgggccgggcgcggtggctcatgcctgtaatcccagcactttgggaggccgaggcgggtggatcacctgaggtcaagaggtccagaccatcctggccaacatggcaaaaccccgtctttactaaacatacaaaaattagccgggtgtcgtagtgcgcacctataatcccagctacttgggaggctgaggcaggagaatcacttgaacccaggaggcggagcttgcagtgagccgagatcgcgccactgccctccagcctgggcaacagagcgagactccgtctcaaaaataaataaatgattttaaaaaatctaaaatcgagaaatcacacattcagtggggagcgacttctccttgcttatgggaagtcctcaagtgagtgatgttcaccatgtatttttttttctcttaggacagactaattctgaaaataccgaaggaaaagtagctctatgttctcaccccggttttcctgcgtgtgtgcccttgggtgcgatgcctcccccagcgctctgtggtcgccggtgccagggccccctctggtttggcagggcctggctgcctttgctccctgcagtgagtcttttggtgttttcatgcacggcttgtgcttctggatctgaggcctctcgtgttcacgcggacacttccttccttaagaagacgcctaaaagaggaagttggaattttttttttttttttttgagacagagtctcgctctgtcgcccaggctggagtgcagtggcgtgatctctgctcactgcaagctccgccatctgggttcaagcgattctcctgcctcattctccccagtagctgggattacaggtgcccgccaccacaccagcctaatttttgtatttttagaggggtggagttccaccatgttggccaggctggtcttgaactcttgacctcaggtgatcctgagcctcagcctcccaaagtgctggaattataggcgtgaaccaccgcccccggctgcagttggatttttaaattgcttttttttattgttgaggtttttttatctccaagggactctcccggcacttctaccttccagagttacttcagtgcataaagtttgaattattttgttcttgtgggcagaagtgggaatgatggaatatcctcacggaaaaggcagtgaagttgggagtactgcttacaaaacagggtcaccagtgcattatgtggcgtgttcatccccacgccgtgtgtcacgggctagggcggcgtgttcatccccacaccgtgtgtcacaacaggctagggcacttcacgatgtcactacttgtttttctgatgttccaaaaacaacgtaacttggttttcatgtgtttttccgtggtatatgtgagattgatgctacgggtcttacggactcacacccgttcccactctctgcaatatggatcaggcagtgtttctgataggatgtgaaatggactctcctcgggtgggtccagcaggggccctgcccaccagaacacagtccgtgctgtgctgcgctaaggagctggccctcaactctccttggtgcagggttcccacaaccgagttctagttccctgaggtctttaaaaacaaaaacagaatgttgtacgtgaagattctaggaggggagggaccagcaaatctgagagaaccgtcctggggcctcccttcgaggagccctctgatgtgaggagggacttgagttgagtgacgctgtggtgtgaggtgttctgagctcactgaccggaaggtccaggtgaatctcgtcataagtgatctcaggctctcacaggatccggagggaaatgtgttagagggtctggaaaattcagtgcttttgagttacttgtttttattaaaaatttcctcacaaaagagagtcctcaagttgtggctgttcttgggaaaggggtcaccgtgtctgacaaagtgtaactttaaaaagcacgttgattttttacaaatgtaagtgtgcttgggaattccttaaattttgtgcaataaactattttttggtaaag

SEQ ID NO: 12705 - DNA, 5496 bp, Homo sapiens
  source 1..5496: mol_type = unassigned DNA
tccgccggagcatccgggccgggcggcctccggggctgccagagcagcagggtgaggggctcggaggccgcggcgcctcggggctcgggctcccgctcccgctcccgctcccgcagtgcatgggcgggggaggctcgaggggcggcggcggggcctgggcgcgtccctgcagcgtggcgggacggccccgttccagtcacccccgcctcgctgcggtggcctcgggcctgggcgcccgccttcagctgcggcggagctggctctgtaaatgccggtgcccgcgagccctcctgaatgcttgtctgcgcccgacgagcgcggcctgtcccgaagctgtccactgccaccactcgggcagtgcttgctttagcctggccctttgcagctgaaaggcgtgacatggtgtcgggtggttcgtgggaagtcggggtttcaggagtccgtgtacttccttgtttgtctttgtcgctggccgacttgtcttcattccaggtggccagagcgagtggggccgggcgttgtcacgggtatcatgatattagctggtttgacatcaagtcatttgtgagtcatcagatcttctcctgaaaatgggagacacagtagggcccctcccaggagctcttggctgttgctgatggcagaagccaagcttgtccaaggttcacttgtagcccctcagcgtcagctcagctggtgtcgtcctgaccatggacggcgcgtcggccgagcaagatggcctccaggaggacagatcccacagtggcccctcgtctctccccgaggccccactgaagcccccgggcccactggtgccacctgaccagcaggacaaagtccagtgtgccgaggtaaacagagcatccacggaaggggaaagcccggatggacctggccagggaggcctctgtcagaacgggccaacgccacccttcccagaccctccgtcgtctctcgatcccaccacaagcccagtgggccctgatgcctctccaggtgtggctggtttccatgacaacctaaggaagtctcagggaactagtgctgagggcagtgttagaaaagaagctttgcagtctctcagactcagtcttcctatgcaagaaacgcaactgtgctctacagattctcccctgcccctggagaaggaggagcaggtccgacttcaggctcggaagtggctggaagagcagctcaaacagtacagggtgaagcgccagcaggagaggtccagtcaacctgcaaccaaaacgagactttttagcacgcttgatcctgagctcatgttaaacccagaaaacttaccaagggccagtaccctggctatgacaaaagaatattccttcctgcgcaccagtgtccctcgggggcctaaggtgggcagcctggggcttccggcacatcctagggagaaaaaaacttccaaatcaagcaaaatccggtctctggccgattacagaactgaagattcaaatgcggggaattctgggggaaatgtcccggctcccgattctaccaagggttccctgaagcagaacagaagcagtgcggcgtccgttgtgtctgagatcagcctgtcccccgacactgacgaccgtctggagaacacctccctggctggagacagcgtgtctgaggtggatggaaatgacagcgacagctcatcgtacagcagcgcctccacccgagggacctatggcattctgtcgaagacagtgggcacgcaggacaccccctatatggtcaacggccaggagattcctgcggataccctgggccagttcccctccattaaggacgtcctccaggccgcagccgctgagcaccaagaccaggggcaggaggtcaacggggaggtgcggagtcggagagacagcatctgcagcagcgtgtccttggagagctctgcagcagaaacacaggaggagatgctgcaggtgctcaaagagaaaatgcgactcgaaggacagctggaagccttgtcactggaggcgagtcaggcacttaaagagaaggctgagctgcaggcccagctggccgccctcagcacgaagctgcaggcgcaggtggagtgcagccacagcagccagcagcggcaggattcgctgagctcggaggtggacaccctgaagcagtcgtgctgggacctggagcgagccatgactgacctgcagaacatgctggaggcaaaaaatgccagcctggcgtcgtccaacaacgacttgcaggtggccgaggagcagtaccagaggcttatggccaaggtagaggacatgcagaggagcatgctcagcaaggacaacacagtgcacgacctgcgacagcagatgacagccttgcagagccagcttcagcaggtgcagctggagcggacgacgctgaccagcaagctgaaggcgtcgcaggcggagatctcgtccctgcagagtgtccggcagtggtaccagcagcagctcgccctggcacaggaggcccgcgtcaggctgcagggtgagatggcccacatccaggttggacagatgacccaggcaggtctcctggagcacctgaaactcgagaatgtgtccctgtcccagcagctgacggaaactcagcacaggtccatgaaggagaaggggcgcatcgcggcacagctgcagggcattgaggctgacatgttggatcaggaagcagccttcatgcagattcaggaggcaaagacgatggtggaggaggaccttcagaggaggctggaagagtttgaaggtgagagggagcggctgcagaggatggcggactcggcggcatccctggagcagcagctggagcaggtgaagttgactttactccagcgagaccagcagcttgaggctttgcagcaggagcacctggacctgatgaaacagctcaccttgactcaggaggctctgcagagcagggagcagtccctcgatgccctgcagacacactacgatgagctgcaggccaggctgggggagctgcagggcgaggccgcctccagggaggacacgatctgcctcctgcagaacgagaagatcatcttggaggcggctttgcaggcggccaagagtggcaaggaggagcttgacagaggagcaagacgcttggaagaaggtaccgaggaaacgtcggaaactttagagaagttaagagaagaattagctatcaaatccggccaggtggaacacctgcagcaggagactgctgctctgaaaaagcaaatgcaaaaaataaaggaacagtttctccaacaaaaggtgatggtggaggcctaccggcgcgacgccacctccaaagaccagctcatcagtgagctgaaagccaccaggaagaggctggactcggagctgaaggagctgcggcaggagctgatgcaagtgcacggggagaagcggactgccgaggcggagctctcgcgcctgcacagagaggtggcccaggtccgtcagcacatggcggaccttgaagggcatctccagtcggcgcagaaggagcgagacgagatggaaacacacttgcagtcgttgcagttcgataaggagcagatggtcgcggtcacagaggccaatgaggcgctgaagaaacaaatcgaagagttgcagcaagaggcccggaaggccatcacggaacagaagcagaagatgaggcggctgggctcagacttgaccagcgcccagaaggagatgaagaccaaacataaggcctacgagaacgccgtgggcatcctcagccgccgcctgcaggaggccctcgcggccaaggaggctgcggacgcggagctgggccagctccgagcccagggtggcagcagtgacagcagcctggctctacatgaaaggatccaggccctggaggcggagctgcaggctgtcagtcatagcaagacgctgctggaaaaggaactgcaggaggtcatagcgctgaccagccaggagctggaggagtcccgggagaaggtgctggagctggaggacgagcttcaagaatccagaggctttaggaagaagataaaacgccttgaggagtcaaacaagaagttggctcttgaattagagcacgagaaagggaagcttacgggcctcggtcagtccaacgcagctctgcgggaacacaacagcatcctagaaacagctttggccaagagggaggcagacctagtccagttgaaccttcaggtgcaggcagttttgcagcgcaaagaagaggaggatcgccagatgaagcatcttgtccaggccctgcaggcctcactagagaaggagaaggagaaggtgaacagcctcaaggagcaggtggctgctgccaaggtggaagccgggcataaccgccgccacttcaaggcggcctccttggagctgagtgaggtgaagaaggagctgcaggccaaggaacacctggtgcagaagctgcaggccgaggccgacgaccttcagattcgggaggggaaacattcccaggagatagcacagttccaagcagagctggccgaggcccgggcacagctccagctcctgcagaagcagctggacgagcagctcagcaaacagcccgtgggaaaccaagagatggaaaatctcaaatgggaggtggatcagaaagaaagagaaatccagtccttgaagcagcagctggacttgacggagcagcagggcaggaaggaactggaagggctacagcagctgctgcagaacgtcaagtctgagttggagatggcccaggaagacctgtccatgacccagaaggataaatttatgctccaggcaaaagtgtcggagctgaagaacaacatgaagaccctgctccagcagaaccagcagctcaagctggacctacgccgcggcgcggccaagacggtactcaggcccgcgtccctcccggggtagccgacgtgcgctgtagatgctctcggacaggaggctggcagacgtgttagtcattcagacataaacggatttgttgagcccacactgagcagctgctgtgtagtcagtggtaatggggtgacagatgaaatcatttcattctggtttcattcatccaacagtgttttcctcgttctgtgaattcaaataccactttgttgtaatgtgctttgtaaagcagatgagcggtggtctgtgactcggcagtccctgctgtgtgtgaagggctggggcccgggagctgtgcccaggcgcccggcggttttctgtgctcggtccacatccatgttttccaggaggcaggtgggagggcagcgctcggattgagaggccgtttagcgtcgtgtgcttatctgtggaaaaagtttgaagtcccagaaaagggagcctaagctggaaaacttacttaatttcttacggaaattccacatcaaggtcttgagtatctgatgggagaagcgtctgggagagctgtagtctgtggctcggccccgtcctgccgcagacccaggacttaggttgtctctgctttgctctggttttgtgccttaggaataaaggtgtttcctcagcc

SEQ ID NO: 12706 - DNA, 3784 bp, Homo sapiens
  source 1..3784: mol_type = unassigned DNA
ccgggccgggcggcctccggggctgccagagcagcagggtatcatgatattagctggtttgacatcaagtcatttgtgagtcatcagatcttctcctgaaaatgggagacacagtagggcccctcccaggagctcttggctgttgctgatggcagaagccaagcttgtccaaggttcacttgtagcccctcagcgtcagctcagctggtgtcgtcctgaccatggacggcgcgtcggccgagcaagatggcctccaggaggacagatcccacagtggcccctcgtctctccccgaggccccactgaagcccccgggcccactggtgccacctgaccagcaggacaaagtccagtgtgccgaggtaaacagagcatccacggaaggggaaagcccggatggacctggccagggaggcctctgtcagaacgggccaacgccacccttcccagaccctccgtcgtctctcgatcccaccacaagcccagtgggccctgatgcctctccaggtgtggctggtttccatgacaacctaaggaagtctcagggaactagtgctgagggcagtgttagaaaagaagctttgcagtctctcagactcagtcttcctatgcaagaaacgcaactgtgctctacagattctcccctgcccctggagaaggaggagcaggtccgacttcaggctcggaagtggctggaagagcagctcaaacagtacagggtgaagcgccagcaggagaggtccagtcaacctgcaaccaaaacgagactttttagcacgcttgatcctgagctcatgttaaacccagaaaacttaccaagggccagtaccctggctatgacaaaagaatattccttcctgcgcaccagtgtccctcgggggcctaaggtgggcagcctggggcttccggcacatcctagggagaaaaaaacttccaaatcaagcaaaatccggtctctggccgattacagaactgaagattcaaatgcggggaattctgggggaaatgtcccggctcccgattctaccaagggttccctgaagcagaacagaagcagtgcggcgtccgttgtgtctgagatcagcctgtcccccgacactgacgaccgtctggagaacacctccctggctggagacagcgtgtctgaggtggatggaaatgacagcgacagctcatcgtacagcagcgcctccacccgagggacctatggcattctgtcgaagacagtgggcacgcaggacaccccctatatggtcaacggccaggagattcctgcggataccctgggccagttcccctccattaaggacgtcctccaggccgcagccgctgagcaccaagaccaggggcaggaggtcaacggggaggtgcggagtcggagagacagcatctgcagcagcgtgtccttggagagctctgcagcagaaacacaggaggagatgctgcaggtgctcaaagagaaaatgcgactcgaaggacagctggaagccttgtcactggaggcgagtcaggcacttaaagagaaggctgagctgcaggcccagctggccgccctcagcacgaagctgcaggcgcaggtggagtgcagccacagcagccagcagcggcaggattcgctgagctcggaggtggacaccctgaagcagtcgtgctgggacctggagcgagccatgactgacctgcagaacatgctggaggcaaaaaatgccagcctggcgtcgtccaacaacgacttgcaggtggccgaggagcagtaccagaggcttatggccaaggtagaggacatgcagaggagcatgctcagcaaggacaacacagtgcacgacctgcgacagcagatgacagccttgcagagccagcttcagcaggtgcagctggagcggacgacgctgaccagcaagctgaaggcgtcgcaggcggagatctcgtccctgcagagtgtccggcagtggtaccagcagcagctcgccctggcacaggaggcccgcgtcaggctgcagggtgagatggcccacatccaggttggacagatgacccaggcaggtctcctggagcacctgaaactcgagaatgtgtccctgtcccagcagctgacggaaactcagcacaggtccatgaaggagaaggggcgcatcgcggcacagctgcagggcattgaggctgacatgttggatcaggaagcagccttcatgcagattcaggaggcaaagacgatggtggaggaggaccttcagaggaggctggaagagtttgaaggtgagagggagcggctgcagaggatggcggactcggcggcatccctggagcagcagctggagcaggtgaagttgactttactccagcgagaccagcagcttgaggctttgcagcaggagcacctggacctgatgaaacagctcaccttgactcaggaggctctgcagagcagggagcagtccctcgatgccctgcagacacactacgatgagctgcaggccaggctgggggagctgcagggcgaggccgcctccagggaggacacgatctgcctcctgcagaacgagaagatcatcttggaggcggctttgcaggcggccaagagtggcaaggaggagcttgacagaggagcaagacgcttggaagaaggtaccgaggaaacgtcggaaactttagagaagttaagagaagaattagctatcaaatccggccaggtggaacacctgcagcaggagactgctgctctgaaaaagcaaatgcaaaaaataaaggaacagtttctccaacaaaaggtgatggtggaggcctaccggcgcgacgccacctccaaagaccagctcatcagtgagctgaaagccaccaggaagaggctggactcggagctgaaggagctgcggcaggagctgatgcaagtgcacggggagaagcggactgccgaggcggagctctcgcgcctgcacagagaggtggcccaggtccgtcagcacatggcggaccttgaagggcatctccagtcggcgcagaaggagcgagacgagatggaaacacacttgcagtcgttgcagttcgataaggagcagatggtcgcggtcacagaggccaatgaggcgctgaagaaacaaatcgaagagttgcagcaagaggcccggaaggccatcacggaacagaagcagaagatgaggcggctgggctcagacttgaccagcgcccagaaggagatgaagaccaaacataaggcctacgagaacgccgtgggcatcctcagccgccgcctgcaggaggccctcgcggccaaggaggctgcggacgcggagctgggccagctccgagcccagggtggcagcagtgacagcagcctggctctacatgaaaggatccaggccctggaggcggagctgcaggctgtcagtcatagcaagacgctgctggaaaaggaactgcaggaggtcatagcgctgaccagccaggagctggaggagtcccgggagaaggtgctggagctggaggacgaggtgaggcctggccatctgctgtggcggcagcgtggggcaggtcacgtgagccctggacatgccgccacgcgtgagacccgaagaacaaaacttcaccgtgtgcccagcgttgctacttttggtgttgccaccttctgaccgtcggcctctggctctgtggtggggcaggccctgattccagccctctggggaggatcactgtacagcctctttggtggaatggttacagaattcatagtggaacccttctcagttcaaatgctttggttgcaaataagaaacccaacttcgccagg

SEQ ID NO: 12707 - DNA, 7772 bp, Homo sapiens
  source 1..7772: mol_type = unassigned DNA
atgtgcgggacccgacattgtgcttgtcccatccggtgctccgtagttagcctctgtgagctccacgtaggccgcgcaagcgcccttggcgcacagttcacctgctgccgttgtcgtcgccgccgcggctcccggggctggatggggggccgaggccagccagtggcacccggaagaaagagacgcggcggcggcgacgccgacaccctcaggacgagtgtccggacttgcccacagcctcaaggaggagacggcgaggcccggcccccgctgtccctggtgtaaagaagtcgccgtagccgtcgcggccgggactccccgggctctcgcccttcaggtttcgttgacactcaggaccgtacgtacgctgcgccatgttcaagaaactgaagcaaaagatcagcgaggagcagcagcagctccagcaggcgctggctcctgctcaggcgtcctccaattcttcaacaccaacaagaatgaggagcaggacatcttcatttacagagcaacttgatgaaggtacacccaatagagagtcaggtgacacacagtcttttgcacagaagctccagctccgggtgccctccgtggagtctttgtttcgaagtccgataaaggaatctctattccggtcttcttctaaagagtctttggtacgaacatcttccagagaatccctgaatcgacttgacctggacagttctactgccagttttgatccaccctctgatatggatagcgaggctgaagacttggtagggaattcagacagtctcaacaaagaacagttgattcagcggttgcgaagaatggaacgaagcttaagtagctacaggggaaaatattctgagcttgttacagcttatcagatgcttcagagagagaagaaaaagctacaaggtatattaagtcagagtcaggataaatcacttcggagaatagcagaattaagagaggagctccaaatggaccagcaggcaaagaaacatctgcaagaggagtttgatgcatctttagaggagaaagatcagtatatcagtgttctccaaactcaggtttctctactgaaacaacgattacgaaatggcccgatgaatgttgatgtactgaaaccacttcctcagctggaaccacaggctgaagtcttcactaaagaagagaatccagaaagtgatggagagccagtagtggaagatggaacttctgtaaaaacactggaaacactccagcaaagagtgaagcgtcaagagaacctacttaagcgttgtaaggaaacaattcagtcacataaggaacaatgtacactattaactagtgaaaaagaagctctgcaagaacaactggatgaaagacttcaagaactagaaaagataaaggaccttcatatggccgagaagactaaacttatcactcagttgcgtgatgcaaagaacttaattgaacagcttgaacaagataagggaatggtaatcgcagagacaaaacgtcagatgcatgaaaccctggaaatgaaagaagaagaaattgctcaactccgtagtcgcatcaaacagatgactacccagggagaggaattacgggaacagaaagaaaagtccgaaagagctgcttttgaggaacttgaaaaagctttgagtacagcccaaaaaacagaggaagcacggagaaaactgaaggcagaaatggatgaacaaataaaaactatcgaaaaaacaagtgaggaggaacgcatcagtcttcaacaggaattaagtcgggtgaaacaggaggttgttgatgtaatgaaaaaatcctcagaagaacaaattgctaagctacagaagcttcatgaaaaggagctggccagaaaagagcaggaactgaccaagaagcttcagacccgagaaagggaatttcaggaacaaatgaaagtagctcttgaaaagagtcaatcagaatatttgaagatcagccaagaaaaagaacagcaagaatctttggccctagaagagttagagttgcagaaaaaagcaatcctcacagaaagtgaaaataaacttcgggaccttcagcaagaagcagagacttacagaactagaattcttgaattggaaagttctttggaaaaaagcttacaagaaaacaaaaatcagtcaaaagatttggctgttcatctggaagctgaaaaaaataagcacaataaggagattacagtcatggttgaaaaacacaagacagaattggaaagccttaagcatcagcaggatgccctttggactgaaaaactccaagtcttaaagcaacaatatcagactgaaatggaaaaacttagggaaaagtgtgaacaagaaaaagaaacattgttgaaagacaaagagattatcttccaggcccacatagaagaaatgaatgaaaagactttagaaaagcttgatgtgaagcaaacagaactagaatcattatcttctgaactgtcagaagtattaaaagcccgtcacaaactagaagaggaactttctgttctgaaagatcaaacagataaaatgaagcaggaattagaggccaagatggatgaacagaaaaatcatcaccagcagcaagttgacagtatcattaaagaacacgaggtatctatccagaggactgagaaggcattaaaagatcaaattaatcaacttgagcttctcttgaaggaaagggacaagcatttgaaagagcatcaggctcatgtagaaaatttagaggcagatattaaaaggtctgaaggggaactccagcaggcatctgctaagctggacgtttttcagtcttaccagagtgccacacatgagcagacaaaagcatatgaggaacagttggcccaattgcagcagaagttgttggatttggaaacagaaagaattcttcttaccaaacaggttgctgaagttgaagcacaaaagaaagatgtttgtactgagttagatgctcacaaaatccaggtgcaggacttaatgcagcaacttgaaaaacaaaatagtgaaatggagcaaaaagtaaaatctttaacccaagtctatgagtccaaacttgaagatggtaacaaagaacaggaacagacaaagcaaatcttggtggaaaaggaaaatatgattttacaaatgagagaaggacagaagaaagaaattgagatactcacacagaaattgtcagccaaggaggacagtattcatattttgaatgaggaatatgaaaccaaatttaaaaaccaagaaaaaaagatggaaaaagttaagcagaaagcaaaggagatgcaagaaacgttaaagaaaaaattactggatcaggaagccaaacttaagaaagagcttgaaaatactgctctagagcttagtcagaaagaaaaacagtttaatgccaaaatgctggaaatggcacaggctaactcagctggaatcagtgatgcagtgtcaagactggaaacaaaccaaaaagaacaaatagaaagtcttactgaggttcatcgacgagaactcaatgatgtcatatcaatctgggaaaagaaacttaatcagcaagctgaagaacttcaggaaatacatgaaatccaattacaggaaaaagaacaagaggtagcagaactgaaacaaaagatcctcctatttgggtgtgaaaaagaagagatgaacaaggaaataacatggctgaaggaagaaggtgttaagcaggatacaacattaaatgaattacaggaacagttaaagcagaagtctgcccatgtgaattctcttgcacaagatgaaactaaactgaaagctcatcttgaaaagctagaggttgacttgaataagtctctgaaggaaaatacttttcttcaagagcagctagttgaactgaagatgctggcagaagaagataagcggaaggtttctgagttgactagcaagttgaaaaccacagatgaagaattccagagtttgaaatcttcacatgaaaaaagtaacaaaagcctagaggacaagagcttggaatttaaaaaactgtctgaggaactagcgattcagctagatatttgctgtaagaaaaccgaagccttattagaagctaaaacaaatgagctaatcaacattagtagtagtaaaactaatgccattctttctaggatttctcattgtcagcaccgtacaactaaagttaaggaggcactgttaattaaaacttgcacagtttctgaattagaagcacaacttagacagttgacagaggagcaaaatacactaaatatttcttttcaacaggctactcatcagttagaagaaaaagaaaatcaaattaagagcatgaaggctgatattgaaagtcttgtaacagaaaaagaagccttacagaaggaaggaggcaatcagcaacaggctgcttctgaaaaggagtcttgtataacacagttgaagaaagagttatctgaaaacatcaatgctgtcacattgatgaaagaagagcttaaagaaaaaaaagttgagattagcagtcttagtaaacaactaactgatttgaatgttcagcttcaaaatagcatcagcctatccgaaaaagaagcagccatttcatcactaagaaagcagtatgatgaagaaaaatgtgaattgctggatcaggtgcaagatttatcttttaaagttgacactctgagtaaagagaaaatttctgctcttgagcaggtagatgactggtccaataaattctcagaatggaagaagaaagcacagtcaagatttacacagcatcaaaacactgttaaagaattgcagatccagcttgagttaaaatcaaaggaagcttatgaaaaggatgagcagataaatttattgaaggaagagcttgatcagcaaaataaaagatttgattgtttaaagggtgaaatggaagacgacaagagcaagatggagaaaaaggagtctaatttagaaacagagttaaagtctcaaacagcaagaattatggaattagaggaccatattacccagaaaactattgaaatagagtccttaaatgaagttcttaaaaattacaatcaacaaaaggatattgaacacaaagaattggttcagaaacttcaacattttcaagagttaggagaagaaaaggacaacagggttaaagaagctgaagaaaaaatcttaacacttgaaaaccaagtttattccatgaaagctgaacttgaaactaagaagaaagaattagaacatgtgaatttaagtgtgaaaagcaaagaggaggagttaaaggcattggaagataggcttgagtcagaaagtgctgcaaaattagcagagttgaagagaaaagctgaacaaaaaattgctgccattaagaagcagttgttatctcaaatggaagagaaagaagaacagtataaaaaaggtacagaaagccatttgagtgagctaaatacaaaattgcaggaaagagaaagggaagttcacatcttggaagaaaaacttaagtcagtggaaagttcacagtcagaaacattaattgtacccagatcagcaaaaaatgtggcagcatatactgaacaagaagaagcagattcccaaggctgtgtgcagaagacatatgaagaaaaaatcagtgttttacaaagaaacttaactgaaaaagaaaagctattgcagagggtagggcaggaaaaagaagagacagtttcttctcattttgaaatgcgatgccaataccaggagcgcttaataaagctagaacatgctgaggcaaagcaacatgaagatcaaagtatgataggtcatcttcaagaggagcttgaagaaaaaaacaagaaatattccttgatagtagcccagcatgtggaaaaagaaggaggtaaaaataacatacaggcaaagcaaaacttggaaaatgtgtttgacgacgtccagaaaaccctccaggagaaggaactaacctgtcagattttggagcaaaagataaaagagctggattcctgcttagtaagacagaaagaagtacatagagttgaaatggaagagttgacctcaaaatatgaaaaattacaggctttacaacagatggatggaagaaataaacccacagaacttttggaagaaaacactgaagaaaagtccaaatcacatttggtccaacccaaattgcttagtaacatggaagcccagcacaatgatctggagtttaaattagccggggcagaacgggagaaacagaaactgggcaaggagattgttagattgcagaaagaccttcgaatgttgagaaaggagcatcagcaagaattggaaatactaaagaaagaatatgatcaagaaagggaagagaaaatcaaacaggagcaggaagatcttgaactgaagcacaattccacattaaaacagctgatgagggagtttaatacacagctggcacaaaaggaacaagagctggaaatgaccataaaagaaactatcaataaggcccaggaggtggaggctgaacttttagaaagccatcaagaagagacaaatcagttacttaaaaaaattgctgagaaagatgatgatctaaaacgaacagccaaaagatatgaagaaatccttgatgctcgtgaagaagaaatgactgcaaaagtaagggacctgcagactcaacttgaggagctgcagaagaaataccagcaaaagctagagcaggaggagaaccctggcaatgataatgtaacaattatggagctacagacacagctagcacagaagacgactttaatcagtgattcgaaattgaaagagcaagagttcagagaacagattcacaatttagaagaccgtttgaagaaatatgaaaagaatgtatatgcaacaactgtggggacaccttacaaaggtggcaatttgtaccatacggatgtctcactctttggagaacctaccgaatttgagtatttgcgaaaagtgctttttgagtatatgatgggtcgtgagactaagaccatggcaaaagttataaccaccgtactgaagttccctgatgatcagactcagaaaattttggaaagagaagatgctcggctgatgtttacttcacctcgcagtggtatcttctgagtaaaccatcagtctgtgcttagttaacatgtgtcatggctccgatcttcatcttgaagaagagtgacattgggtgactgctgcttggaaaactgtccacacttgctactctttgagaatgaagttgtcattcagggcccctcatgtagccaaaagaccaagaaaaatctggcccacagataagttgcagactgcctttaaaatagattttatcagtggagaaatggtgatagttttttcttcagttttctcttgggaagagttttatgttgtttaaaagatattttgataacttaacctgctttatgggcttacataatattcctttcatccattctttttaaagaacggcttacctttcctatttatttttagggtgattttttaaaaagacttgtgcaatacattttgaggtgaaacttagtggattttttctgataaattagagcatttaattgactattttattcaggttgatctgttgaatatttgctaaagaccagttctttaagctaagacatgtaaaaaatcccaaatggcagtacctcattgtttacttagcttttgtacttatatttttcagaggaaaaaacactactgtaaattgtgaatagccaatacataactgtattgtatgcaaatctgtgattgttggcagtgtcatctctgagaaacagataaataaagtttatttactatataaca

SEQ ID NO: 12708 - DNA, 7673 bp, Homo sapiens
  source 1..7673: mol_type = unassigned DNA
gcaagcgcccttggcgcacagttcacctgctgccgttgtcgtcgccgccgcggctcccggggctggatggggggccgaggccagccagtggcacccggaagaaagagacgcggcggcggcgacgccgacaccctcaggacgagtgtccggacttgcccacagcctcaaggaggagacggcgaggcccggcccccgctgtccctggtgtaaagaagtcgccgtagccgtcgcggccgggactccccgggctctcgcccttcaggtttcgttgacactcaggaccgtacgtacgctgcgccatgttcaagaaactgaagcaaaagatcagcgaggagcagcagcagctccagcaggcgctggctcctgctcaggcgtcctccaattcttcaacaccaacaagaatgaggagcaggacatcttcatttacagagcaacttgatgaaggtacacccaatagagagaatgcatctactcatgcctcgaaatctcctgacagtgttaatggaagtgaaccaagcattcctcagtcaggtgacacacagtcttttgcacagaagctccagctccgggtgccctccgtggagtctttgtttcgaagtccgataaaggaatctctattccggtcttcttctaaagagtctttggtacgaacatcttccagagaatccctgaatcgacttgacctggacagttctactgccagttttgatccaccctctgatatggatagcgaggctgaagacttggtagggaattcagacagtctcaacaaagaacagttgattcagcggttgcgaagaatggaacgaagcttaagtagctacaggggaaaatattctgagcttgttacagcttatcagatgcttcagagagagaagaaaaagctacaaggtatattaagtcagagtcaggataaatcacttcggagaatagcagaattaagagaggagctccaaatggaccagcaggcaaagaaacatctgcaagaggagtttgatgcatctttagaggagaaagatcagtatatcagtgttctccaaactcaggtttctctactgaaacaacgattacgaaatggcccgatgaatgttgatgtactgaaaccacttcctcagctggaaccacaggctgaagtcttcactaaagaagagaatccagaaagtgatggagagccagtagtggaagatggaacttctgtaaaaacactggaaacactccagcaaagagtgaagcgtcaagagaacctacttaagcgttgtaaggaaacaattcagtcacataaggaacaatgtacactattaactagtgaaaaagaagctctgcaagaacaactggatgaaagacttcaagaactagaaaagataaaggaccttcatatggccgagaagactaaacttatcactcagttgcgtgatgcaaagaacttaattgaacagcttgaacaagataagggaatggtaatcgcagagacaaaacgtcagatgcatgaaaccctggaaatgaaagaagaagaaattgctcaactccgtagtcgcatcaaacagatgactacccagggagaggaattacgggaacagaaagaaaagtccgaaagagctgcttttgaggaacttgaaaaagctttgagtacagcccaaaaaacagaggaagcacggagaaaactgaaggcagaaatggatgaacaaataaaaactatcgaaaaaacaagtgaggaggaacgcatcagtcttcaacaggaattaagtcgggtgaaacaggaggttgttgatgtaatgaaaaaatcctcagaagaacaaattgctaagctacagaagcttcatgaaaaggagctggccagaaaagagcaggaactgaccaagaagcttcagacccgagaaagggaatttcaggaacaaatgaaagtagctcttgaaaagagtcaatcagaatatttgaagatcagccaagaaaaagaacagcaagaatctttggccctagaagagttagagttgcagaaaaaagcaatcctcacagaaagtgaaaataaacttcgggaccttcagcaagaagcagagacttacagaactagaattcttgaattggaaagttctttggaaaaaagcttacaagaaaacaaaaatcagtcaaaagatttggctgttcatctggaagctgaaaaaaataagcacaataaggagattacagtcatggttgaaaaacacaagacagaattggaaagccttaagcatcagcaggatgccctttggactgaaaaactccaagtcttaaagcaacaatatcagactgaaatggaaaaacttagggaaaagtgtgaacaagaaaaagaaacattgttgaaagacaaagagattatcttccaggcccacatagaagaaatgaatgaaaagactttagaaaagcttgatgtgaagcaaacagaactagaatcattatcttctgaactgtcagaagtattaaaagcccgtcacaaactagaagaggaactttctgttctgaaagatcaaacagataaaatgaagcaggaattagaggccaagatggatgaacagaaaaatcatcaccagcagcaagttgacagtatcattaaagaacacgaggtatctatccagaggactgagaaggcattaaaagatcaaattaatcaacttgagcttctcttgaaggaaagggacaagcatttgaaagagcatcaggctcatgtagaaaatttagaggcagatattaaaaggtctgaaggggaactccagcaggcatctgctaagctggacgtttttcagtcttaccagagtgccacacatgagcagacaaaagcatatgaggaacagttggcccaattgcagcagaagttgttggatttggaaacagaaagaattcttcttaccaaacaggttgctgaagttgaagcacaaaagaaagatgtttgtactgagttagatgctcacaaaatccaggtgcaggacttaatgcagcaacttgaaaaacaaaatagtgaaatggagcaaaaagtaaaatctttaacccaagtctatgagtccaaacttgaagatggtaacaaagaacaggaacagacaaagcaaatcttggtggaaaaggaaaatatgattttacaaatgagagaaggacagaagaaagaaattgagatactcacacagaaattgtcagccaaggaggacagtattcatattttgaatgaggaatatgaaaccaaatttaaaaaccaagaaaaaaagatggaaaaagttaagcagaaagcaaaggagatgcaagaaacgttaaagaaaaaattactggatcaggaagccaaacttaagaaagagcttgaaaatactgctctagagcttagtcagaaagaaaaacagtttaatgccaaaatgctggaaatggcacaggctaactcagctggaatcagtgatgcagtgtcaagactggaaacaaaccaaaaagaacaaatagaaagtcttactgaggttcatcgacgagaactcaatgatgtcatatcaatctgggaaaagaaacttaatcagcaagctgaagaacttcaggaaatacatgaaatccaattacaggaaaaagaacaagaggtagcagaactgaaacaaaagatcctcctatttgggtgtgaaaaagaagagatgaacaaggaaataacatggctgaaggaagaaggtgttaagcaggatacaacattaaatgaattacaggaacagttaaagcagaagtctgcccatgtgaattctcttgcacaagatgaaactaaactgaaagctcatcttgaaaagctagaggttgacttgaataagtctctgaaggaaaatacttttcttcaagagcagctagttgaactgaagatgctggcagaagaagataagcggaaggtttctgagttgactagcaagttgaaaaccacagatgaagaattccagagtttgaaatcttcacatgaaaaaagtaacaaaagcctagaggacaagagcttggaatttaaaaaactgtctgaggaactagcgattcagctagatatttgctgtaagaaaaccgaagccttattagaagctaaaacaaatgagctaatcaacattagtagtagtaaaactaatgccattctttctaggatttctcattgtcagcaccgtacaactaaagttaaggaggcactgttaattaaaacttgcacagtttctgaattagaagcacaacttagacagttgacagaggagcaaaatacactaaatatttcttttcaacaggctactcatcagttagaagaaaaagaaaatcaaattaagagcatgaaggctgatattgaaagtcttgtaacagaaaaagaagccttacagaaggaaggaggcaatcagcaacaggctgcttctgaaaaggagtcttgtataacacagttgaagaaagagttatctgaaaacatcaatgctgtcacattgatgaaagaagagcttaaagaaaaaaaagttgagattagcagtcttagtaaacaactaactgatttgaatgttcagcttcaaaatagcatcagcctatccgaaaaagaagcagccatttcatcactaagaaagcagtatgatgaagaaaaatgtgaattgctggatcaggtgcaagatttatcttttaaagttgacactctgagtaaagagaaaatttctgctcttgagcaggtagatgactggtccaataaattctcagaatggaagaagaaagcacagtcaagatttacacagcatcaaaacactgttaaagaattgcagatccagcttgagttaaaatcaaaggaagcttatgaaaaggatgagcagataaatttattgaaggaagagcttgatcagcaaaataaaagatttgattgtttaaagggtgaaatggaagacgacaagagcaagatggagaaaaaggagtctaatttagaaacagagttaaagtctcaaacagcaagaattatggaattagaggaccatattacccagaaaactattgaaatagagtccttaaatgaagttcttaaaaattacaatcaacaaaaggatattgaacacaaagaattggttcagaaacttcaacattttcaagagttaggagaagaaaaggacaacagggttaaagaagctgaagaaaaaatcttaacacttgaaaaccaagtttattccatgaaagctgaacttgaaactaagaagaaagaattagaacatgtgaatttaagtgtgaaaagcaaagaggaggagttaaaggcattggaagataggcttgagtcagaaagtgctgcaaaattagcagagttgaagagaaaagctgaacaaaaaattgctgccattaagaagcagttgttatctcaaatggaagagaaagaagaacagtataaaaaaggtacagaaagccatttgagtgagctaaatacaaaattgcaggaaagagaaagggaagttcacatcttggaagaaaaacttaagtcagtggaaagttcacagtcagaaacattaattgtacccagatcagcaaaaaatgtggcagcatatactgaacaagaagaagcagattcccaaggctgtgtgcagaagacatatgaagaaaaaatcagtgttttacaaagaaacttaactgaaaaagaaaagctattgcagagggtagggcaggaaaaagaagagacagtttcttctcattttgaaatgcgatgccaataccaggagcgcttaataaagctagaacatgctgaggcaaagcaacatgaagatcaaagtatgataggtcatcttcaagaggagcttgaagaaaaaaacaagaaatattccttgatagtagcccagcatgtggaaaaagaaggaggtaaaaataacatacaggcaaagcaaaacttggaaaatgtgtttgacgacgtccagaaaaccctccaggagaaggaactaacctgtcagattttggagcaaaagataaaagagctggattcctgcttagtaagacagaaagaagtacatagagttgaaatggaagagttgacctcaaaatatgaaaaattacaggctttacaacagatggatggaagaaataaacccacagaacttttggaagaaaacactgaagaaaagtccaaatcacatttggtccaacccaaattgcttagtaacatggaagcccagcacaatgatctggagtttaaattagccggggcagaacgggagaaacagaaactgggcaaggagattgttagattgcagaaagaccttcgaatgttgagaaaggagcatcagcaagaattggaaatactaaagaaagaatatgatcaagaaagggaagagaaaatcaaacaggagcaggaagatcttgaactgaagcacaattccacattaaaacagctgatgagggagtttaatacacagctggcacaaaaggaacaagagctggaaatgaccataaaagaaactatcaataaggcccaggaggtggaggctgaacttttagaaagccatcaagaagagacaaatcagttacttaaaaaaattgctgagaaagatgatgatctaaaacgaacagccaaaagatatgaagaaatccttgatgctcgtgaagaagaaatgactgcaaaagtaagggacctgcagactcaacttgaggagctgcagaagaaataccagcaaaagctagagcaggaggagaaccctggcaatgataatacacagctagcacagaagacgactttaatcagtgattcgaaattgaaagagcaagagttcagagaacagattcacaatttagaagaccgtttgaagaaatatgaaaagaatgtatatgcaacaactgtggggacaccttacaaaggtggcaatttgtaccatacggatgtctcactctttggagaacctaccgaatttgagtatttgcgaaaagtgctttttgagtatatgatgggtcgtgagactaagaccatggcaaaagttataaccaccgtactgaagttccctgatgatcagactcagaaaattttggaaagagaagatgctcggctgatgtcatggctccgatcttcatcttgaagaagagtgacattgggtgactgctgcttggaaaactgtccacacttgctactctttgagaatgaagttgtcattcagggcccctcatgtagccaaaagaccaagaaaaatctggcccacagataagttgcagactgcctttaaaatagattttatcagtggagaaatggtgatagttttttcttcagttttctcttgggaagagttttatgttgtttaaaagatattttgataacttaacctgctttatgggcttacataatattcctttcatccattctttttaaagaacggcttacctttcctatttatttttagggtgattttttaaaaagacttgtgcaatacattttgaggtgaaacttagtggattttttctgataaattagagcatttaattgactattttattcaggttgatctgttgaatatttgctaaagaccagttctttaagctaagacatgtaaaaaatcccaaatggcagtacctcattgtttacttagcttttgtacttatatttttcagaggaaaaaacactactgtaaattgtgaatagccaatacataactgtattgtatgcaaatctgtgattgttggcagtgtcatctctgagaaacagataaataaagtttatttactat

SEQ ID NO: 12709 - DNA, 2969 bp, Homo sapiens
  source 1..2969: mol_type = unassigned DNA
agtcgcctgcaggtggctgttcgcgtctccctgccgtgcaggcagctcgaaagccactctgttgtggggtcctcgcttcccttccacgtctcccggaagcggtagcagggccccggcgggtcggggaggaggtttactcagcttgggccccctccgggccagccgccgagggggcgcggcccaggacggcggctaggccgtagtgcagcctctccggagtcctcaggtttgccaataggattatcctgctgccatcatgtcttggtttgttgatcttgctggaaaggcagaagatcttttaaaccgagttgatcaaggggctgcaacagctctcagtaggaaagacaatgccagcaacatatatagcaaaaatactgactatactgaacttcaccagcaaaatacagatttgatatatcagactggacctaaatctacgtatatttcatcagcagctgataacattcgaaatcaaaaagccaccatcttagctggcactgcaaatgtgaaagtaggatctcggacaccagtagaggcctctcatcctgttgaaaatgcatctgttcctaggccttcatcccattttgtgcgaagaaaaaagtcagaacctgatgatgagctgctgtttgattttcttaatagttcacagaaggagcctaccgggagggtggaaatcagaaaggaaaaaggcaagacacctgtctttcagagctctcagacatcaagtgtcagttctgtgaaccccagtgtaaccaccatcaaaaccattgaagaaaattcttttgggagccaaacccacgaagctgccagtaactcagattctagccatgaaggtcaagaggaatcttcaaaggaaaatgtgtcatcaaatgctgcctgccctgaccacaccccaacacctaatgatgatggcaaatcacatgaactgtctaaccttcgactggagaatcagctgctgaggaatgaagttcagtctttaaatcaagaaatggcctcgttactccaaagatccaaagagactcaagaagaattaaacaaagcaagagcaagagttgaaaagtggaatgctgaccattcaaagagtgatcgaatgactcgaggactccgagcccaagtagatgacctgactgaagctgtggctgcaaaggattcccagctggctgtactgaaagtgagactccaggaagctgaccagctactgagtactcgcacagaagcattagaagccttacagagtgaaaaatcacgaataatgcaggatcaaagtgaaggtaacagcctgcagaatcaagctctgcagacttttcaggagagactgcatgaagcggatgccactctgaagagagagcaggagagctataaacagatgcagagcgagtttgctgcacgccttaataaagtggaaatggaacgtcagaatttagcagaagcaattacactggccgaaagaaaatactcagatgagaagaagagggttgatgaactgcagcagcaagtcaagctgtataagttgaacttggagtcctctaagcaggaattaattgactacaagcaaaaagctactagaatactgcaatctaaggaaaaattgattaacagcttgaaagaaggctctggttttgaaggcctagatagcagcactgccagtagcatggagctggaagaacttcggcatgagaaagagatgcagagggaggaaatacagaagctgatgggccagatacatcagctcagatccgaattacaggatatggaggcacagcaagttaatgaagcagaatcagcaagagaacagttacaggatctgcatgaccaaatagctgggcagaaagcatccaaacaagaactagagacagaactggagcgactgaagcaggagttccactatatagaagaagatctttatcgaacaaagaacacattgcaaagcagaattaaagatcgagacgaagaaattcaaaaactcaggaatcagcttaccaataaaactttaagcaatagcagtcagtctgagttagaaaatcgactccatcagctaacagagactctcatccagaaacagaccatgctggagagtctcagcacagaaaagaactccctggtctttcaactggagcgcctcgaacagcagatgaactccgcctctggaagtagtagtaatgggtcttcgattaatatgtctggaattgacaatggtgaaggcactcgtctgcgaaatgttcctgttctttttaatgacacagaaactaatctggcaggaatgtacggaaaagttcgcaaagctgctagttcaattgatcagtttagtattcgcctgggaatttttctccgaagataccccatagcgcgagtttttgtaattatatatatggctttgcttcacctctgggtcatgattgttctgttgacttacacaccagaaatgcaccacgaccaaccatatggcaaatgaaccaagcccagttgttgcagtgattggttgtctttttctagacttgggatctgcaagaaggccaattgcctaaaatttctgagaacagtgcacaagattattttatcactacaagcttttaactttttaagttattgtacaagtattctacctaaatcttccaatttcctttaaatggtaagagtttctaaaacagacaataatttaacaagctcagctctgctttatctgagtttagtggtcctaatatatatgtagagaaagatggtggggttgttcacctctgtacagaccatctgtatgttaggtgacattgattatgggttataatcagggaaactaattgtatttagtgacaaaaataaaaagtttttttttataattcagtctgcttttggattttcatatatttaactttgcaaaaagatttactttgtacatgttacaggcttgattggtgtaaatctttttataaatacataaataaaagaaaaatatgcatttttcttttctaaaa

SEQ ID NO: 12710 - DNA, 2827 bp, Homo sapiens
  source 1..2827: mol_type = unassigned DNA
gcttcccttccacgtctcccggaagcggtagcagggccccggcgggtcggggaggaggtttactcagcttgggccccctccgggccagccgccgagggggcgcggcccaggacggcggctaggccgtagtgcagcctctccggagtcctcaggtttgccaataggattatcctgctgccatcatgtcttggtttgttgatcttgctggaaaggcagaagatcttttaaaccgagttgatcaaggggctgcaacagctctcagtaggaaagacaatgccagcaacatatatagcaaaaatactgactatactgaacttcaccagcaaaatacagatttgatatatcagactggacctaaatctacgtatatttcatcagcagctgataacattcgaaatcaaaaagccaccatcttagctggcactgcaaatgtgaaagtaggatctcggacaccagtagaggcctctcatcctgttgaaaatgcatctgttcctaggccttcatcccattttgtgcgaagaaaaaagtcagaacctgatgatgagctgctgtttgattttcttaatagttcacagaaggagcctaccgggagggtggaaatcagaaaggaaaaaggcaagacacctgtctttcagagctctcagacatcaagtgtcagttctgtgaaccccagtgtaaccaccatcaaaaccattgaagaaaattcttttgggagccaaacccacgaagctgccagtaactcagattctagccatgaaggtcaagaggaatcttcaaaggaaaatgtgtcatcaaatgctgcctgccctgaccacaccccaacacctaatgatgatggcaaatcacatgaactgtctaaccttcgactggagaatcagctgctgaggaatgaagttcagtctttaaatcaagaaatggcctcgttactccaaagatccaaagagactcaagaagaattaaacaaagcaagagcaagagttgaaaagtggaatgctgaccattcaaagagtgatcgaatgactcgaggactccgagcccaagtagatgacctgactgaagctgtggctgcaaaggattcccagctggctgtactgaaagtgagactccaggaagctgaccagctactgagtactcgcacagaagcattagaagccttacagagtgaaaaatcacgaataatgcaggatcaaagtgaaggtaacagcctgcagaatcaagctctgcagacttttcaggagagactgcatgaagcggatgccactctgaagagagagcaggagagctataaacagatgcagagcgagtttgctgcacgccttaataaagtggaaatggaacgtcagaatttagcagaagcaattacactggccgaaagaaaatactcagatgagaagaagagggttgatgaactgcagcagcaagtcaagctgtataagttgaacttggagtcctctaagcaggaattaattgactacaagcaaaaagctactagaatactgcaatctaaggaaaaattgattaacagcttgaaagaaggctctggttttgaaggcctagatagcagcactgccagtagcatggagctggaagaacttcggcatgagaaagagatgcagagggaggaaatacagaagctgatgggccagatacatcagctcagatccgaattacaggatatggaggcacagcaagttaatgaagcagaatcagcaagagaacagttacaggatctgcatgaccaaatagctgggcagaaagcatccaaacaagaactagagacagaactggagcgactgaagcaggagttccactatatagaagaagatctttatcgaacaaagaacacattgcaaagcagaattaaagatcgagacgaagaaattcaaaaactcaggaatcagcttaccaataaaactttaagcaatagcagtcagtctgagttagaaaatcgactccatcagctaacagagactctcatccagaaacagaccatgctggagagtctcagcacagaaaagaactccctggtctttcaactggagcgcctcgaacagcagatgaactccgcctctggaagtagtagtaatgggtcttcgattaatatgtctggaattgacaatggtgaaggcactcgtctgcgaaatgttcctgttctttttaatgacacagaaactaatctggcaggaatgtacggaaaagttcgcaaagctgctagttcaattgatcagtttaggctttgcttcacctctgggtcatgattgttctgttgacttacacaccagaaatgcaccacgaccaaccatatggcaaatgaaccaagcccagttgttgcagtgattggttgtctttttctagacttgggatctgcaagaaggccaattgcctaaaatttctgagaacagtgcacaagattattttatcactacaagcttttaactttttaagttattgtacaagtattctacctaaatcttccaatttcctttaaatggtaagagtttctaaaacagacaataatttaacaagctcagctctgctttatctgagtttagtggtcctaatatatatgtagagaaagatggtggggttgttcacctctgtacagaccatctgtatgttaggtgacattgattatgggttataatcagggaaactaattgtatttagtgacaaaaataaaaagtttttttttataattcagtctgcttttggattttcatatatttaactttgcaaaaagatttactttgtacatgttacaggcttgattggtgtaaatctttttataaatacataaataaaagaaaaatatgcatttttcttttct

SEQ ID NO: 12711 - DNA, 2418 bp, Homo sapiens
  source 1..2418: mol_type = unassigned DNA
ggaagcggtagcagggccccggcgggtcggggaggaggtttactcagcttgggccccctccgggccagccgccgagggggcgcggcccaggacggcggctaggccgtagtgcagcctctccggagtcctcaggtttgccaataggattatcctgctgccatcatgtcttggtttgttgatcttgctggaaaggcagaagatcttttaaaccgagttgatcaaggggctgcaacagctctcagtaggaaagacaatgccagcaacatatatagcaaaaatactgactatactgaacttcaccagcaaaatacagatttgatatatcagactggacctaaatctacgtatatttcatcagcagctgataacattcgaaatcaaaaagccaccatcaaaaccattgaagaaaattcttttgggagccaaacccacgaagctgccagtaactcagattctagccatgaaggtcaagaggaatcttcaaaggaaaatgtgtcatcaaatgctgcctgccctgaccacaccccaacacctaatgatgatggcaaatcacatgaactgtctaaccttcgactggagaatcagctgctgaggaatgaagttcagtctttaaatcaagaaatggcctcgttactccaaagatccaaagagactcaagaagaattaaacaaagcaagagcaagagttgaaaagtggaatgctgaccattcaaagagtgatcgaatgactcgaggactccgagcccaagtagatgacctgactgaagctgtggctgcaaaggattcccagctggctgtactgaaagtgagactccaggaagctgaccagctactgagtactcgcacagaagcattagaagccttacagagtgaaaaatcacgaataatgcaggatcaaagtgaaggtaacagcctgcagaatcaagctctgcagacttttcaggagagactgcatgaagcggatgccactctgaagagagagcaggagagctataaacagatgcagagcgagtttgctgcacgccttaataaagtggaaatggaacgtcagaatttagcagaagcaattacactggccgaaagaaaatactcagatgagaagaagagggttgatgaactgcagcagcaagtcaagctgtataagttgaacttggagtcctctaagcaggaattaattgactacaagcaaaaagctactagaatactgcaatctaaggaaaaattgattaacagcttgaaagaaggctctggttttgaaggcctagatagcagcactgccagtagcatggagctggaagaacttcggcatgagaaagagatgcagagggaggaaatacagaagctgatgggccagatacatcagctcagatccgaattacaggatatggaggcacagcaagttaatgaagcagaatcagcaagagaacagttacaggatctgcatgaccaaatagctgggcagaaagcatccaaacaagaactagagacagaactggagcgactgaagcaggagttccactatatagaagaagatctttatcgaacaaagaacacattgcaaagcagaattaaagatcgagacgaagaaattcaaaaactcaggaatcagcttaccaataaaactttaagcaatagcagtcagtctgagttagaaaatcgactccatcagctaacagagactctcatccagaaacagaccatgctggagagtctcagcacagaaaagaactccctggtctttcaactggagcgcctcgaacagcagatgaactccgcctctggaagtagtagtaatgggtcttcgattaatatgtctggaattgacaatggtgaaggcactcgtctgcgaaatgttcctgttctttttaatgacacagaaactaatctggcaggaatgtacggaaaagttcgcaaagctgctagttcaattgatcagtttagtattcgcctgggaatttttctccgaagataccccatagcgcgagtttttgtaattatatatatggctttgcttcacctctgggtcatgattgttctgttgacttacacaccagaaatgcaccacgaccaaccatatggcaaatgaaccaagcccagttgttgcagtgattggttgtctttttctagacttgggatctgcaagaaggccaattgcctaaaatttctgagaacagtgcacaagattattttatcactacaagcttttaactttttaagttattgtacaagtattctacctaaatcttccaatttcctttaaatggtaagagtttctaaaacagacaataatttaacaagctcagctctgctttatctgagtttagtggtcctaatatatatgtagagaaagatggtggggttgttcacctctgtacagaccatctgtatgttaggtgacattgattatgggttataatca

SEQ ID NO: 12712 - DNA, 2894 bp, Homo sapiens
  source 1..2894: mol_type = unassigned DNA
cggggtcagcaccgcggagacccccctcgcccggccccgcgacagcctccgagcgcccccggatcatggccaccgaggtccacaatctgcaggagctccggcgaagtgcctcactggccaccaaggtctttatccagagagactacagcgatgggaccatctgtcagttccagaccaaattccccccagagctggacagccggatcgagcggcagctctttgaagagactgtgaagaccctcaacggattttacgcagaggctgagaagattgggggcagctcctacctcgagggctgcctggcctgcgccacggcctacttcatcttcctctgcatggagacccactatgagaaggttctcaagaagatttcccgctacatccaggagcagaatgagaagatctttgcacctcgaggcctcctacttacagaccctgtggagcgtgggatgagggttattgagatctccatctacgaggaccggtgcagcagtggcagctccagcagcggcagcagcagcggcagtggcagcagcagcggtgggggtggtggggcgggggcccggtgactggccgagagtccctgtagggaggtgtatggccggagtgagggccttgcagacctgcggcggctgcgctaccagagcacccgcttctgagtcattctttgggctcaccctgctgcccggggtgggagggagggtgacgggcctcatatttcctgtgggccatcaacctatgccccctgtccctcacccccgtctggatcagtccatttcctgacctgggggcttttccttcccgatggggctggtctgggccacacagagacagatcttcctaggaaggctggggtggggagaacacaacctaggcggcccctctcttccacagcccctctcccaaccctgcgaggggggccgaggcctgccacatagaggactcccacactgcatgacccctcatcccaaacccatatccaccaggactctttcccttgggccctgcgtcccgtggctgtctcccagtatctgttccttctcatgcccctgcagggccccggcctgtctatgatcctgcctccaccaaattcaaggtgtggggagacgggtgccgtggttgggagctgttcagcgcactcctgacctcttctagacctatggctttcctgtcctgcattcagagctagaggccagctcggccttgcgagaagcatccaactttgagactttgcaggctgccaggtgctggttggggggcacagagcctggggctctgggaggtaatatgggggtctgggaaactccgtgaagagacatagccatgcggggcctgaatctcctgaactacagccagtttcctgagattagaacctgtgtgtatgcacatgtgaatgtatgtgtgagtgcacatgtgtgtaagtgcagtgtgcgtaaatgtgtgagtctgcgtgtgttagcatgcctgtatgtgagcgcgtgtgtgagcgcatgtgtgtgcaccagtgcacaagtgtatgaatgtggacacatttataagcacacctgtgtgtgtctgagtacatgtgcacacacgtgtgcacaaatgtgcatttatatgagtgtgagtgcatgcatgtgcatgaacatgtgtgcacaagcatgtgtgtatgagtgttcatgtgtatgagtgtgtgtgtatgcaggtgagtgcatgtgtgtgtgagtgtgtttgtgtgttccccttggctgccaggccaacgactgcttctctgcatcctgctgtcttcgctacctgagggtctgtgacttcttccctgtgtgggtccagcctgaccccctgtaagtaaatgtccaaaagccccttgcccctcccctagggctaccagggaacatactctactgcatatgttctagtggaagagaagccggggttctaggaaagaagagccaaactttggtggcctttggtgccccctctcagctccccatgacaagacaacggggctgcagacactgtgtgttcagcctgcccaggggctggggctctttaaggctttgtaggtgaggtttccatggaccttcaaaggtgccagcagcctgcaggggaaaggcaaactccctccttgcaaggaaaggagatgtccagccaatgatgcccggcttctgaggcccagaggagcaggtgggatgggagcagcccctggggctggtgtcccgaagatgaaatgaagggggctgcctatctcagttggcgggaggtgttagaagtggatgtgcaagaccagccactggaggtagctctctggagtcaaagagaggcctgcttttctaccagacatgggagcagcatgtaggatacaagggcctacccagagaccagagagagtcagcctagtccttgcagcctcaggaagtcctcggcccaagtgagtcctggtccaaggatccccctggagagccgcagttcagtgggctccaccgcagcccctggccacggcctatgccctccctgggcccctgtggggctgggcattgtgtctgacctgtgcatctcccatgggagggctgggcacaggcagtgctatggccttttttttttttttctttttccaataaaagaacttgcccagcgtgaagctctgtgatgctttctctgccccgtgacgatggagggtcagttctatgctccaggaccacatgaggggatactcagctgcctgaactggacctgacatggggagcaggatgaactctgtcttcttggagcttgcagtctactgaagaggcagacacctcagcatctctaatctggaatctttggggcacttgtagccttgggtgggggaacaggttggactgaaagcgaggccaaaagtaatcaattaatgatatcaataaatcctcatttcttga

SEQ ID NO: 12713 - DNA, 5428 bp, Homo sapiens
  source 1..5428: mol_type = unassigned DNA
ggcggctgcggggcgaggacggcggcggaccggggcagccccgcgccctggccaggaataattggtggggatggattgtgaaatggagctgcataaatatccagtttgccaactgagctaagaaatgctggataaaagtaaaagctctactgagatgaagaaagaaaaagaatacctgctcagctccagagacacgtaaagggacagagattgggggacagaaggaagtgcattaattccttccacgacccctgaagagcagcggtgggtctgagcatcctatctccaggaagcaggccagcaggcaagccagctgccacctcgtcctgtgcaaagcacaggcaccgtccccaaaagatttccaaagatgatgttaaacccagccacggttctgatctccaggaaagcaattgctgtggtacaaaaggacaagggttaaaagagaacagtgggagctctctttcccaactaactcacgcagtgtgacgcagaggctttcagcacagcccagggtgcccgggactgaaaactccttcaccagccccctccacaggatatagaagacttagatcactacgagatgaaagcagagcccattagtgggaaaaagttggaggatgaaggaattgaaaaagaaaatttggcaatattagagaaattaggaagactgaaagacaagagcatttaactgcaaactgttgtcgttgtcaactgggttgtcttcctgaagtatgaatccggtatgtattgtgtggaggagcattacgtactgaacttctcacaaaacagggctgaagcagtgcctactcgacagaaccggtcatcgtacaaagaaatgccacgtgactcaaaggcaaagccagagtgcagcttggagcaaagaagatgatgtctcactctgtcacccaagatggagtgcaatggcacgatctcagctcactgcaacctctgcctcccaggttcaagcaattatcctgcctcagccacccgagtagctgagattacaggcctctgccaccatgctcagctattttttgtatttttagtagagacggggtttcaccatgttgggcaggctagtcttggaactactgacctcaggtgatccgcccactttggcctcccgaaagtgctgggattacagtcatgagccaccatgcccagcctatttatttctgattctttaagggtgactggatgtgttgatcagcgctcgctgggatttggctgacgtggccccagccccgcctccctccccaccccacaatggcagaagaaactggacagagtaaattagctgcagccaagaaaaagttcaaagaatattggcagagaaaccgccctggtgttccagcagcagcgaagaggaacacgaaagcaaatggcagtagccctgagacggccgcttctggtggttgccactcatctgaggcttcctcctccgcctcctcctctctgcatgcgcgtcagagcccgtgccaagaacaagcagcagtcctgaactcgaggtccataaaaatcagtcgactgaatgacaccatcaaatctttgaaacaacagaagaaacaagtggaacatcagctggaagaagaaaagaaagcaaacaatgagaaacagaaagctgaaagggagctagagggtcaaatccagagattgaacacagagaaaaagaaactaaatacggacctgtatcacatgaaacattctctcagatactttgaagaagagtccaaggatctggccggccgcctgcaacgttcatcgcagcgtataggagagttagagtggtctctctgtgctgtcgccgccacacagaagaagaagccggatgggttctcgagccgcagtaaagcacttctcaagcggcagttagagcagtccatacgggagcagatactgctgaaaggacacgtgacacagttgaaggagtcgcttaaagaagtccagctggagagagatcaatatgctgaacaaataaaaggagagagggcccagtggcagcagaggatgaggaaaatgtcgcaggaggtttgcacattgaaggaggagaagaagcatgatacgcatcgggtagaggagctggagaggagcttgtccagactcaaaaaccagatggctgagccactgcccccggatgccccagcagtgtcctctgaggtggagctgcaagacctgaggaaggagctggagagagtggcaggagagctccaggctcaggtggaaaacaatcagtgcatcagtctcctgaaccgtgggcaaaaggagaggcttcgcgagcaggaggagaggcttcaggagcagcaggagaggcttcgggaacgggagaagaggcttcagcagctggccgagccacagagcgacttggaggagctgaagcacgagaacaagagcgcactgcagttggagcagcaagtaaaggagctgcaggagaagctgggccaggtgatggagacgctcacctcggccgagaaggagccagaggcagcagtcccagcctcagggactgggggcgagtctagcggccttatggacctcctggaggagaaggcggacctgagggagcatgtggagaaactggaacttggattcatccagtaccggagagagagatgccatcagaaagtacatcgccttctaacagagccaggggacagtgccaaagatgcgtcaccgggaggaggccatcatcaggctggcccaggacaaggaggagaggaaggtgaagctgctggagctgcaggagatggtgttgcggcttgtggcagctacagcgaggggcacggcaaattcctggccgctgcccggaaccctgctgctgaacccagtccaggagccccagccccccaggagctcggggctgccgacaagcatggtgatctttgtgaggcgagcctcaccaacagcgtggagcctgcacaaggagaagccagggagggttcttcccaggacaaccctactgcacagccagtcctgcagctccttggtgagatgcaggaccaccaggagcacccaggcttgggcagcaactgctgtgtgccatgcttttgctgggcttggctgccgagaagaaggagataaacaccaccatcatcaaagagctgctcaagaaatttttaaaaacgaaacaaagttatggggttaatctcctacacaattcatttacttcatttgaatgttagagctactcatgattatttgtgtttctaatttatagtttaagtttatttgtaaaaagttaaaagagagtgggtctctgtgcctctcactgatgttcactctggcatcctttagcatttttcttttttcatttcataattgtaggtcattagcatgcatatcgagtttgcccttacgtggtgggagttcaaacacacaaagacccactctttgcacaaaactgttctcgctggtttggaataggctcccgtgcttttttaatgttattgcagcatggatgttcattacagaattcagataaaatttgctaatgttctgctatgatgtttgatctcatcttaatcacagtgagctcttccatagctcaatatgcggtttgccctcaagtgtgcactgtttattactttgtaatatgccactatgagtactgacacttagagctgtttaaaggccgagaactggaaacagcctttcctccattttctgtgtattggtgatgggagtgataaccttttgggggagctttctaaatctcgcagaagaggaaagtggcctgctctggcaggtatgtgcaggatacagtgtgtttcatctgttccggtgccaagaatgagcactgtactgtggcagttccctttggatttgtatgtgctctgggctcatgaagatattgcatcgtgagctgcagcagttgcactctttttcagtgacctaaaaatggcttatttccgaggaatgaaaggctgccatcgttggctgtggatgtggaaaacctttcctagcttagagcatttgtatctacaatacattttaaagtcagagttcgtgttccctgttttaatcacatgactacctgtcccagtacacgaaagggcgctggttggcattcttcttaatgtatttagtaaagatcataagacatcctttaagagtttaaatgtctctgaaacaggcatacaggctctagtcaagaatgaattagagtgaaggaaagctgtgtgacacctggcattcctctctgttcatggagcttctttgaggcttgaagtttgattttactatctagacctctctggctaatacctattcttcaaccacctcggttactctgacataggaatttacttcttttccttgagtggaaaacactttagaaaataataacaaacattattataaactaatatatgtgagagtacttagttgaaacaaaaaggaattttagtagacagtattatattatctttgaaaatcaaggagaagtttatgcaactgaaaatgtttacacactgtgctgcaatctactgtttgtgaatgtcaatgtattatcaggaaacatgtctatacgatcgcagagttgtatttcctcacaaacttctttacgaagagtgaaatatgtttttgtacctctcagtttcagtcagggacatattttgtgcaatatttctgtgattgtgcctatgcgtgatgagtgaatgcatttcaatcatacattgcctaaatcataacttgatgatgcttgggaaagaatcaacagttaaaacttcatgaagttctaatgtctgtgttccaaaacacatcacattattaggttgtagggagatatgtatgtgtgctccctggggtggggagttttctagttactagaccatctccatttttagcacttggcagcctcatgatccttttataaataggagattaacaggagagcagcaatacgattttgccaatggaataacagatttgccggcattcactgaaagagggcagatattgggtccttgtgacttcaactgactcttccgaattgtatgaatttatcaatgtattagataaacccagtttcagaataataaagaaaaaatattagaccaaataatgtggctaatagtggtatgatttctagcccgtgggtttaaaactgtatcctaaagagtcattttaaaataatataaatatttaaaagtgtaactgctatctttatgttctgaaataagttaaaacattttaaaatatgaatactgtagtttaaaagaaagaaatggtgggaaggaaaagtagagaaagaaatgccaattccagtccaaagctttgtttgccaagttttcttagaatgaattttaccaatgtatgggttcttgttaacagaatgtgtaacagaaatactgaaagacttttgcctaaagtggcattattgactgctggtgtgatgctactgtaatgtgataaattattaaattgttgcaaa

SEQ ID NO: 12714 - DNA, 6516 bp, Homo sapiens
  source 1..6516: mol_type = unassigned DNA
ggcggctgcggggcgaggacggcggcggaccggggcagccccgcgccctggccaggaataattggtggggatggattgtgaaatggagctgcataaatatccagtttgccaactgagctaagaaatgctggataaaagtaaaagctctactgagatgaagaaagaaaaagaatacctgctcagctccagagacacgtaaagggacagagattgggggacagaaggaagtgcattaattccttccacgacccctgaagagcagcggtgggtctgagcatcctatctccaggaagcaggccagcaggcaagccagctgccacctcgtcctgtgcaaagcacaggcaccgtccccaaaagatttccaaagatgatgttaaacccagccacggttctgatctccaggaaagcaattgctgtggtacaaaaggacaagggttaaaagagaacagtgggagctctctttcccaactaactcacgcagtgtgacgcagaggctttcagcacagcccagggtgcccgggactgaaaactccttcaccagccccctccacaggatatagaagacttagatcactacgagatgaaagcagagcccattagtgggaaaaagttggaggatgaaggaattgaaaaagaaaatttggcaatattagagaaattaggaagactgaaagacaagagcatttaactgcaaactgttgtcgttgtcaactgggttgtcttcctgaagtatgaatccggtatgtattgtgtggaggagcattacgtactgaacttctcacaaaacagggctgaagcagtgcctactcgacagaaccggtcatcgtacaaagaaatgccacgtgactcaaaggcaaagccagagtgcagcttggagcaaagaagatgatgtctcactctgtcacccaagatggagtgcaatggcacgatctcagctcactgcaacctctgcctcccaggttcaagcaattatcctgcctcagccacccgagtagctgagattacaggcctctgccaccatgctcagctattttttgtatttttagtagagacggggtttcaccatgttgggcaggctagtcttggaactactgacctcaggtgatccgcccactttggcctcccgaaagtgctgggattacagtcatgagccaccatgcccagcctatttatttctgattctttaagggtgactggatgtgttgatcagcgctcgctgggatttggctgacgtggccccagccccgcctccctccccaccccacaatggcagaagaaactggacagagtaaattagctgcagccaagaaaaagttcaaagaatattggcagagaaaccgccctggtgttccagcagcagcgaagaggaacacgaaagcaaatggcagtagccctgagacggccgcttctggtggttgccactcatctgaggctgtgagtcttgcctggacaggcttttggggacagggggcccaaggagcagtagagggcaatcgttaagattgtggatggactgttgggtactggtgaaggattctggatttggccgggcacagtggctcacgcctgtaatccccacacttcgggagaccgaggcaggtggatcacaaggtcaggagatcgagaccatccaggcaaacacggtgaaatactaaaaaatacaaaaaaaaaagccgggcgtggtggcgggcgcctgcagtcccagctgctccggagtctgagggaggagaatggcgtgaacctaggaggcggagcttgcagtgagccaagatcacgccactgcactccagcctggaaggcagagagagactccgtttcaaaaaagaaaagaattctgggtttgaatcctgcctctccgtctgctagggatatgatttagggcaagttgcttgagctctttgggcctctgttttcacgtctgtatgatagaggtggtattgtttgacttgtatttgtgaagtttcaatgagattgataattgtcgattttatgttaatccctagtacatggcctgctgtcaacacccaggacacccaggatatggtctttgctgtttgattttcctcatccccagtctcaaggggaagccaggacaatgagaacagccacttcccatcaggagtcactgcaaggcccccagggtgggatggtggggagataagaaccgtgagagaagttggcacaaaggagttatgggacaaagggtccaagataggcagaaaagaaaatgttgccagttgatggggaagaaaggaagtcggagggctcagacactgagggggacagaacatctccatgtgcagtctcatctcttatagtcagcaacaggtatccacggggagggccctacatcatctgctaccctgaaggatctggaggtaggaggctctgggtggaggtgcagtgaccccgcaggccagccctccaacctcctcccgcagcggggactgggtgcccctctgccagctgagacagcccacacacaacccagccctaatgatcgttctctctacctctcccccaagtcctcctccgcctcctcctctctgcatgcgcgtcagagcccgtgccaagaacaagcagcagtcctgaactcgaggtccataaaaatcagtcgactgaatgacaccatcaaatctttgaaacaacagaagaaacaagtggaacatcagctggaagaagaaaagaaagcaaacaatgagaaacagaaagctgaaagggagctagagggtcaaatccagagattgaacacagagaaaaagaaactaaatacggacctgtatcacatgaaacattctctcagatactttgaagaagagtccaaggatctggccggccgcctgcaacgttcatcgcagcgtataggagagttagagtggtctctctgtgctgtcgccgccacacagaagaagaagccggatgggttctcgagccgcagtaaagcacttctcaagcggcagttagagcagtccatacgggagcagatactgctgaaaggacacgtgacacagttgaaggagtcgcttaaagaagtccagctggagagagatcaatatgctgaacaaataaaaggagagagggcccagtggcagcagaggatgaggaaaatgtcgcaggaggtttgcacattgaaggaggagaagaagcatgatacgcatcgggtagaggagctggagaggagcttgtccagactcaaaaaccagatggctgagccactgcccccggatgccccagcagtgtcctctgaggtggagctgcaagacctgaggaaggagctggagagagtggcaggagagctccaggctcaggtggaaaacaatcagtgcatcagtctcctgaaccgtgggcaaaaggagaggcttcgcgagcaggaggagaggcttcaggagcagcaggagaggcttcgggaacgggagaagaggcttcagcagctggccgagccacagagcgacttggaggagctgcacgagaacaagagcgcactgcagttggagcagcaagtaaaggagctgcaggagaagctgggccaggtgatggagacgctcacctcggccgagaaggagccagaggcagcagtcccagcctcagggactgggggcgagtctagcggccttatggacctcctggaggagaaggcggacctgagggagcatgtggagaaactggaacttggattcatccagtaccggagagagagatgccatcagaaagtacatcgccttctaacagagccaggggacagtgccaaagatgcgtcaccgggaggaggccatcatcaggctggcccaggacaaggaggagaggaaggtgaagctgctggagctgcaggagatggtgttgcggcttgtggcagctacagcgaggggcacggcaaattcctggccgctgcccggaaccctgctgctgaacccagtccaggagccccagccccccaggagctcggggctgccgacaagcatggtgatctttgtgaggcgagcctcaccaacagcgtggagcctgcacaaggagaagccagggagggttcttcccaggacaaccctactgcacagccagtcctgcagctccttggtgagatgcaggaccaccaggagcacccaggcttgggcagcaactgctgtgtgccatgcttttgctgggcttggctgccgagaagaaggagataaacaccaccatcatcaaagagctgctcaagaaatttttaaaaacgaaacaaagttatggggttaatctcctacacaattcatttacttcatttgaatgttagagctactcatgattatttgtgtttctaatttatagtttaagtttatttgtaaaaagttaaaagagagtgggtctctgtgcctctcactgatgttcactctggcatcctttagcatttttcttttttcatttcataattgtaggtcattagcatgcatatcgagtttgcccttacgtggtgggagttcaaacacacaaagacccactctttgcacaaaactgttctcgctggtttggaataggctcccgtgcttttttaatgttattgcagcatggatgttcattacagaattcagataaaatttgctaatgttctgctatgatgtttgatctcatcttaatcacagtgagctcttccatagctcaatatgcggtttgccctcaagtgtgcactgtttattactttgtaatatgccactatgagtactgacacttagagctgtttaaaggccgagaactggaaacagcctttcctccattttctgtgtattggtgatgggagtgataaccttttgggggagctttctaaatctcgcagaagaggaaagtggcctgctctggcaggtatgtgcaggatacagtgtgtttcatctgttccggtgccaagaatgagcactgtactgtggcagttccctttggatttgtatgtgctctgggctcatgaagatattgcatcgtgagctgcagcagttgcactctttttcagtgacctaaaaatggcttatttccgaggaatgaaaggctgccatcgttggctgtggatgtggaaaacctttcctagcttagagcatttgtatctacaatacattttaaagtcagagttcgtgttccctgttttaatcacatgactacctgtcccagtacacgaaagggcgctggttggcattcttcttaatgtatttagtaaagatcataagacatcctttaagagtttaaatgtctctgaaacaggcatacaggctctagtcaagaatgaattagagtgaaggaaagctgtgtgacacctggcattcctctctgttcatggagcttctttgaggcttgaagtttgattttactatctagacctctctggctaatacctattcttcaaccacctcggttactctgacataggaatttacttcttttccttgagtggaaaacactttagaaaataataacaaacattattataaactaatatatgtgagagtacttagttgaaacaaaaaggaattttagtagacagtattatattatctttgaaaatcaaggagaagtttatgcaactgaaaatgtttacacactgtgctgcaatctactgtttgtgaatgtcaatgtattatcaggaaacatgtctatacgatcgcagagttgtatttcctcacaaacttctttacgaagagtgaaatatgtttttgtacctctcagtttcagtcagggacatattttgtgcaatatttctgtgattgtgcctatgcgtgatgagtgaatgcatttcaatcatacattgcctaaatcataacttgatgatgcttgggaaagaatcaacagttaaaacttcatgaagttctaatgtctgtgttccaaaacacatcacattattaggttgtagggagatatgtatgtgtgctccctggggtggggagttttctagttactagaccatctccatttttagcacttggcagcctcatgatccttttataaataggagattaacaggagagcagcaatacgattttgccaatggaataacagatttgccggcattcactgaaagagggcagatattgggtccttgtgacttcaactgactcttccgaattgtatgaatttatcaatgtattagataaacccagtttcagaataataaagaaaaaatattagaccaaataatgtggctaatagtggtatgatttctagcccgtgggtttaaaactgtatcctaaagagtcattttaaaataatataaatatttaaaagtgtaactgctatctttatgttctgaaataagttaaaacattttaaaatatgaatactgtagtttaaaagaaagaaatggtgggaaggaaaagtagagaaagaaatgccaattccagtccaaagctttgtttgccaagttttcttagaatgaattttaccaatgtatgggttcttgttaacagaatgtgtaacagaaatactgaaagacttttgcctaaagtggcattattgactgctggtgtgatgctactgtaatgtgataaattattaaattgttgcaaa

SEQ ID NO: 12715 - DNA, 4335 bp, Homo sapiens
  source 1..4335: mol_type = unassigned DNA
agttacgcagctgtcttccaggtgactggatgtgttgatcagcgctcgctgggatttggctgacgtggccccagccccgcctccctccccaccccacaatggcagaagaaactggacagagtaaattagctgcagccaagaaaaagttcaaagaatattggcagagaaaccgccctggtgttccagcagcagcgaagaggaacacgaaagcaaatggcagtagccctgagacggccgcttctggtggttgccactcatctgaggcttcctcctccgcctcctcctctctgcatgcgcgtcagagcccgtgccaagaacaagcagcagtcctgaactcgaggtccataaaaatcagtcgactgaatgacaccatcaaatctttgaaacaacagaagaaacaagtggaacatcagctggaagaagaaaagaaagcaaacaatgagaaacagaaagctgaaagggagctagagggtcaaatccagagattgaacacagagaaaaagaaactaaatacggacctgtatcacatgaaacattctctcagatactttgaagaagagtccaaggatctggccggccgcctgcaacgttcatcgcagcgtataggagagttagagtggtctctctgtgctgtcgccgccacacagaagaagaagccggatgggttctcgagccgcagtaaagcacttctcaagcggcagttagagcagtccatacgggagcagatactgctgaaaggacacgtgacacagttgaaggagtcgcttaaagaagtccagctggagagagatcaatatgctgaacaaataaaaggagagagggcccagtggcagcagaggatgaggaaaatgtcgcaggaggtttgcacattgaaggaggagaagaagcatgatacgcatcgggtagaggagctggagaggagcttgtccagactcaaaaaccagatggctgagccactgcccccggatgccccagcagtgtcctctgaggtggagctgcaagacctgaggaaggagctggagagagtggcaggagagctccaggctcaggtggaaaacaatcagtgcatcagtctcctgaaccgtgggcaaaaggagaggcttcgcgagcaggaggagaggcttcaggagcagcaggagaggcttcgggaacgggagaagaggcttcagcagctggccgagccacagagcgacttggaggagctgaagcacgagaacaagagcgcactgcagttggagcagcaagtaaaggagctgcaggagaagctgggccaggtgatggagacgctcacctcggccgagaaggagccagaggcagcagtcccagcctcagggactgggggcgagtctagcggccttatggacctcctggaggagaaggcggacctgagggagcatgtggagaaactggaacttggattcatccagtaccggagagagagatgccatcagaaagtacatcgccttctaacagagccaggggacagtgccaaagatgcgtcaccgggaggaggccatcatcaggctggcccaggacaaggaggagaggaaggtgaagctgctggagctgcaggagatggtgttgcggcttgtggcagctacagcgaggggcacggcaaattcctggccgctgcccggaaccctgctgctgaacccagtccaggagccccagccccccaggagctcggggctgccgacaagcatggtgatctttgtgaggcgagcctcaccaacagcgtggagcctgcacaaggagaagccagggagggttcttcccaggacaaccctactgcacagccagtcctgcagctccttggtgagatgcaggaccaccaggagcacccaggcttgggcagcaactgctgtgtgccatgcttttgctgggcttggctgccgagaagaaggagataaacaccaccatcatcaaagagctgctcaagaaatttttaaaaacgaaacaaagttatggggttaatctcctacacaattcatttacttcatttgaatgttagagctactcatgattatttgtgtttctaatttatagtttaagtttatttgtaaaaagttaaaagagagtgggtctctgtgcctctcactgatgttcactctggcatcctttagcatttttcttttttcatttcataattgtaggtcattagcatgcatatcgagtttgcccttacgtggtgggagttcaaacacacaaagacccactctttgcacaaaactgttctcgctggtttggaataggctcccgtgcttttttaatgttattgcagcatggatgttcattacagaattcagataaaatttgctaatgttctgctatgatgtttgatctcatcttaatcacagtgagctcttccatagctcaatatgcggtttgccctcaagtgtgcactgtttattactttgtaatatgccactatgagtactgacacttagagctgtttaaaggccgagaactggaaacagcctttcctccattttctgtgtattggtgatgggagtgataaccttttgggggagctttctaaatctcgcagaagaggaaagtggcctgctctggcaggtatgtgcaggatacagtgtgtttcatctgttccggtgccaagaatgagcactgtactgtggcagttccctttggatttgtatgtgctctgggctcatgaagatattgcatcgtgagctgcagcagttgcactctttttcagtgacctaaaaatggcttatttccgaggaatgaaaggctgccatcgttggctgtggatgtggaaaacctttcctagcttagagcatttgtatctacaatacattttaaagtcagagttcgtgttccctgttttaatcacatgactacctgtcccagtacacgaaagggcgctggttggcattcttcttaatgtatttagtaaagatcataagacatcctttaagagtttaaatgtctctgaaacaggcatacaggctctagtcaagaatgaattagagtgaaggaaagctgtgtgacacctggcattcctctctgttcatggagcttctttgaggcttgaagtttgattttactatctagacctctctggctaatacctattcttcaaccacctcggttactctgacataggaatttacttcttttccttgagtggaaaacactttagaaaataataacaaacattattataaactaatatatgtgagagtacttagttgaaacaaaaaggaattttagtagacagtattatattatctttgaaaatcaaggagaagtttatgcaactgaaaatgtttacacactgtgctgcaatctactgtttgtgaatgtcaatgtattatcaggaaacatgtctatacgatcgcagagttgtatttcctcacaaacttctttacgaagagtgaaatatgtttttgtacctctcagtttcagtcagggacatattttgtgcaatatttctgtgattgtgcctatgcgtgatgagtgaatgcatttcaatcatacattgcctaaatcataacttgatgatgcttgggaaagaatcaacagttaaaacttcatgaagttctaatgtctgtgttccaaaacacatcacattattaggttgtagggagatatgtatgtgtgctccctggggtggggagttttctagttactagaccatctccatttttagcacttggcagcctcatgatccttttataaataggagattaacaggagagcagcaatacgattttgccaatggaataacagatttgccggcattcactgaaagagggcagatattgggtccttgtgacttcaactgactcttccgaattgtatgaatttatcaatgtattagataaacccagtttcagaataataaagaaaaaatattagaccaaataatgtggctaatagtggtatgatttctagcccgtgggtttaaaactgtatcctaaagagtcattttaaaataatataaatatttaaaagtgtaactgctatctttatgttctgaaataagttaaaacattttaaaatatgaatactgtagtttaaaagaaagaaatggtgggaaggaaaagtagagaaagaaatgccaattccagtccaaagctttgtttgccaagttttcttagaatgaattttaccaatgtatgggttcttgttaacagaatgtgtaacagaaatactgaaagacttttgcctaaagtggcattattgactgctggtgtgatgctactgtaatgtgataaattattaaattgttgcaaagtgctgtttttgccttaaaattttattttgcgcatcttgaaaattatagtattaaaggtattgatactgtgcaaa

SEQ ID NO: 12716 - DNA, 4252 bp, Homo sapiens
  source 1..4252: mol_type = unassigned DNA
atgttgccagttgatggggaagaaaggaagtcggagggctcagacactgagggggacagaacatctccatgtgcaggccctacatcatctgctaccctgaaggatctggaggtaggaggctctgggtggaggtgcagtgaccccgcaggccagccctccaacctcctcccgcagcggggactgggtgcccctctgccagctgagacagcccacacacaacccagccctaatgatcgttctctctacctctcccccaagtcctcctccgcctcctcctctctgcatgcgcgtcagagcccgtgccaagaacaagcagcagtcctgaactcgaggtccataaaaatcagtcgactgaatgacaccatcaaatctttgaaacaacagaagaaacaagtggaacatcagctggaagaagaaaagaaagcaaacaatgagaaacagaaagctgaaagggagctagagggtcaaatccagagattgaacacagagaaaaagaaactaaatacggacctgtatcacatgaaacattctctcagatactttgaagaagagtccaaggatctggccggccgcctgcaacgttcatcgcagcgtataggagagttagagtggtctctctgtgctgtcgccgccacacagaagaagaagccggatgggttctcgagccgcagtaaagcacttctcaagcggcagttagagcagtccatacgggagcagatactgctgaaaggacacgtgacacagttgaaggagtcgcttaaagaagtccagctggagagagatcaatatgctgaacaaataaaaggagagagggcccagtggcagcagaggatgaggaaaatgtcgcaggaggtttgcacattgaaggaggagaagaagcatgatacgcatcgggtagaggagctggagaggagcttgtccagactcaaaaaccagatggctgagccactgcccccggatgccccagcagtgtcctctgaggtggagctgcaagacctgaggaaggagctggagagagtggcaggagagctccaggctcaggtggaaaacaatcagtgcatcagtctcctgaaccgtgggcaaaaggagaggcttcgcgagcaggaggagaggcttcaggagcagcaggagaggcttcgggaacgggagaagaggcttcagcagctggccgagccacagagcgacttggaggagctgaagcacgagaacaagagcgcactgcagttggagcagcaagtaaaggagctgcaggagaagctgggccaggtgatggagacgctcacctcggccgagaaggagccagaggcagcagtcccagcctcagggactgggggcgagtctagcggccttatggacctcctggaggagaaggcggacctgagggagcatgtggagaaactggaacttggattcatccagtaccggagagagagatgccatcagaaagtacatcgccttctaacagagccaggggacagtgccaaagatgcgtcaccgggaggaggccatcatcaggctggcccaggacaaggaggagaggaaggtgaagctgctggagctgcaggagatggtgttgcggcttgtggcagctacagcgaggggcacggcaaattcctggccgctgcccggaaccctgctgctgaacccagtccaggagccccagccccccaggagctcggggctgccgacaagcatggtgatctttgtgaggcgagcctcaccaacagcgtggagcctgcacaaggagaagccagggagggttcttcccaggacaaccctactgcacagccagtcctgcagctccttggtgagatgcaggaccaccaggagcacccaggcttgggcagcaactgctgtgtgccatgcttttgctgggcttggctgccgagaagaaggagataaacaccaccatcatcaaagagctgctcaagaaatttttaaaaacgaaacaaagttatggggttaatctcctacacaattcatttacttcatttgaatgttagagctactcatgattatttgtgtttctaatttatagtttaagtttatttgtaaaaagttaaaagagagtgggtctctgtgcctctcactgatgttcactctggcatcctttagcatttttcttttttcatttcataattgtaggtcattagcatgcatatcgagtttgcccttacgtggtgggagttcaaacacacaaagacccactctttgcacaaaactgttctcgctggtttggaataggctcccgtgcttttttaatgttattgcagcatggatgttcattacagaattcagataaaatttgctaatgttctgctatgatgtttgatctcatcttaatcacagtgagctcttccatagctcaatatgcggtttgccctcaagtgtgcactgtttattactttgtaatatgccactatgagtactgacacttagagctgtttaaaggccgagaactggaaacagcctttcctccattttctgtgtattggtgatgggagtgataaccttttgggggagctttctaaatctcgcagaagaggaaagtggcctgctctggcaggtatgtgcaggatacagtgtgtttcatctgttccggtgccaagaatgagcactgtactgtggcagttccctttggatttgtatgtgctctgggctcatgaagatattgcatcgtgagctgcagcagttgcactctttttcagtgacctaaaaatggcttatttccgaggaatgaaaggctgccatcgttggctgtggatgtggaaaacctttcctagcttagagcatttgtatctacaatacattttaaagtcagagttcgtgttccctgttttaatcacatgactacctgtcccagtacacgaaagggcgctggttggcattcttcttaatgtatttagtaaagatcataagacatcctttaagagtttaaatgtctctgaaacaggcatacaggctctagtcaagaatgaattagagtgaaggaaagctgtgtgacacctggcattcctctctgttcatggagcttctttgaggcttgaagtttgattttactatctagacctctctggctaatacctattcttcaaccacctcggttactctgacataggaatttacttcttttccttgagtggaaaacactttagaaaataataacaaacattattataaactaatatatgtgagagtacttagttgaaacaaaaaggaattttagtagacagtattatattatctttgaaaatcaaggagaagtttatgcaactgaaaatgtttacacactgtgctgcaatctactgtttgtgaatgtcaatgtattatcaggaaacatgtctatacgatcgcagagttgtatttcctcacaaacttctttacgaagagtgaaatatgtttttgtacctctcagtttcagtcagggacatattttgtgcaatatttctgtgattgtgcctatgcgtgatgagtgaatgcatttcaatcatacattgcctaaatcataacttgatgatgcttgggaaagaatcaacagttaaaacttcatgaagttctaatgtctgtgttccaaaacacatcacattattaggttgtagggagatatgtatgtgtgctccctggggtggggagttttctagttactagaccatctccatttttagcacttggcagcctcatgatccttttataaataggagattaacaggagagcagcaatacgattttgccaatggaataacagatttgccggcattcactgaaagagggcagatattgggtccttgtgacttcaactgactcttccgaattgtatgaatttatcaatgtattagataaacccagtttcagaataataaagaaaaaatattagaccaaataatgtggctaatagtggtatgatttctagcccgtgggtttaaaactgtatcctaaagagtcattttaaaataatataaatatttaaaagtgtaactgctatctttatgttctgaaataagttaaaacattttaaaatatgaatactgtagtttaaaagaaagaaatggtgggaaggaaaagtagagaaagaaatgccaattccagtccaaagctttgtttgccaagttttcttagaatgaattttaccaatgtatgggttcttgttaacagaatgtgtaacagaaatactgaaagacttttgcctaaagtggcattattgactgctggtgtgatgctactgtaatgtgataaattattaaattgttgcaaa

SEQ ID NO: 12717 - DNA, 11187 bp, Homo sapiens
  source 1..11187: mol_type = unassigned DNA
aactgctagtggctgagtccctggcggggcgcggcggtggaaggtgtcgcgtacgggcttcccgagctgacgtggcttgaattgggaggggggcagctggagcctcaggcggcagcgcttctagaaatgctgagccgattatcaggattagcaaatgttgttttgcatgaattatcaggagatgatgacactgatcagaatatgagggctcccctagaccctgaattacaccaagaatctgacatggaatttaataatactacacaagaagatgttcaggagcgcctggcttatgcagagcaattggtggtggagctaaaagatattattagacagaaggatgttcaactgcagcagaaagatgaagctctacaggaagagagaaaagctgctgataacaaaattaaaaaactaaaacttcatgcgaaggccaaattaacttctttgaataaatacatagaagaaatgaaagcacaaggagggactgttctgcctacagaacctcagtcagaggagcaactttccaagcatgacaagagttctacagaggaagagatggaaatagaaaagataaaacataagctccaggagaaggaggaactaatcagcactttgcaagcccagcttactcaggcacaggcagaacaacctgcacagagttctacagagatggaagaatttgtaatgatgaagcaacagctccaggagaaggaagaattcattagcactttacaagcccagctcagccagacacaggcagagcaagctgcacagcaggtggtccgagagaaagatgcccgctttgaaacacaagttcgtcttcatgaagatgagcttcttcagttagtaacccaggcagatgtggaaacagagatgcaacagaaattgagggtgctgcaaaggaagcttgaggaacacgaagaatccttggtgggccgtgctcaggtcgttgacttgctgcaacaggagctgactgctgctgagcagagaaaccagattctctctcagcagttacagcagatggaagctgagcataatactttgaggaacactgtggaaacagaaagagaggagtccaagattctactggaaaagatggaacttgaagtggcagagagaaaattatccttccataatctgcaggaagaaatgcatcatcttttagaacagtttgagcaagcaggccaagcccaggctgaactagagtctcggtatagtgctttggagcagaagcacaaagcagaaatggaagagaagacctctcatattttgagtcttcaaaagactggacaagagctgcagtctgcctgtgatgctctaaaggatcaaaattcaaagcttctccaagataagaatgagcaagcagttcagtcagcccagaccattcagcaactggaagatcagctccagcaaaaatccaaagaaattagccaatttctaaatagactgcccttgcaacaacatgaaacagcatctcagacttctttcccagatgtttataatgagggcacacaggcagtcactgaggagaatattgcttctttgcagaagagagtggtagaactagagaatgaaaagggagccttgctccttagttctatagagctggaggagctgaaagctgagaatgaaaaactgtcttctcagattactctcctagaggctcagaatagaactggggaggcagacagagaagtcagtgagatcagcattgttgatattgccaacaagaggagctcttctgctgaggaaagtggacaagatgttctagaaaacacattttctcagaaacataaagaattatcagttttattgttggaaatgaaagaagctcaagaggaaattgcatttcttaaattacagctccagggaaaaagggctgaggaagcagatcatgaggtccttgaccagaaagaaatgaaacagatggagggtgagggaatagctccaattaaaatgaaagtatttcttgaagatacagggcaagattttcccttaatgccaaatgaagagagcagtcttccagcagttgaaaaagaacaggcgagcactgaacatcaaagtagaacatctgaggaaatatctttaaatgatgctggagtagaattgaaatcaacaaagcaggatggtgataaatccctttctgctgtaccagatattggtcagtgtcatcaggatgagttggaaaggttaaaaagtcaaattttggagctcgagctaaactttcataaagcacaagaaatctatgagaaaaatttagatgagaaagctaaggaaattagcaacctaaaccagttgattgaggagtttaagaaaaatgctgacaacaacagcagtgcattcactgctttgtctgaagaaagagaccagcttctctctcaggtgaaggaacttagcatggtaacagaattgagggctcaggtaaagcaactggaaatgaaccttgcagaagcagaaaggcaaagaagacttgattatgaaagccaaactgcccatgacaacctgctcactgaacagatccatagtctcagcatagaagccaaatctaaagatgtgaaaattgaagttttacagaatgaactggatgatgtgcagcttcagttttctgagcagagtaccctgataagaagcctgcaaagccagctgcaaaataaggaaagtgaagtgcttgagggggcagaacgtgtaaggcatatctcaagtaaagtggaagaactgtcccaggctctttcacagaaggaacttgaaataacaaaaatggatcagctcttactagagaaaaagagagatgtggaaaccctccaacaaaccatcgaggagaaggatcaacaagtgacagaaatcagctttagtatgactgagaaaatggttcagcttaatgaagagaagttttctcttggggttgaaattaagactcttaaagaacagctaaatttattatccagagctgaggaagcaaaaaaagagcaggtggaagaagataatgaagtttcttctggccttaaacaaaattatgatgagatgagcccagcaggacaaataagtaaggaagaacttcagcatgaatttgaccttctgaagaaagaaaatgagcagagaaagagaaagctccaggcagctcttattaacagaaaggagcttctgcaaagagtcagtagattggaagaagaattagccaacttgaaagatgaatctaagaaagaaatcccactcagtgagactgagaggggagaagtggaagaagataaagaaaacaaagaatactcagaaaaatgtgtgacttctaagtgccaagaaatagaaatttatttaaaacagacaatatctgagaaagaagtggaactacagcatataaggaaggatttggaagaaaagctggcagctgaagagcaattccaggctctggtcaaacagatgaatcagaccttgcaagataaaacaaaccaaatagatttgctccaagcagaaatcagtgaaaaccaagcaattatccagaagttaatcacaagtaacacggatgcaagtgatggggactccgtagcacttgtaaaggaaacagtggtgataagtccaccttgtacaggtagtagtgaacactggaaaccagaactagaagaaaagatactggcccttgaaaaagaaaaggagcaacttcaaaagaagctacaggaagccttaacctcccgcaaggcaattcttaaaaaggcacaggagaaagaaagacatctcagggaggagctaaagcaacagaaagatgactataatcgcttgcaagaacagtttgatgagcaaagcaaggaaaatgagaatattggagaccagctaaggcaactccagattcaagtaagggaatccatagacggaaaactcccaagcacagaccagcaggaatcgtgttcttccactccaggtttagaagaacctttattcaaagccacagaacagcatcacactcaacctgttttagagtccaacttgtgcccagactggccttctcattctgaagatgcgagtgctctgcagggcggaacttctgttgcccagattaaggcccagctgaaggaaatagaggctgagaaagtagagttagaattgaaagttagttctacaacaagtgagcttactaaaaaatcagaagaggtatttcagttacaagagcagataaataaacagggtttagaaatcgagagtctaaagacagtatcccatgaagctgaagtccatgccgaaagcctgcagcagaaattggaaagcagccaactacaaattgctggcctagaacatctaagagaattgcaacctaaactggatgaactgcaaaaactcataagcaaaaaggaagaagacgttagctacctttctggacaacttagtgagaaagaagcagctctcactaaaatacagacagagataatagaacaagaagatttaattaaggctctgcatacacagctagaaatgcaagccaaagagcatgatgagaggataaagcagctacaggtggaactttgtgaaatgaagcaaaaaccagaagagattggagaagaaagtagagcaaagcaacaaatacaaaggaaactgcaagctgcccttatttcccgaaaagaagcactaaaagaaaacaaaagtctccaagaggaattgtctttggccagaggtaccattgaacgtctcaccaagtctctggcagatgtggaaagccaagtttctgctcaaaataaagaaaaagatacggtcttaggaaggttagctcttcttcaagaagaaagagacaaactcattacagaaatggacaggtctttattggaaaatcagagtctcagcagctcctgtgaaagtctaaaactagctctagagggtcttactgaagacaaggaaaagttagtgaaggaaattgaatctttgaaatcttctaagattgcagaaagtactgagtggcaagagaaacacaaggagctacaaaaagagtatgaaattcttctgcagtcctatgagaatgttagtaatgaagcagaaaggattcagcatgtggtggaagctgtgaggcaagagaaacaagaactgtatggcaagttaagaagcacagaggcaaacaagaaggagacagaaaagcagttgcaggaagctgagcaagaaatggaggaaatgaaagaaaagatgagaaagtttgctaaatctaaacagcagaaaatcctagagctggaagaagagaatgaccggcttagggcagaggtgcaccctgcaggagatacagctaaagagtgtatggaaacacttctttcttccaatgccagcatgaaggaagaacttgaaagggtcaaaatggagtatgaaaccctttctaagaagtttcagtctttaatgtctgagaaagactctctaagtgaagaggttcaagatttaaagcatcagatagaaggtaatgtatctaaacaagctaacctagaggccaccgagaaacatgataaccaaacgaatgtcactgaagagggaacacagtctataccaggtgagactgaagagcaagactctctgagtatgagcacaagacctacatgttcagaatcggttccatcagcgaagagtgccaaccctgctgtaagtaaggatttcagctcacatgatgaaattaataactacctacagcagattgatcagctcaaagaaagaattgctggattagaggaggagaagcagaaaaacaaggaatttagccagactttagaaaatgagaaaaataccttactgagtcagatatcaacaaaggatggtgaactaaaaatgcttcaggaggaagtaaccaaaatgaacctgttaaatcagcaaatccaagaagaactctccagagttaccaaactaaaggagacagcagaagaagagaaagatgatttggaagagaggcttatgaatcaattagcagaacttaatggaagcattgggaattactgtcaggatgttacagatgcccaaataaaaaatgagctattggaatctgaaatgaagaaccttaaaaagtgtgtgagtgaattggaagaagaaaagcagcagttagtcaaggaaaaaactaaggtggaatcagaaatacgaaaggaatatttggagaaaatacaaggtgctcagaaagaacccggaaataaaagccatgcaaaggaacttcaggaactgttaaaagaaaaacaacaagaagtaaagcagctacagaaggactgcatcaggtatcaagagaaaattagtgctctggagagaactgttaaagctctagaatttgttcaaactgaatctcaaaaagatttggaaataaccaaagaaaatctggctcaagcagttgaacaccgcaaaaaggcacaagcagaattagctagcttcaaagtcctgctagatgacactcaaagtgaagcagcaagggtcctagcagacaatctcaagttgaaaaaggaacttcagtcaaataaagaatcagttaaaagccagatgaaacaaaaggatgaagatcttgagcgaagactggaacaggcagaagagaagcacctgaaagagaagaagaatatgcaagagaaactggatgctttgcgcagagaaaaagtccacttggaagagacaattggagagattcaggttactttgaacaagaaagacaaggaagttcagcaacttcaggaaaacttggacagtactgtgacccagcttgcagcctttactaagagcatgtcttccctccaggatgatcgtgacagggtgatagatgaagctaagaaatgggagaggaagtttagtgatgcgattcaaagcaaagaagaagaaattagactcaaagaagataattgcagtgttctaaaggatcaacttagacagatgtccatccatatggaagaattaaagattaacatttccaggcttgaacatgacaagcagatttgggagtccaaggcccagacagaggtccagcttcagcagaaggtctgtgatactctacagggggaaaacaaagaacttttgtcccagctagaagagacacgccacctataccacagttctcagaatgaattagctaagttggaatcagaacttaagagtctcaaagaccagttgactgatttaagtaactctttagaaaaatgtaaggaacaaaaaggaaacttggaagggatcataaggcagcaagaggctgatattcaaaattctaagttcagttatgaacaactggagactgatcttcaggcctccagagaactgaccagtaggctgcatgaagaaataaatatgaaagagcaaaagattataagcctgctttctggcaaggaagaggcaatccaagtagctattgctgaactgcgtcagcaacatgataaagaaattaaagagctggaaaacctgctgtcccaggaggaagaggagaatattgttttagaagaggagaacaaaaaggctgttgataaaaccaatcagcttatggaaacactgaaaaccatcaaaaaggaaaacattcagcaaaaggcacagttggattcctttgttaaatccatgtcttctctccaaaatgatcgagaccgcatagtgggtgactatcaacagctggaagagcgacatctctctataatcttggaaaaagaccaactcatccaagaggctgctgcagagaataataagcttaaagaagaaatacgaggcttgagaagtcatatggatgatctcaattctgagaatgccaagctagatgcagaactgatccaatatagagaagacctgaaccaagtgataacaataaaggacagccaacaaaagcagcttcttgaagttcaacttcagcaaaataaggagctggaaaataaatatgctaaattagaagaaaagctgaaggaatctgaggaagcaaatgaggatctgcggaggtcctttaatgccctacaagaagagaaacaagatttatctaaagagattgagagtttgaaagtatctatatcccagctaacaagacaagtaacagccttgcaagaagaaggtactttaggactctatcatgcccagttaaaagtaaaagaagaagaggtacacaggttaagtgctttgttttcctcctctcaaaagagaattgcagaactggaagaagaattggtttgtgttcaaaaggaagctgccaagaaggtaggtgaaattgaagataaactgaagaaagaattaaagcatcttcatcatgatgcagggataatgagaaatgaaactgaaacagcagaagagagagtggcagagctagcaagagatttggtggagatggaacagaaattactcatggtcaccaaagaaaataaaggtctcacagcacaaattcagtcttttggaaggtctatgagttccttgcaaaatagtagagatcatgccaatgaggaacttgatgaactgaaaaggaaatatgatgccagtctgaaggaattggcacagttgaaagaacagggactcttaaacagagagagagatgctcttctttctgaaaccgccttttcaatgaactccactgaggagaatagcttgtctcaccttgagaaacttaaccaacagctcctatccaaagatgagcaattgcttcacttgtcctcacaactagaagattcttataaccaagtgcagtccttttccaaggctatggccagtctgcagaatgagagagatcacctgtggaatgagctggagaaatttcgaaagtcagaggaagggaagcagaggtctgcagctcagccttccaccagcccagctgaagtacagagtttaaaaaaagctatgtcttcactccaaaatgacagagacagactactgaaggaattgaagaatctgcagcagcaatacttacagattaatcaagagatcactgagttacatccactgaaggctcaacttcaggagtatcaagataagacaaaagcatttcagattatgcaagaagagctcaggcaggaaaacctctcctggcagcatgagctgcatcagctcaggatggagaagagttcctgggaaatacatgagaggagaatgaaggaacagtaccttatggctatctcagataaagatcagcagctcagtcatctgcagaatcttataagggaattgaggtcttcttcctcccagactcagcctctcaaagtgcaataccaaagacaggcatccccagagacatcagcttccccagatgggtcacaaaatctggtttatgagacagaacttctcaggacccagctcaatgacagcttaaaggaaattcaccaaaaggagttaagaattcagcaactgaacagcaacttctctcagctactggaagagaaaaacaccctttccattcagctctgcgataccagtcagagtcttcgtgagaaccagcagcactatggtgaccttttaaatcactgtgcagtcttggagaagcaggttcaagagctgcaggcggggccactaaatatagatgttgctccaggagctccccaggaaaagaatggagttcacagaaagagtgaccctgaggaactaagggaaccgcagcaaagcttttctgaagctcagcagcagctatgcaacaccagacaggaagtgaatgaattaaggaagctgctggaagaagaacgagaccaaagagtggctgctgagaatgctctctctgtggccgaggagcagatcagacggttagagcacagtgaatgggactcttcccggactcctatcattggctcctgtggcactcaggagcaggcactgttaatagatcttacaagcaacagttgtcgaaggacccggagtggcgttggatggaagcgagtcctgcgttcactctgtcattcacggacccgagtgccacttctagcagccatctactttctaatgattcatgtcctgctcattctgtgttttacgggccatctatagacttagttgttactctttggaccactcccctcaaaacttggaattctctcacctctaacatcagaacatcaattccagtggaacagtcttcccatttacaggtcttctctccaactcttcacggaaagtgcctgcaaaaacagaggtggatacgaggacaggttggagctgcagggactggcgagtctgctttcttctactgccctgagcctgaacgcttctgcttaatctgagaatcacatttggtttgttgagcctaatatttgttgagattttgcaggaccctgatcttttgtggtcctgtaaaagatactgaggaatgtctttcagccaagccaagaggatggtttcaataaacctaataatctgaagttcagtatcattttgattgataactttctttgccttgtttgcctgtattttctcctgtttcagggggaaggtggctctgccataaacagagttcagggaaatgaacatgtcacctcataggacatctgatttaggtctcttgcagaatagggtggtgaaagctgaaggaactccctaggggttttagctgttagatcacatgggaggacagcatcttcttccctgccaatttcagatataattggagggagaatttcaggtcttagactataaggatagaatccctttgcttttgcccttgatcacatgtatactaaggtattaagtggcccaagtctttcctttcaccaaagggcagggagaagtgtctatggacagcagggttccaattcttgtcattccaggaatatctgaatattcctggaatgtggaccctgagacagtgctcaggggccactgggagccaatattaggcattgactctcagccaggagtctgactggtctaacaccacactgcaactcctgacctcttgaagtactaagctactttgctgttagtgacagttattacagtttctcagccccattgtctctgccctctgtggcaatggaaggagaatatagagaagacaaaattaaatatagatagacctgagaaggacagccaggatagaattccatttgtgcctattccctgcctcccctcccctcccccatcctaccagttggttattttctcattgcatacgtgatgtgttcactgcctagcctctccctaaagaagagagaagacaagtgggctgactgatctgctctaaatctactgtggtgattaaatcttggttacaacatcctgggaagtttcctgaacaactgtaaaataataaaattattttcagaatgaaga

SEQ ID NO: 12718 - DNA, 3395 bp, Homo sapiens
  source 1..3395: mol_type = unassigned DNA
gagtccctggcggggcgcggcggtggaaggtgtcgcgtacgggcttcccgagctgacgtggcttgaattgggaggggggcagctggagcctcaggcggcagcgcttctagaaatgctgagccgattatcaggattagcaaatgttgttttgcatgaattatcaggagatgatgacactgatcagaatatgagggctcccctagaccctgaattacaccaagaatctgacatggaatttaataatactacacaagaagatgttcaggagcgcctggcttatgcagagcaattggtggtggagctaaaagatattattagacagaaggatgttcaactgcagcagaaagatgaagctctacaggaagagagaaaagctgctgataacaaaattaaaaaactaaaacttcatgcgaaggccaaattaacttctttgaataaatacatagaagaaatgaaagcacaaggagggactgttctgcctacagaacctcagtcagaggagcaactttccaagcatgacaagagttctacagaggaagagatggaaatagaaaagataaaacataagctccaggagaaggaggaactaatcagcactttgcaagcccagcttactcaggcacaggcagaacaacctgcacagaaattgagggtgctgcaaaggaagcttgaggaacacgaagaatccttggtgggccgtgctcaggtcgttgacttgctgcaacaggagctgactgctgctgagcagagaaaccagattctctctcagcagttacagcagatggaagctgagcataatactttgaggaacactgtggaaacagaaagagaggagtccaagattctactggaaaagatggaacttgaagtggcagagagaaaattatccttccataatctgcaggaagaaatgcatcatcttttagaacagtttgagcaagcaggccaagcccaggctgaactagagtctcggtatagtgctttggagcagaagcacaaagcagaaatggaagagaagacctctcatattttgagtcttcaaaagactggacaagagctgcagtctgcctgtgatgctctaaaggatcaaaattcaaagcttctccaagataagaatgagcaagcagttcagtcagcccagaccattcagcaactggaagatcagctccagcaaaaatccaaagaaattagccaatttctaaatagactgcccttgcaacaacatgaaacagcatctcagacttctttcccagatgtttataatgagggcacacaggcagtcactgaggagaatattgcttctttgcagaagagagtggtagaactagagaatgaaaagggagccttgctccttagttctatagagctggaggagctgaaagctgagaatgaaaaactgtcttctcagattactctcctagaggctcagaatagaactggggaggcagacagagaagtcagtgagatcagcattgttgatattgccaacaagaggagctcttctgctgaggaaagtggacaagatgttctagaaaacacattttctcagaaacataaagaattatcagttttattgttggaaatgaaagaagctcaagaggaaattgcatttcttaaattacagctccagggaaaaagggctgaggaagcagatcatgaggtccttgaccagaaagaaatgaaacagatggagggtgagggaatagctccaattaaaatgaaagtatttcttgaagatacagggcaagattttcccttaatgccaaatgaagagagcagtcttccagcagttgaaaaagaacaggcgagcactgaacatcaaagtagaacatctgaggaaatatctttaaatgatgctggagtagaattgaaatcaacaaagcaggatggtgataaatccctttctgctgtaccagatattggtcagtgtcatcaggatgagttggaaaggttaaaaagtcaaattttggagctcgagctaaactttcataaagcacaagaaatctatgagaaaaatttagatgagaaagctaaggaaattagcaacctaaaccagttgattgaggagtttaagaaaaatgctgacaacaacagcagtgcattcactgctttgtctgaagaaagagaccagcttctctctcaggtgaaggaacttagcatggtaacagaattgagggctcaggtaaagcaactggaaatgaaccttgcagaagcagaaaggcaaagaagacttgattatgaaagccaaactgcccatgacaacctgctcactgaacagatccatagtctcagcatagaagccaaatctaaagatgtgaaaattgaagttttacagaatgaactggatgatgtgcagcttcagttttctgagcagagtaccctgataagaagcctgcaaagccagctgcaaaataaggaaagtgaagtgcttgagggggcagaacgtgtaaggcatatctcaagtaaagtggaagaactgtcccaggctctttcacagaaggaacttgaaataacaaaaatggatcagctcttactagagaaaaagagagatgtggaaaccctccaacaaaccatcgaggagaaggatcaacaagtgacagaaatcagctttagtatgactgagaaaatggttcagcttaatgaagagaagttttctcttggggttgaaattaagactcttaaagaacagctaaatttattatccagagctgaggaagcaaaaaaagagcaggtggaagaagataatgaagtttcttctggccttaaacaaaattatgatgagatgagcccagcaggacaaataagtaaggaagaacttcagcatgaatttgaccttctgaagaaagaaaatgagcagagaaagagaaagctccaggcagctcttattaacagaaaggagcttctgcaaagagtcagtagattggaagaagaattagccaacttgaaagatgaatctaagaaagaaatcccactcagtgagactgagaggggagaagtggaagaagataaagaaaacaaagaatactcagaaaaatgtgtgacttctaagtgccaagaaatagaaatttatttaaaacagacaatatctgagaaagaagtggaactacagcatataaggaaggatttggaagaaaagctggcagctgaagagcaattccaggctctggtcaaacagatgaatcagaccttgcaagataaaacaaaccaaatagatttgctccaagcagaaatcagtgaaaaccaagcaattatccagaagttaatcacaagtaacacggatgcaagtgatggggactccgtagcacttgtaaaggaaacagtggtgataagtccaccttgtacaggtagtagtgaacactggaaaccagaactagaagaaaagatactggcccttg

SEQ ID NO: 12719 - DNA, 280 bp, Homo sapiens
  source 1..280: mol_type = unassigned DNA
ggtctttagggcggagatcacagaatcattggagatattaatgcaaacggaggcctgtccaataatcctgctaatgctaatgggttactggaaagatgagaagagaggaaagatcccaacgatcccgtcaacacgaaaatcccaggaatcagagaaatgctgagccgattatcaggattagcaaatgttgttttgcatgaattatcaggagatgatgacactgatcagaatatgagggctcccctagaccctgaattacaccaagaatctgacatggaat

SEQ ID NO: 12720 - DNA, 4959 bp, Homo sapiens
  source 1..4959: mol_type = unassigned DNA
ggggcagctggagcctcaggcggcagcgcttctagaaatgctgagccgattatcaggattagcaaatgttgttttgcatgaattatcaggagatgatgacactgatcagaatatgagggctcccctagaccctgaattacaccaagaatctgacatggaatttaataatactacacaagaagatgttcaggagcgcctggcttatgcagagcaattggtggtggagctaaaagatattattagacagaaggatgttcaactgcagcagaaagatgaagctctacaggaagagagaaaagctgctgataacaaaattaaaaaactaaaacttcatgcgaaggccaaattaacttctttgaataaatacatagaagaaatgaaagcacaaggagggactgttctgcctacagaacctcagtcagaggagcaactttccaagcatgacaagagttctacagaggaagagatggaaatagaaaagataaaacataagctccaggagaaggaggaactaatcagcactttgcaagcccagcttactcaggcacaggcagaacaacctgcacagagttctacagagatggaagaatttgtaatgatgaagcaacagctccaggagaaggaagaattcattagcactttacaagcccagctcagccagacacaggcagagcaagctgcacagaaattgagggtgctgcaaaggaagcttgaggaacacgaagaatccttggtgggccgtgctcaggtcgttgacttgctgcaacaggagctgactgctgctgagcagagaaaccagattctctctcagcagttacagcagatggaagctgagcataatactttgaggaacactgtggaaacagaaagagaggagtccaagattctactggaaaagatggaacttgaagtggcagagagaaaattatccttccataatctgcaggaagaaatgcatcatcttttagaacagtttgagcaagcaggccaagcccaggctgaactagagtctcggtatagtgctttggagcagaagcacaaagcagaaatggaagagaagacctctcatattttgagtcttcaaaagactggacaagagctgcagtctgcctgtgatgctctaaaggatcaaaattcaaagcttctccaagataagaatgagcaagcagttcagtcagcccagaccattcagcaactggaagatcagctccagcaaaaatccaaagaaattagccaatttctaaatagactgcccttgcaacaacatgaaacagcatctcagacttctttcccagatgtttataatgagggcacacaggcagtcactgaggagaatattgcttctttgcagaagagagtggtagaactagagaatgaaaagggagccttgctccttagttctatagagctggaggagctgaaagctgagaatgaaaaactgtcttctcagattactctcctagaggctcagaatagaactggggaggcagacagagaagtcagtgagatcagcattgttgatattgccaacaagaggagctcttctgctgaggaaagtggacaagatgttctagaaaacacattttctcagaaacataaagaattatcagttttattgttggaaatgaaagaagctcaagaggaaattgcatttcttaaattacagctccagggaaaaagggctgaggaagcagatcatgaggtccttgaccagaaagaaatgaaacagatggagggtgagggaatagctccaattaaaatgaaagtatttcttgaagatacagggcaagattttcccttaatgccaaatgaagagagcagtcttccagcagttgaaaaagaacaggcgagcactgaacatcaaagtagaacatctgaggaaatatctttaaatgatgctggagtagaattgaaatcaacaaagcaggatggtgataaatccctttctgctgtaccagatattggtcagtgtcatcaggatgagttggaaaggttaaaaagtcaaattttggagctcgagctaaactttcataaagcacaagaaatctatgagaaaaatttagatgagaaagctaaggaaattagcaacctaaaccagttgattgaggagtttaagaaaaatgctgacaacaacagcagtgcattcactgctttgtctgaagaaagagaccagcttctctctcaggtgaaggaacttagcatggtaacagaattgagggctcaggtaaagcaactggaaatgaaccttgcagaagcagaaaggcaaagaagacttgattatgaaagccaaactgcccatgacaacctgctcactgaacagatccatagtctcagcatagaagccaaatctaaagatgtgaaaattgaagttttacagaatgaactggatgatgtgcagcttcagttttctgagcagagtaccctgataagaagcctgcaaagccagctgcaaaataaggaaagtgaagtgcttgagggggcagaacgtgtaaggcatatctcaagtaaagtggaagaactgtcccaggctctttcacagaaggaacttgaaataacaaaaatggatcagctcttactagagaaaaagagagatgtggaaaccctccaacaaaccatcgaggagaaggatcaacaagtgacagaaatcagctttagtatgactgagaaaatggttcagcttaatgaagagaagttttctcttggggttgaaattaagactcttaaagaacagctaaatttattatccagagctgaggaagcaaaaaaagagcaggtggaagaagataatgaagtttcttctggccttaaacaaaattatgatgagatgagcccagcaggacaaataagtaaggaagaacttcagcatgaatttgaccttctgaagaaagaaaatgagcagagaaagagaaagctccaggcagctcttattaacagaaaggagcttctgcaaagagtcagtagattggaagaagaattagccaacttgaaagatgaatctaagaaagaaatcccactcagtgagactgagaggggagaagtggaagaagataaagaaaacaaagaatactcagaaaaatgtgtgacttctaagtgccaagaaatagaaatttatttaaaacagacaatatctgagaaagaagtggaactacagcatataaggaaggatttggaagaaaagctggcagctgaagagcaattccaggctctggtcaaacagatgaatcagaccttgcaagataaaacaaaccaaatagatttgctccaagcagaaatcagtgaaaaccaagcaattatccagaagttaatcacaagtaacacggatgcaagtgatggggactccgtagcacttgtaaaggaaacagtggtgataagtccaccttgtacaggtagtagtgaacactggaaaccagaactagaagaaaagatactggcccttgaaaaagaaaaggagcaacttcaaaagaagctacaggaagccttaacctcccgcaaggcaattcttaaaaaggcacaggagaaagaaagacatctcagggaggagctaaagcaacagaaagatgactataatcgcttgcaagaacagtttgatgagcaaagcaaggaaaatgagaatattggagaccagctaaggcaactccagattcaagtaagggaatccatagacggaaaactcccaagcacagaccagcaggaatcgtgttcttccactccaggtttagaagaacctttattcaaagccacagaacagcatcacactcaacctgttttagagtccaacttgtgcccagactggccttctcattctgaagatgcgagtgctctgcagggcggaacttctgttgcccagattaaggcccagctgaaggaaatagaggctgagaaagtagagttagaattgaaagttagttctacaacaagtgagcttactaaaaaatcagaagaggtatttcagttacaagagcagataaataaacagggtttagaaatcgagagtctaaagacagtatcccatgaagctgaagtccatgccgaaagcctgcagcagaaattggaaagcagccaactacaaattgctggcctagaacatctaagagaattgcaacctaaactggatgaactgcaaaaactcataagcaaaaaggaagaagacgttagctacctttctggacaacttagtgagaaagaagcagctctcactaaaatacagacagagataatagaacaagaagatttaattaaggctctgcatacacagctagaaatgcaagccaaagagcatgatgagaggataaagcagctacaggtggaactttgtgaaatgaagcaaaaaccagaagagattggagaagaaagtagagcaaagcaacaaatacaaaggaaactgcaagctgcccttatttcccgaaaagaagcactaaaagaaaacaaaagtctccaagaggaattgtctttggccagaggtaccattgaacgtctcaccaagtctctggcagatgtggaaagccaagtttctgctcaaaataaagaaaaagatacggtcttaggaaggttagctcttcttcaagaagaaagagacaaactcattacagaaatggacaggtctttattggaaaatcagagtctcagcagctcctgtgaaagtctaaaactagctctagagggtcttactgaagacaaggaaaagttagtgaaggaaattgaatctttgaaatcttctaagattgcagaaagtactgagtggcaagagaaacacaaggagctacaaaaagagtatgaaattcttctgcagtcctatgagaatgttagtaatgaagcagaaaggattcagcatgtggtggaagctgtgaggcaagagaaacaagaactgtatggcaagttaagaagcacagaggcaaacaagaaggagacagaaaagcagttgcaggaagctgagcaagaaatggaggaaatgaaagaaaa

SEQ ID NO: 12721 - DNA, 11198 bp, Homo sapiens
  source 1..11198: mol_type = unassigned DNA
agtccctggcggggcgcggcggtggaaggtgtcgcgtacgggcttcccgagctgacgtggcttgaattgggaggggggcagctggagcctcaggcggcagcgcttctagaaatgctgagccgattatcaggattagcaaatgttgttttgcatgaattatcaggagatgatgacactgatcagaatatgagggctcccctagaccctgaattacaccaagaatctgacatggaatttaataatactacacaagaagatgttcaggagcgcctggcttatgcagagcaattggtggtggagctaaaagatattattagacagaaggatgttcaactgcagcagaaagatgaagctctacaggaagagagaaaagctgctgataacaaaattaaaaaactaaaacttcatgcgaaggccaaattaacttctttgaataaatacatagaagaaatgaaagcacaaggagggactgttctgcctacagaacctcagtcagaggagcaactttccaagcatgacaagagttctacagaggaagagatggaaatagaaaagataaaacataagctccaggagaaggaggaactaatcagcactttgcaagcccagcttactcaggcacaggcagaacaacctgcacagagttctacagagatggaagaatttgtaatgatgaagcaacagctccaggagaaggaagaattcattagcactttacaagcccagctcagccagacacaggcagagcaagctgcacagttgagttccatgcagcaggtggtccgagagaaagatgcccgctttgaaacacaagttcgtcttcatgaagatgagcttcttcagttagtaacccaggcagatgtggaaacagagatgcaacagaaattgagggtgctgcaaaggaagcttgaggaacacgaagaatccttggtgggccgtgctcaggtcgttgacttgctgcaacaggagctgactgctgctgagcagagaaaccagattctctctcagcagttacagcagatggaagctgagcataatactttgaggaacactgtggaaacagaaagagaggagtccaagattctactggaaaagatggaacttgaagtggcagagagaaaattatccttccataatctgcaggaagaaatgcatcatcttttagaacagtttgagcaagcaggccaagcccaggctgaactagagtctcggtatagtgctttggagcagaagcacaaagcagaaatggaagagaagacctctcatattttgagtcttcaaaagactggacaagagctgcagtctgcctgtgatgctctaaaggatcaaaattcaaagcttctccaagataagaatgagcaagcagttcagtcagcccagaccattcagcaactggaagatcagctccagcaaaaatccaaagaaattagccaatttctaaatagactgcccttgcaacaacatgaaacagcatctcagacttctttcccagatgtttataatgagggcacacaggcagtcactgaggagaatattgcttctttgcagaagagagtggtagaactagagaatgaaaagggagccttgctccttagttctatagagctggaggagctgaaagctgagaatgaaaaactgtcttctcagattactctcctagaggctcagaatagaactggggaggcagacagagaagtcagtgagatcagcattgttgatattgccaacaagaggagctcttctgctgaggaaagtggacaagatgttctagaaaacacattttctcagaaacataaagaattatcagttttattgttggaaatgaaagaagctcaagaggaaattgcatttcttaaattacagctccagggaaaaagggctgaggaagcagatcatgaggtccttgaccagaaagaaatgaaacagatggagggtgagggaatagctccaattaaaatgaaagtatttcttgaagatacagggcaagattttcccttaatgccaaatgaagagagcagtcttccagcagttgaaaaagaacaggcgagcactgaacatcaaagtagaacatctgaggaaatatctttaaatgatgctggagtagaattgaaatcaacaaagcaggatggtgataaatccctttctgctgtaccagatattggtcagtgtcatcaggatgagttggaaaggttaaaaagtcaaattttggagctcgagctaaactttcataaagcacaagaaatctatgagaaaaatttagatgagaaagctaaggaaattagcaacctaaaccagttgattgaggagtttaagaaaaatgctgacaacaacagcagtgcattcactgctttgtctgaagaaagagaccagcttctctctcaggtgaaggaacttagcatggtaacagaattgagggctcaggtaaagcaactggaaatgaaccttgcagaagcagaaaggcaaagaagacttgattatgaaagccaaactgcccatgacaacctgctcactgaacagatccatagtctcagcatagaagccaaatctaaagatgtgaaaattgaagttttacagaatgaactggatgatgtgcagcttcagttttctgagcagagtaccctgataagaagcctgcaaagccagctgcaaaataaggaaagtgaagtgcttgagggggcagaacgtgtaaggcatatctcaagtaaagtggaagaactgtcccaggctctttcacagaaggaacttgaaataacaaaaatggatcagctcttactagagaaaaagagagatgtggaaaccctccaacaaaccatcgaggagaaggatcaacaagtgacagaaatcagctttagtatgactgagaaaatggttcagcttaatgaagagaagttttctcttggggttgaaattaagactcttaaagaacagctaaatttattatccagagctgaggaagcaaaaaaagagcaggtggaagaagataatgaagtttcttctggccttaaacaaaattatgatgagatgagcccagcaggacaaataagtaaggaagaacttcagcatgaatttgaccttctgaagaaagaaaatgagcagagaaagagaaagctccaggcagctcttattaacagaaaggagcttctgcaaagagtcagtagattggaagaagaattagccaacttgaaagatgaatctaagaaagaaatcccactcagtgagactgagaggggagaagtggaagaagataaagaaaacaaagaatactcagaaaaatgtgtgacttctaagtgccaagaaatagaaatttatttaaaacagacaatatctgagaaagaagtggaactacagcatataaggaaggatttggaagaaaagctggcagctgaagagcaattccaggctctggtcaaacagatgaatcagaccttgcaagataaaacaaaccaaatagatttgctccaagcagaaatcagtgaaaaccaagcaattatccagaagttaatcacaagtaacacggatgcaagtgatggggactccgtagcacttgtaaaggaaacagtggtgataagtccaccttgtacaggtagtagtgaacactggaaaccagaactagaagaaaagatactggcccttgaaaaagaaaaggagcaacttcaaaagaagctacaggaagccttaacctcccgcaaggcaattcttaaaaaggcacaggagaaagaaagacatctcagggaggagctaaagcaacagaaagatgactataatcgcttgcaagaacagtttgatgagcaaagcaaggaaaatgagaatattggagaccagctaaggcaactccagattcaagtaagggaatccatagacggaaaactcccaagcacagaccagcaggaatcgtgttcttccactccaggtttagaagaacctttattcaaagccacagaacagcatcacactcaacctgttttagagtccaacttgtgcccagactggccttctcattctgaagatgcgagtgctctgcagggcggaacttctgttgcccagattaaggcccagctgaaggaaatagaggctgagaaagtagagttagaattgaaagttagttctacaacaagtgagcttactaaaaaatcagaagaggtatttcagttacaagagcagataaataaacagggtttagaaatcgagagtctaaagacagtatcccatgaagctgaagtccatgccgaaagcctgcagcagaaattggaaagcagccaactacaaattgctggcctagaacatctaagagaattgcaacctaaactggatgaactgcaaaaactcataagcaaaaaggaagaagacgttagctacctttctggacaacttagtgagaaagaagcagctctcactaaaatacagacagagataatagaacaagaagatttaattaaggctctgcatacacagctagaaatgcaagccaaagagcatgatgagaggataaagcagctacaggtggaactttgtgaaatgaagcaaaaaccagaagagattggagaagaaagtagagcaaagcaacaaatacaaaggaaactgcaagctgcccttatttcccgaaaagaagcactaaaagaaaacaaaagtctccaagaggaattgtctttggccagaggtaccattgaacgtctcaccaagtctctggcagatgtggaaagccaagtttctgctcaaaataaagaaaaagatacggtcttaggaaggttagctcttcttcaagaagaaagagacaaactcattacagaaatggacaggtctttattggaaaatcagagtctcagcagctcctgtgaaagtctaaaactagctctagagggtcttactgaagacaaggaaaagttagtgaaggaaattgaatctttgaaatcttctaagattgcagaaagtactgagtggcaagagaaacacaaggagctacaaaaagagtatgaaattcttctgcagtcctatgagaatgttagtaatgaagcagaaaggattcagcatgtggtggaagctgtgaggcaagagaaacaagaactgtatggcaagttaagaagcacagaggcaaacaagaaggagacagaaaagcagttgcaggaagctgagcaagaaatggaggaaatgaaagaaaagatgagaaagtttgctaaatctaaacagcagaaaatcctagagctggaagaagagaatgaccggcttagggcagaggtgcaccctgcaggagatacagctaaagagtgtatggaaacacttctttcttccaatgccagcatgaaggaagaacttgaaagggtcaaaatggagtatgaaaccctttctaagaagtttcagtctttaatgtctgagaaagactctctaagtgaagaggttcaagatttaaagcatcagatagaaggtaatgtatctaaacaagctaacctagaggccaccgagaaacatgataaccaaacgaatgtcactgaagagggaacacagtctataccaggtgagactgaagagcaagactctctgagtatgagcacaagacctacatgttcagaatcggttccatcagcgaagagtgccaaccctgctgtaagtaaggatttcagctcacatgatgaaattaataactacctacagcagattgatcagctcaaagaaagaattgctggattagaggaggagaagcagaaaaacaaggaatttagccagactttagaaaatgagaaaaataccttactgagtcagatatcaacaaaggatggtgaactaaaaatgcttcaggaggaagtaaccaaaatgaacctgttaaatcagcaaatccaagaagaactctccagagttaccaaactaaaggagacagcagaagaagagaaagatgatttggaagagaggcttatgaatcaattagcagaacttaatggaagcattgggaattactgtcaggatgttacagatgcccaaataaaaaatgagctattggaatctgaaatgaagaaccttaaaaagtgtgtgagtgaattggaagaagaaaagcagcagttagtcaaggaaaaaactaaggtggaatcagaaatacgaaaggaatatttggagaaaatacaaggtgctcagaaagaacccggaaataaaagccatgcaaaggaacttcaggaactgttaaaagaaaaacaacaagaagtaaagcagctacagaaggactgcatcaggtatcaagagaaaattagtgctctggagagaactgttaaagctctagaatttgttcaaactgaatctcaaaaagatttggaaataaccaaagaaaatctggctcaagcagttgaacaccgcaaaaaggcacaagcagaattagctagcttcaaagtcctgctagatgacactcaaagtgaagcagcaagggtcctagcagacaatctcaagttgaaaaaggaacttcagtcaaataaagaatcagttaaaagccagatgaaacaaaaggatgaagatcttgagcgaagactggaacaggcagaagagaagcacctgaaagagaagaagaatatgcaagagaaactggatgctttgcgcagagaaaaagtccacttggaagagacaattggagagattcaggttactttgaacaagaaagacaaggaagttcagcaacttcaggaaaacttggacagtactgtgacccagcttgcagcctttactaagagcatgtcttccctccaggatgatcgtgacagggtgatagatgaagctaagaaatgggagaggaagtttagtgatgcgattcaaagcaaagaagaagaaattagactcaaagaagataattgcagtgttctaaaggatcaacttagacagatgtccatccatatggaagaattaaagattaacatttccaggcttgaacatgacaagcagatttgggagtccaaggcccagacagaggtccagcttcagcagaaggtctgtgatactctacagggggaaaacaaagaacttttgtcccagctagaagagacacgccacctataccacagttctcagaatgaattagctaagttggaatcagaacttaagagtctcaaagaccagttgactgatttaagtaactctttagaaaaatgtaaggaacaaaaaggaaacttggaagggatcataaggcagcaagaggctgatattcaaaattctaagttcagttatgaacaactggagactgatcttcaggcctccagagaactgaccagtaggctgcatgaagaaataaatatgaaagagcaaaagattataagcctgctttctggcaaggaagaggcaatccaagtagctattgctgaactgcgtcagcaacatgataaagaaattaaagagctggaaaacctgctgtcccaggaggaagaggagaatattgttttagaagaggagaacaaaaaggctgttgataaaaccaatcagcttatggaaacactgaaaaccatcaaaaaggaaaacattcagcaaaaggcacagttggattcctttgttaaatccatgtcttctctccaaaatgatcgagaccgcatagtgggtgactatcaacagctggaagagcgacatctctctataatcttggaaaaagaccaactcatccaagaggctgctgcagagaataataagcttaaagaagaaatacgaggcttgagaagtcatatggatgatctcaattctgagaatgccaagctagatgcagaactgatccaatatagagaagacctgaaccaagtgataacaataaaggacagccaacaaaagcagcttcttgaagttcaacttcagcaaaataaggagctggaaaataaatatgctaaattagaagaaaagctgaaggaatctgaggaagcaaatgaggatctgcggaggtcctttaatgccctacaagaagagaaacaagatttatctaaagagattgagagtttgaaagtatctatatcccagctaacaagacaagtaacagccttgcaagaagaaggtactttaggactctatcatgcccagttaaaagtaaaagaagaagaggtacacaggttaagtgctttgttttcctcctctcaaaagagaattgcagaactggaagaagaattggtttgtgttcaaaaggaagctgccaagaaggtaggtgaaattgaagataaactgaagaaagaattaaagcatcttcatcatgatgcagggataatgagaaatgaaactgaaacagcagaagagagagtggcagagctagcaagagatttggtggagatggaacagaaattactcatggtcaccaaagaaaataaaggtctcacagcacaaattcagtcttttggaaggtctatgagttccttgcaaaatagtagagatcatgccaatgaggaacttgatgaactgaaaaggaaatatgatgccagtctgaaggaattggcacagttgaaagaacagggactcttaaacagagagagagatgctcttctttctgaaaccgccttttcaatgaactccactgaggagaatagcttgtctcaccttgagaaacttaaccaacagctcctatccaaagatgagcaattgcttcacttgtcctcacaactagaagattcttataaccaagtgcagtccttttccaaggctatggccagtctgcagaatgagagagatcacctgtggaatgagctggagaaatttcgaaagtcagaggaagggaagcagaggtctgcagctcagccttccaccagcccagctgaagtacagagtttaaaaaaagctatgtcttcactccaaaatgacagagacagactactgaaggaattgaagaatctgcagcagcaatacttacagattaatcaagagatcactgagttacatccactgaaggctcaacttcaggagtatcaagataagacaaaagcatttcagattatgcaagaagagctcaggcaggaaaacctctcctggcagcatgagctgcatcagctcaggatggagaagagttcctgggaaatacatgagaggagaatgaaggaacagtaccttatggctatctcagataaagatcagcagctcagtcatctgcagaatcttataagggaattgaggtcttcttcctcccagactcagcctctcaaagtgcaataccaaagacaggcatccccagagacatcagcttccccagatgggtcacaaaatctggtttatgagacagaacttctcaggacccagctcaatgacagcttaaaggaaattcaccaaaaggagttaagaattcagcaactgaacagcaacttctctcagctactggaagagaaaaacaccctttccattcagctctgcgataccagtcagagtcttcgtgagaaccagcagcactatggtgaccttttaaatcactgtgcagtcttggagaagcaggttcaagagctgcaggcggtgagtaaagagaaggggccactaaatatagatgttgctccaggagctccccaggaaaagaatggagttcacagaaagagtgaccctgaggaactaagggaaccgcagcaaagcttttctgaagctcagcagcagctatgcaacaccagacaggaagtgaatgaattaaggaagctgctggaagaagaacgagaccaaagagtggctgctgagaatgctctctctgtggccgaggagcagatcagacggttagagcacagtgaatgggactcttcccggactcctatcattggctcctgtggcactcaggagcaggcactgttaatagatcttacaagcaacagttgtcgaaggacccggagtggcgttggatggaagcgagtcctgcgttcactctgtcattcacggacccgagtgccacttctagcagccatctactttctaatgattcatgtcctgctcattctgtgttttacgggccatctatagacttagttgttactctttggaccactcccctcaaaacttggaattctctcacctctaacatcagaacatcaattccagtggaacagtcttcccatttacaggtcttctctccaactcttcacggaaagtgcctgcaaaaacagaggtggatacgaggacaggttggagctgcagggactggcgagtctgctttcttctactgccctgagcctgaacgcttctgcttaatctgagaatcacatttggtttgttgagcctaatatttgttgagattttgcaggaccctgatcttttgtggtcctgtaaaagatactgaggaatgtctttcagccaagccaagaggatggtttcaataaacctaataatctgaagttcagtatcattttgattgataactttctttgccttgtttgcctgtattttctcctgtttcagggggaaggtggctctgccataaacagagttcagggaaatgaacatgtcacctcataggacatctgatttaggtctcttgcagaatagggtggtgaaagctgaaggaactccctaggggttttagctgttagatcacatgggaggacagcatcttcttccctgccaatttcagatataattggagggagaatttcaggtcttagactataaggatagaatccctttgcttttgcccttgatcacatgtatactaaggtattaagtggcccaagtctttcctttcaccaaagggcagggagaagtgtctatggacagcagggttccaattcttgtcattccaggaatatctgaatattcctggaatgtggaccctgagacagtgctcaggggccactgggagccaatattaggcattgactctcagccaggagtctgactggtctaacaccacactgcaactcctgacctcttgaagtactaagctactttgctgttagtgacagttattacagtttctcagccccattgtctctgccctctgtggcaatggaaggagaatatagagaagacaaaattaaatatagatagacctgagaaggacagccaggatagaattccatttgtgcctattccctgcctcccctcccctcccccatcctaccagttggttattttctcattgcatacgtgatgtgttcactgcctagcctctccctaaagaagagagaagacaagtgggctgactgatctgctctaaatctactgtggtgattaaatcttggttacaacatcctgggaagtttcctgaacaactgtaaaataataaaattattttcagaatg

SEQ ID NO: 12722 - DNA, 1699 bp, Homo sapiens
  source 1..1699: mol_type = unassigned DNA
ggccggggaaaaacccggatgagctgggcagcagtgttggcagtcgcggctgcgagatttgggcacttttgggggtgccggtggcccgggccgatggcgcaaggttgggcaggattctctgaggaggaactgaggagactaaagcagactaaagatccatttgaaccacagcgacgtctccccgcgaagaaaagtcgacaacaacttcagcgagaaaaagcccttgtagagcaaagccaaaaacttgggcttcaagatggatcaacctcattacttccagagcagctgctttcagcaccaaaacagagagttaacgttcaaaaaccacctttttcttcccctactcttccgagtcatttcactctcacctcccccgttggtgatggacaaccacagggcattgaaagtcagccaaaggaactgggacttgagaattcccatgatggtcacaacaatgttgagattctacctccaaagccagattgcaaattggagaaaaagaaagtggaattgcaagaaaaatctcgttgggaagtcctccaacaagaacaacggctaatggaagagaaaaataaacgtaaaaaagctcttttggctaaagctattgcagaaagatccaaaagaactcaggcagagaccatgaaactaaagcggatccagaaggagttgcaggctttagatgacatggtgtcagctgacattggaattctcaggaaccggattgatcaggccagcttagactattcatacgctcggtgagttggggaaattgaatctgaacaaggagtatgatttaattaatgtttattgccagctgttccaggggcttttatgtatatcatcattgaagcctcaaaacaaccccattcagtgctgtatttattcttcttttgtgctaattcaagtgtctcctcttcagtgaagtcttccttaactctgccctactagttaaccttgttcgtgtgccattagagcagttcttgcattatttatttacgttttagtctttgctgcgaaaccctcagctatttaatgtttggaagtgtttttgctcatctttcagcatctagcaaagtaaatatctgagtggtttcgccaaaactgttactctgacaccaagtctgtgttctttccattaaaatttttgatatctgatatagtcctataggattgaagtctagtcctcactttagctttcatcagagtaagaggatctagtttagtttttaaaagcttatgaatattttaagcatatcctctgtcttggaaatttgaaatattttctctttttttttcctttcaattatactctgtatgaaatggtttaatatatgtttccttggtttcaaccattggcattttttaaaagagaaaaaataccatggagtatttttaaaatgaactaacacatgtaatgaattacatggactttgcagacagataaaagggcaaaaaaatatgtccaatttcagggttttcagccctttcaacattgctttaatcatcctggtttgtcttttttcacaagggaatgctgtgttaatgactcagttttctatcttactctgttacactagaaatgaatcagaatgcctcattaggccagggtaaaccacaacatcagaatgtttatataacaatttattaaagcggaaatgcttgattgtggtttttaataaactgttgagtgtttaagaaa

SEQ ID NO: 12723 - DNA, 2189 bp, Homo sapiens
  source 1..2189: mol_type = unassigned DNA
gcggccggggaaaaacccggatgagctgggcagcagtgttggcagtcgcggctgcgagatttgggcacttttgggggtgccggtggcccgggccgatggcgcaaggttgggcaggattctctgaggaggaactgaggagactaaagcagactaaagatccatttgaaccacagcgacgtctccccgcgaagaaaagtcgacaacaacttcagcgagaaaaagcccttgtagagcaaagccaaaaacttgggcttcaagatggatcaacctcattacttccagagcagctgctttcagcaccaaaacagagagttaacgttcaaaaaccacctttttcttcccctactcttccgagtcatttcactctcacctcccccgttggtgatggacaaccacagggcattgaaagtcagccaaaggaactgggacttgagaattcccatgatggtcacaacaatgttgagattctacctccaaagccagattgcaaattggagaaaaagaaagtggaattgcaagaaaaatctcgttgggaagtcctccaacaagaacaacggctaatggaagagaaaaataaacgtaaaaaagctcttttggctaaagctattgcagaaagatccaaaagaactcaggcagagaccatgaaactaaagcggatccagaaggagttgcaggctttagatgacatggtgtcagctgacattggaattctcaggaaccggattgatcaggccagcttagactattcatacgctcggaagcggtttgacagggctgaagcagagtacattgcagcaaagctagatatacagcgcaagactgagataaaagagcaactcactgaacacctttgtacgatcatacagcaaaatgagctccgaaaggccaagaagttggaggagttgatgcaacaactagatgtagaagccgatgaagagactttggagcttgaggtggaggtcgagagattgctacacgaacaagaagtagaatcaaggagaccagtggttcgtttagagaggccatttcagcctgcggaggagagtgtgacattagaatttgctaaagagaacagaaagtgtcaagaacaagctgtttccccaaaggtagatgaccagtgtggaaattccagtagcatcccctttcttagtccaaactgcccaaatcaagaaggtaatgacatttcagctgctttggccacatgaagttctggtattcttttgagctaatatggtattgagtaaagtatactttttgcagtagatcatgccctgacctccaataaaaacctctttaaaacaatgctgatttttgaattcatgattagttttagtaaattaataggtttggccattctaaaatccaaaattatgataactgtatttctaggggtatgtttcaccttgattttggcccggttctttcagtgttccgtttaccctttttactgaaagtaagtgacttaaaaggatggaagaaaaactacatggttggagtgtttttagatcagataaatatagaaaagtaaaatggaaaatgatactcaatacctagttaaactcatttcacttctcctgggagacgtattaagactggaagtcctattttatttaatcagtatcagtaaaaagacaaaaattacagtgtgaacaagagaaaaacaggaatagaagaaaaaagttgcaggttgaattatctatctggatattactagagttgtaaaacacaacttggaaactggaatttatgtgaagaaccaaacaacttaaaccagcatcacttttgtcttcaatttgccttccagtgattttagtttacaacctgcgttttgttatttgaaacacacacacttatatataaacacatgtaattttactattttattgtctttcctttaatcgatgaattgattaaatttagacaattaaaacatttctaaagtgagactgaaaataatatagaaaatctcattgctacttgtgattatcaaaaaaagtatgtattttctttctaaagttatctataaatatgtttttgatatgttggacatgaattaccctgtcatgaagcgtttaaattgttaaaatgctgattttcttattagtttgttaattgcctgttactagtacttgaccaatacattgtgctatatgtaaatgtgtaaataaatattgtaattttctcacaaa

SEQ ID NO: 12724 - DNA, 1599 bp, Homo sapiens
  source 1..1599: mol_type = unassigned DNA
gatctccacgtcttggaggccgccggcataggtgtgcgcctggcagaacctcacaaatacacatgcacgcaggccccgactgaatccagggctgtaggggctaaagaggtctaggtcagtagaggcctgaagcccaggctggtctgtccaaggaaaaaggagcgtgattggtaccagatcttcgttccctgcagaaccttgacagttgaacaagtgacctcctccagaacagatggagagtctccagaagcagaggctttagtgaacgaaattcgcaataatcagctccagatcctgaaaaggagggcgaagaatcagtggccaaagctaaccgcttcatacccacacttcatcctcctcagtttctctccaggccaccatgtctgcaggcaacggcaccccttggggtcagcagcgggggaggaggtctgggctggatcaggagtggaggtggagggctcagagctgcccaccttctcggcagcagccaaggtccgagtgggagtgaccattgtgctgtttgtttcttcggctggagggaacctggcagtcctgtggtcagtgacacggcgggaacccagccagctccgcccctctccggtcaggagactcttcatccatttagcagccgccgacttactagtcacttttgtggttatgcccctagatgccacctggaatatcactgttcaatggctggctgtggacatcgcatgtcggacactgatgttcctgaaactaatggccacgtattctgcagctttcctgcctgtggtcattggattggaccgccaggcagcagtactcaacccgcttggatcccgttcaggtgtaaggaaacttctgggggcagcctggggacttagtttcctgcttgccttcccccagctgttcctgttccacacggtccactgagctggcccagtccctttcactcagtgtgtcaccaaaggcagcttcaaggctcaatggcaagagaccacctataacctcttcaccttctgctgcctctttctgctgccactgactgccatggccatctgctatagccgcattgtcctcagtgtgtccaggccccagacaaggaaggggagccatgcccctgctggtgaatttgccctcccccgctcctttgacaattgtccccgtgttcgtctccgggccctgagactggccctgcttatcttgctgaccttcatcctctgctggacaccttattacctactgggtatgtggtactggttctcccccaccatgctaactgaagtccctcccagcctgagccacatccttttcctcttgggcctcctcaatgctcctttggatcctctcctctatggggccttcacccttggctgccgaagagggcaccaagaacttagtatagactcttctaaagaagggtctgggagaatgctccaagaggagattcatgcctttagacagctggaagtacaaaaaactgtgacatcaagaagggcaggagaaacaaaaggcatttctataacatctatctgatcctaacagagtatgtaggaacagaatagtaagtctttagtgccataagatcttaacatctcacttctactcctgctctcc

SEQ ID NO: 12725 - DNA, 1035 bp, Homo sapiens
  source 1..1035: mol_type = unassigned DNA
ccgcttcatacccacacttcatcctcctcagtttctctccaggccaccatgtctgcaggcaacggcaccccttgggatgccacctggaatatcactgttcaatggctggctgtggacatcgcatgtcggacactgatgttcctgaaactaatggccacgtattctgcagctttcctgcctgtggtcattggattggaccgccaggcagcagtactcaacccgcttggatcccgttcaggtgtaaggaaacttctgggggcagcctggggacttagtttcctgcttgccttcccccagctgttcctgttccacacggtccactgagctggcccagtccctttcactcagtgtgtcaccaaaggcagcttcaaggctcaatggcaagagaccacctataacctcttcaccttctgctgcctctttctgctgccactgactgccatggccatctgctatagccgcattgtcctcagtgtgtccaggccccagacaaggaaggggagccatgcccctgctggtgaatttgccctcccccgctcctttgacaattgtccccgtgttcgtctccgggccctgagactggccctgcttatcttgctgaccttcatcctctgctggacaccttattacctactgggtatgtggtactggttctcccccaccatgctaactgaagtccctcccagcctgagccacatccttttcctcttgggcctcctcaatgctcctttggatcctctcctctatggggccttcacccttggctgccgaagagggcaccaagaacttagtatagactcttctaaagaagggtctgggagaatgctccaagaggagattcatgcctttagacagctggaagtacaaaaaactgtgacatcaagaagggcaggagaaacaaaaggcatttctataacatctatctgatcctaacagagtatgtaggaacagaatagtaagtctttagtgccataagatcttaacatctcacttctactcctgctctcctagttccccccaaaaaagaaatactga

SEQ ID NO: 12726 - DNA, 425 bp, Homo sapiens
  source 1..425: mol_type = unassigned DNA
ctgcagctgcctgaaggagccatctcatccacagctcttccttgagcagccatggccagctccaggcgaggcctcctgctcctgctgctgctgactgcccaccttggaccctcagaggctcagcactggtcccatggctggtaccctggaggaaagcgagccctcagctcagcccaggatccccagaatgcccttaggcccccaggaagggccctggacactgcagcaggcagcccagtccagactgcccatggcctcccaagtgatgccctggctcccctggacgacagcatgccctgggagggcaggaccacggcccagtggtcccttcacaggaagcgacacctggcacggacactgctgaccgcagcccgagagccccgccccgccccgccatcctccaataaagtgtgaggttctccgaa

SEQ ID NO: 12727 - DNA, 404 bp, Homo sapiens
  source 1..404: mol_type = unassigned DNA
ctgcagctgcctgaaggagccatctcatccacagctcttccttgagcagccatggccagctccaggcgaggcctcctgctcctgctgctgctgactgcccaccttggaccctcagaggctcagcactggtcccatggctggtaccctggaggaaagcgagccctcagctcagcccaggatccccagaatgcccttaggcccccagcaggcagcccagtccagactgcccatggcctcccaagtgatgccctggctcccctggacgacagcatgccctgggagggcaggaccacggcccagtggtcccttcacaggaagcgacacctggcacggacactgctgaccgcagcccgagagccccgccccgccccgccatcctccaataaagtgtgaggttctccgaa

SEQ ID NO: 12728 - DNA, 399 bp, Homo sapiens
  source 1..399: mol_type = unassigned DNA
ctgcagctgcctgaaggagccatctcatccacagctcttccttgagcagccatggccagctccaggcgaggcctcctgctcctgctgctgctgactgcccaccttggaccctcagaggctcagcactggtcccatggctggtaccctggaggaaagcgagccctcagctcagcccaggatccccagaatgcccttaggcccccaggcagcccagtccagactgcccatggcctcccaagtgatgccctggctcccctggacgacagcatgccctgggagggcaggaccacggcccagtggtcccttcacaggaagcgacacctggcacggacactgctgaccgcagcccgagagccccgccccgccccgccatcctccaataaagtgtgaggttctccg

SEQ ID NO: 12729 - DNA, 353 bp, Homo sapiens
  source 1..353: mol_type = unassigned DNA
gccatggccagctccaggcgaggcctcctgctcctgctgctgctgactgcccaccttggaccctcagaggctcagcactggtcccatggctggtaccctggaggaaagcgagccctcagctcagcccaggatccccagaatgcccttaggcccccaggcagcccagtccagactgcccatggcctcccaagtgatgccctggctcccctggacgacagcatgccctgggagggcaggaccacggcccagtggtcccttcacaggaagcgacacctggcacggacactgctgaccgcagcccgagagccccgccccgccccgccatcctccaataaagtgtgaggttctccgaa

SEQ ID NO: 12730 - DNA, 758 bp, Homo sapiens
  source 1..758: mol_type = unassigned DNA
gagaactcccctgaccatccatctatcctcccatccattggcctgaattcaggtctctgttcccctccaactttcttccacttctggaaactccttgaaggaaagatggatggacctggacaagtgggagggccctcagagctggcaaggcaggtagcctctgtgccccaggctcagggagaaggctcgtcccctggagcatcatcccctgctgggccaggatcccccaggatctggacccctgtatgcttgggatgaggagcggtggcagagagggaagggcataaggagataccaaagctgcccctgagatgccagttttccaaagtggccctggaggaagtagggggatgtgggggtgaggtaagtctccttgaatgctgtaccctgtccattagagcagccatggccagctccaggcgaggcctcctgctcctgctgctgctgactgcccaccttggaccctcagaggctcagcactggtcccatggctggtaccctggaggaaagcgagccctcagctcagcccaggatccccagaatgcccttaggcccccagcaggcagcccagtccagactgcccatggcctcccaagtgatgccctggctcccctggacgacagcatgccctgggagggcaggaccacggcccagtggtcccttcacaggaagcgacacctggcacggacactgctgaccgcagcccgagagccccgccccgccccgccatcctccaataaagtgtgaggttctccgaa

SEQ ID NO: 12731 - DNA, 2164 bp, Homo sapiens
  source 1..2164: mol_type = unassigned DNA
gcttgaagctctgtcctgggaaaatatggcaaacagtgcctctcctgaacagaatcaaaatcactgttcagccatcaacaacagcatcccactgatgcagggcaacctccccactctgaccttgtctggaaagatccgagtgacggttactttcttcctttttctgctctctgcgacctttaatgcttctttcttgttgaaacttcagaagtggacacagaagaaagagaaagggaaaaagctctcaagaatgaagctgctcttaaaacatctgaccttagccaacctgttggagactctgattgtcatgccactggatgggatgtggaacattacagtccaatggtatgctggagagttactctgcaaagttctcagttatctaaagcttttctccatgtatgccccagccttcatgatggtggtgatcagcctggaccgctccctggctatcacgaggcccctagctttgaaaagcaacagcaaagtcggacagtccatggttggcctggcctggatcctcagtagtgtctttgcaggaccacagttatacatcttcaggatgattcatctagcagacagctctggacagacaaaagttttctctcaatgtgtaacacactgcagtttttcacaatggtggcatcaagcattttataactttttcaccttcagctgcctcttcatcatccctcttttcatcatgctgatctgcaatgcaaaaatcatcttcaccctgacacgggtccttcatcaggacccccacgaactacaactgaatcagtccaagaacaatataccaagagcacggctgaagactctaaaaatgacggttgcatttgccacttcatttactgtctgctggactccctactatgtcctaggaatttggtattggtttgatcctgaaatgttaaacaggttgtcagacccagtaaatcacttcttctttctctttgcctttttaaacccatgctttgatccacttatctatggatatttttctctgtgattgatagactacacaagaagtcatatgaagaagggtaaggtaatgaatctctccatctgggaatgattaacacaaatgttggagcatgtttacatacaaacaaagtaggatttacacttaagttatcattcttttagaaactcagtcttcagagcctcaattattaaggaaaagtcttcaggaaaaatactaaaatattttctcttcctcataagcttctaaattaatctctgccttttctgacctcatataacacattatgtaggtttcttatcactttctctttgcataataatgtactaatatttaaaataccttcagcctaaggcacaaggatgccaaaaaaacaaaggtgagaaaccacaacacaggtctaaactcagcatgctttggtgagtttttctccaaaaggggcatattagcaattagagttgtatgctatataatacatagagcacagagccctttgcccataatatcaactttccctcctatagttaaaaagaaaaaaaatgaatctatttttctctttggcttcaaaagcattctgacatttggaggagtcagtaaccaatcccaccaaccactccagcaacctgacaagactatgagtagttctccttcatcctatttatgtggtacaggttgtgaagtatctctatataaagggaaattttagaggggttaggatttggacaggggtttagaacattcctctaagctatctagtctgtggagtttgtggcaattaattgccataaaataacaatgtttccaaatgcaactaagaaaatactcatagtgagtacgctctatgcatagtatgacttctattttaatgtgaagaattttttgtctctctcctgatcttactaaatccatatttcataaataactgagaataattaaaacaaaattaagcaaatgcacaagcaaaaagatgcttgatacacaaaaggaactctggagagaaaactacagcttcagtctgtacagatcaaagaagacagaacatgtcaggggaaggagggaaagatcttgatgcagggtttcttaacctgcagtctatgcacaacactatatttccatgtaatgtttttatttcagccctatttgtattattttgtgcatttaaaaaacacaatcttaagg

SEQ ID NO: 12732 - DNA, 859 bp, Homo sapiens
  source 1..859: mol_type = unassigned DNA
atggcaaacagtgcctctcctgaacagaatcaaaatcactgttcagccatcaacaacagcatcccactgatgcagggcaacctccccactctgaccttgtctggaaagatccgagtgacggttactttcttcctttttctgctctctgcgacctttaatgcttctttcttgttgaaacttcagaagtggacacagaagaaagagaaagggaaaaagctctcaagaatgaagctgctcttaaaacatctgaccttagccaacctgttggagactctgattgtcatgccactggatgggatgtggaacattacagtccaatggtatgctggagagttactctgcaaagttctcagttatctaaagcttttctccatgtatgccccagccttcatgatggtggtgatcagcctggaccgctccctggctatcacgaggcccctagctttgaaaagcaacagcaaagtcggacagtccatggttggcctggcctggatcctcagtagtgtctttgcaggaccacagctgcctcttcatcatccctcttttcatcatgctgatctgcaatgcaaaaatcatcttcaccctgacacgggtccttcatcaggacccccacgaactacaactgaatcagtccaagaacaatataccaagagcacggctgaagactctaaaaatgacggttgcatttgccacttcatttactgtctgctggactccctactatgtcctaggaatttggtattggtttgatcctgaaatgttaaacaggttgtcagacccagtaaatcacttcttctttctctttgcctttttaaacccatgctttgatccacttatctatggatatttttctctgtga

SEQ ID NO: 12733 - DNA, 3032 bp, Homo sapiens
  source 1..3032: mol_type = unassigned DNA
aggcgcagaggagggcggtgttgagaccggcggagcggcgggacccctaggtggcggagggacgctccgggaaagcgaggggcgctacgagctctggcccacgtgacctgccgggggcgggagcagggggcgcgccggcctcctgcggtgcccctgccttggggaggggccgtgaccacccgtctgtcgcccgaggcggccgccgctgcaccttcaccgcgtacccgggacccgcccgcccgcgggagaaatgttgctgaagtgctgctgaaagggccagagatgcaaggatttgggatacattttgaacctttaagctgtctgacattgacctcctttcattattaataaagaagaatcaggagcttaggatgtattaacaccaactcattaatatactaaccggacaatgttctacaaacaattctacattgtaaaggactggattggcacaaaataaaataattttattttattcagcttataatatgactcgatggaggaaaatttgataagcatgagagaagaccattcttttcatgttcgttacagaatggaagcttcttgcctagagctggccttggaaggggaacgtctatgtaaatcaggagactgccgcgctggcgtgtcattctttgaagctgcagttcaagttggaactgaagacctaaaaacacttagcgctatttacagccagttgggcaatgcttatttctatttgcatgattatgccaaagcattagaatatcaccatcatgatttaacccttgcaaggactattggagaccagctgggggaagcgaaagctagtggtaatctgggaaacaccttaaaagttcttgggaattttgacgaagccatagtttgttgtcagcgacacctagatatttccagagagcttaatgacaaggtgggagaagcaagagcactttacaatcttgggaatgtgtatcatgccaaagggaaaagttttggttgccctggtccccaggatgtaggagaatttccagaagaagtgagagatgctctgcaggcagccgtggatttttatgaggaaaacctatcattagtgactgctttgggtgaccgagcggcacaaggacgtgcctttggaaatcttggaaacacacattacctccttggcaacttcagggatgcagttatagctcatgagcagcgtctccttattgcaaaagaatttggagataaagcagctgaaagaagagcatatagcaaccttggaaatgcatatatatttcttggtgaatttgaaactgcctcggaatactacaagaagacactactgttggcccgacagcttaaagaccgagctgtagaagcacagtcttgttacagtcttggaaatacatatactttacttcaagactatgaaaaggccattgattatcatctgaagcacttagcaattgctcaagagctgaatgatagaattggtgaaggaagagcatgttggagcttaggaaatgcatacacagcactaggaaatcatgatcaagcaatgcattttgctgaaaagcacttggaaatttcaagagaggttggggataaaagtggtgaactaacagcacgacttaatctctcagaccttcaaatggttcttggtctgagctacagcacaaataactccataatgtctgaaaatactgaaattgatagcagtttgaatggtgtacgccccaagttgggacgccggcatagtatggaaaatatggaacttatgaagttaacaccagaaaaggtacagaactggaacagtgaaattcttgctaagcaaaaacctcttattgccaaaccttctgcaaagctactctttgtcaacagactgaaggggaaaaaatacaaaacgaattcctccactaaagttctccaagatgccagtaattctattgaccaccgaattccaaattctcagaggaaaatcagtgcagatactattggagatgaagggttctttgacttattaagccgatttcaaagcaataggatggatgatcagagatgttgcttacaagaaaagaactgccatacagcttcaacaacaacttcttccactccccctaaaatgatgctaaaaacatcatctgttcctgtggtatcccccaacacggatgagtttttagatcttcttgccagctcacagagtcgccgtctggatgaccagagggctagtttcagtaatttgccagggcttcgtctaacacaaaacagccagtcggtacttagccacctgatgactaatgacaacaaagaggctgatgaagatttctttgacatccttgtaaaatgtcaaggatccagattagatgatcaaagatgtgctccaccacctgctaccacaaagggtccgacagtaccagatgaagactttttcagccttattttacggtcccagggaaagagaatggatgaacagagagttcttttacaaagagatcaaaacagagacactgactttgggctaaaggactttttgcaaaataatgctttgttggagtttaaaaattcagggaaaaaatcggcagaccattagttactatggatttattttttttcctttcaaacacggtaaggaaacaatctattacttttttccttaaaaggagaatttatagcactgtaatacagcttaaaatatttttagaatgatgtaaatagttaaccttcagtagtctattaaggcattaatacttctctggacatgcgcgtttgagggtggaggggtcctgtaaggtgcttcatcgtctgtgattactgcttgggatgtgttctttggcagcttgtgagattactttacctagtgtttataaagtaggaagttaagtgaatcatagattagaatttaatactcttatggaaataattttttaacatcttaattgacaatggcgtttttttatacataaccatggatgtagtgggaaacaatgttgtttggtaaaaataatgtacttgatcaatgtaaaaaagtatataaaatagtcttactaaaaatctaggtttttttttcctcc

SEQ ID NO: 12734 - DNA, 3310 bp, Homo sapiens
  source 1..3310: mol_type = unassigned DNA
aaagaagataactcattcaaggtcaatcagcaatgtctgaagaagaaagaagaggacaggaaagaaacttcagtctgagggttgaggacacgtcccggagcagaggaggaccaagctcccaagccccctgtcaccttgacacgcagacggttccccaggactgcgaagaggggggcaaccagcgccccgccccgccccgctgcgccgcccgccattggccggtccgaaagacgcggggcgttgtcggtttgaatgagagcgcctggagccggggcgcaggcgcagaggagggcggtgttgagaccggcggagcggcgggacccctaggtggcggagggacgctccgggaaagcgaggggcgctacgagctctggcccacgtgacctgccgggggcgggagcagggggcgcgccggcctcctgcggtgcccctgccttggggaggggccgtgaccacccgtctgtcgcccgaggcggccgccgctgcaccttcaccgcgtacccgggacccgcccgcccgcgggagaaatgttgctgaagtgctgctgaaagggccagagatgcaaggatttgggatacattttgaacctttaagctgtctgacattgacctcctttcattattaataaagaagaatcaggagcttaggatgtattaacaccaactcattaatatactaaccggacaatgttctacaaacaattctacattgtaaaggactggattggcacaaaataaaataattttattttattcagcttataatatgactcgatggaggaaaatttgataagcatgagagaagaccattcttttcatgttcgttacagaatggaagcttcttgcctagagctggccttggaaggggaacgtctatgtaaatcaggagactgccgcgctggcgtgtcattctttgaagctgcagttcaagttggaactgaagacctaaaaacacttagcgctatttacagccagttgggcaatgcttatttctatttgcatgattatgccaaagcattagaatatcaccatcatgatttaacccttgcaaggactattggagaccagctgggggaagcgaaagctagtggtaatctgggaaacaccttaaaagttcttgggaattttgacgaagccatagtttgttgtcagcgacacctagatatttccagagagcttaatgacaaggtgggagaagcaagagcactttacaatcttgggaatgtgtatcatgccaaagggaaaagttttggttgccctggtccccaggatgtaggagaatttccagaagaagtgagagatgctctgcaggcagccgtggatttttatgaggaaaacctatcattagtgactgctttgggtgaccgagcggcacaaggacgtgcctttggaaatcttggaaacacacattacctccttggcaacttcagggatgcagttatagctcatgagcagcgtctccttattgcaaaagaatttggagataaagcagctgaaagaagagcatatagcaaccttggaaatgcatatatatttcttggtgaatttgaaactgcctcggaatactacaagaagacactactgttggcccgacagcttaaagaccgagctgtagaagcacagtcttgttacagtcttggaaatacatatactttacttcaagactatgaaaaggccattgattatcatctgaagcacttagcaattgctcaagagctgaatgatagaattggtgaaggaagagcatgttggagcttaggaaatgcatacacagcactaggaaatcatgatcaagcaatgcattttgctgaaaagcacttggaaatttcaagagaggttggggataaaagtggtgaactaacagcacgacttaatctctcagaccttcaaatggttcttggtctgagctacagcacaaataactccataatgtctgaaaatactgaaattgatagcagtttgaatggtgtacgccccaagttgggacgccggcatagtatggaaaatatggaacttatgaagttaacaccagaaaaggtacagaactggaacagtgaaattcttgctaagcaaaaacctcttattgccaaaccttctgcaaagctactctttgtcaacagactgaaggggaaaaaatacaaaacgaattcctccactaaagttctccaagatgccagtaattctattgaccaccgaattccaaattctcagaggaaaatcagtgcagatactattggagatgaagggttctttgacttattaagccgatttcaaagcaataggatggatgatcagagatgttgcttacaagaaaagaactgccatacagcttcaacaacaacttcttccactccccctaaaatgatgctaaaaacatcatctgttcctgtggtatcccccaacacggatgagtttttagatcttcttgccagctcacagagtcgccgtctggatgaccagagggctagtttcagtaatttgccagggcttcgtctaacacaaaacagccagtcggtacttagccacctgatgactaatgacaacaaagaggctgatgaagatttctttgacatccttgtaaaatgtcaaggatccagattagatgatcaaagatgtgctccaccacctgctaccacaaagggtccgacagtaccagatgaagactttttcagccttattttacggtcccagggaaagagaatggatgaacagagagttcttttacaaagagatcaaaacagagacactgactttgggctaaaggactttttgcaaaataatgctttgttggagtttaaaaattcagggaaaaaatcggcagaccattagttactatggatttattttttttcctttcaaacacggtaaggaaacaatctattacttttttccttaaaaggagaatttatagcactgtaatacagcttaaaatatttttagaatgatgtaaatagttaaccttcagtagtctattaaggcattaatacttctctggacatgcgcgtttgagggtggaggggtcctgtaaggtgcttcatcgtctgtgattactgcttgggatgtgttctttggcagcttgtgagattactttacctagtgtttataaagtaggaagttaagtgaatcatagattagaatttaatactcttatggaaataattttttaacatcttaattgacaatggcgtttttttatacataaccatggatgtagtgggaaacaatgttgtttggtaaaaataatgtacttgatcaatgtaaaaaagtatataaaatagtcttactaaaaatctaggtttttttttcctcca

SEQ ID NO: 12735 - DNA, 992 bp, Homo sapiens
  source 1..992: mol_type = unassigned DNA
aggcgtttgaggggctctcggagggaggtgacagggaggggtgcgtgtgcgtgcgtgtggggcttctgtgtccagaggtctgggggtgacgtcctttgttttgggcaggaggcgggctgggggcttgcgggacctgtgggcgctgcggggacgcggcgtcgatgctcaagaaaccagaaactcggcttgaggagttgctgcttttttgtcggaaggtcttcaaatgagagtaaagcgttaagagcctcactcctgagtctttttttttttttaagataaaaactatactagagtccagcgacttcttaccactctgaatgtgagtaacaaattgtgaatcaaagcccgaatccccgtggaattcattccgaggctgattgcaatcacttggagtcgggcgcgtcctacctaaaccaggcagtttatggcaaatacctgccttgaccgtgcttaaattagtgaacttttgggcaccaactggtcgatttaccatagaaattggtagttgctgcaaaaagaaaatgttgctgaagtgctgctgaaagggccagagatgcaaggatttgggatacattttgaacctttaagctgtctgacattgacctcctttcattattaataaagaagaatcaggagcttaggatgtattaacaccaactcattaatatactaaccggacaatgttctacaaacaattctacattgtaaaggactggattggcacaaaataaaataattttattttattcagcttataatatgactcgatggaggaaaatttgataagcatgagagaagaccattcttttcatgttcgttacagaatggaagcttcttgcctagagctggccttggaaggggaacgtctatgtaaatcaggagactgccgcgctggcgtgtcattctttgaagctgcagttcaagttggaactgaagacctaaaaacacttagcgctatttacagccagttgggcaatgcttatttctatttg

SEQ ID NO: 12736 - DNA, 904 bp, Homo sapiens
  source 1..904: mol_type = unassigned DNA
aggcgcagaggagggcggtgttgagaccggcggagcggcgggacccctaggtggcggagggacgctccgggaaagcgaggggcgctacgagctctggcccacgtgacctgccgggggcgggagcagggggcgcgccggcctcctgcggtgcccctgccttggggaggggccgtgaccacccgtctgtcgcccgaggcggccgccgctgcaccttcaccgcgtacccgggacccgcccgcccgcgggagcttataatatgactcgatggaggaaaatttgataagcatgagagaagaccattcttttcatgttcgttacagaatggaagcttcttgcctagagctggccttggaaggggaacgtctatgtaaatcaggagactgccgcgctggcgtgtcattctttgaagctgcagttcaagttggaactgaagacctaaaaacacttagcgctatttacagccagttgggcaatgcttatttctatttgcatgattatgccaaagcattagaatatcaccatcatgatttaacccttgcaaggactattggagaccagctgggggaagcgaaagctagtggtaatctgggaaacaccttaaaagttcttgggaattttgacgaagccatagtttgttgtcagcgacacctagatatttccagagagcttaatgacaaggtgggagaagcaagagcactttacaatcttgggaatgtgtatcatgccaaagggaaaagttttggttgccctggtccccaggatgtaggagaatttccagaagaagtgagagatgctctgcaggcagccgtggatttttatgaggaaaacctatcattagtgactgctttgggtgaccgagcggcacaaggacgtgcctttggaaatcttggaaacacacattacc

SEQ ID NO: 12737 - DNA, 571 bp, Homo sapiens
  source 1..571: mol_type = unassigned DNA
gcggcgtcgatgctcaagaaaccagaaactcggcttgaggagttgctgcttttttgtcggaaggtcttcaaatgagagtaaagcgttaagagcctcactcctgagtctttttttttttttaagataaaaactatactagagtccagcgacttcttaccactctgaataaatgttgctgaagtgctgctgaaagggccagagatgcaaggatttgggatacattttgaacctttaagctgtctgacattgacctcctttcattattaataaagaagaatcaggagcttaggatgtattaacaccaactcattaatatactaaccggacaatgttctacaaacaattctacattgtaaaggactggattggcacaaaataaaataattttattttattcagcttataatatgactcgatggaggaaaatttgataagcatgagagaagaccattcttttcatgttcgttacagaatggaagcttcttgcctagagctggccttggaaggggaacgtctatgtaaatcaggagactgccgcgctggcgtgtcattctttgaagctgcagttcaa

SEQ ID NO: 12738 - DNA, 3527 bp, Homo sapiens
  source 1..3527: mol_type = unassigned DNA
cagtgcgcgcagcccgcgcggagccggctcagagcgagaaaagcaaacccaacccgtcggggccgccgctccggacccgcagccgccgccgccgcctcctccccccggatcgggtgtactgtcccaacccgaaagtccagttctgcggcccggcagcggcgagcgggcgcgatgacacaggagtacgacaacaaacggccagtgttggttcttcagaatgaagcactttatccacagcggcggtcctacactagtgaggatgaggcctggaaatccttcctggaaaaccctctcactgcagcgaccaaagcgatgatgagcatcaatggagatgaagacagcgccgctgcgctgggcctgctctatgactactacaaggttccaagagagagaaggtcatcaacagcaaagccagaggtggagcaccctgagccagatcacagcaaaagaaacagcataccaattgtgacagagcagcccctcatctctgctggagaaaacagagtgcaagtactgaaaaatgtgccatttaacattgtccttccccatggcaaccagctgggcattgataagagaggccatctgacagctccagatacgacagtcactgtctccatagcaacgatgcctacccactccatcaagacagaaacccagccacatggcttcgctgtgggaatccccccagcagtgtatcatcctgagcccactgagcgggtggtggttttcgatcggaatctcaatactgaccagttcagctctggtgctcaagccccaaatgctcaaaggcgaactccagactcgaccttctcagagaccttcaaggaaggcgttcaggaggaacaactttgaatataccctagaagcttcaaaatcacttcgacagaagccaggagacagtaccatgacgtacctgaacaaaggccagttctatcccatcaccttgaaggaggtgagcagcagtgaaggaatccatcatcccatcagcaaagttcgaagtgtgatcatggtggtttttgctgaagacaaaagcagagaagatcagttaaggcattggaagtactggcactcccggcagcacaccgctaaacaaagatgcattgacatagctgactataaagaaagcttcaacactatcagtaacatcgaggagattgcgtataacgccatttccttcacatgggacatcaacgatgaagcaaaggttttcatctctgtgaactgcttaagcacagatttctcttcccagaagggagtgaaggggttgcctcttaacattcaagttgatacctatagttacaacaaccgcagcaacaagcctgtgcaccgggcctactgccagatcaaggtcttctgtgacaagggagctgagcggaaaatcagggatgaagaacgaaagcaaagcaaaagaaaagtttctgatgttaaagtgccactgcttccctctcacaagcgaatggatatcacagttttcaaacccttcattgatctcgatactcagcctgtcctcttcattcctgacgtgcactttgccaacttgcagcggggcactcatgtccttcccattgcctctgaagaattggagggtgaaggctctgtcttgaaaagggggccgtacggcacagaagatgactttgctgtccctccttctaccaagctggcccggatagaagaaccaaagagagtgctgctctacgttcgaaaggagtcagaagaagtctttgatgccctgatgctcaaaaccccatctttgaagggcttgatggaagctatctcagacaaatacgatgttccccatgacaagattgggaaaatattcaagaagtgtaaaaaggggatcctggtgaacatggacgacaacattgtgaagcattactccaatgaggacaccttccagctgcagattgaagaagccggggggtcttacaagctcaccctgacggagatctaaaggcctgcgggccacagctccccaggagttcagtgcaggtgtttctagatcttacggtttggcaactgcaggtaaccccagtcagccatgtcgccagcacaggtctatgtcgagggaatgggttccttgcaggttggaggcggggctgcatctggcttggtggtagcatttaatctattgcattggtgtttttcagatgaaagagaaatccatataccattatgtttgaatttcctgatatatacaggatttaaagtgaaaactttattccaagagttaacagagtctctgggaagctttaggacatctgctacgttatttatcaaaatattgggatctctgccttgtgcctacagtgtcgtgggcctgctcgctagcagaagtcagaaaaggcgataggcttggctttaaggatttcgtgcccttgcctgaattcagtacaactccactgcctcacgttagcgggagcgcacctgaagagtacggggggagccctctctcccttaccctctcactctccaccagatgtttactaaacagggcatgttactgaaatcttcctttgcgactttctcggacatatcaactgcctttctcatgaagaattttaatgggttacagtatgaaatcagttaagataaagctgcattgtatataagtgcaatatatttttgaaggtctgtaaatgtgtacatacatgtcttatataaatatataatatataaatatggtgtctgtgtacatatagtgaagatatgcagtaagagctaccttaaagactttccctagacaaaggttaagttattttttgatcgtgtataccaagcagatagaatactgtgcttagtggaacccgctaaaaacctttttctctgtttttccaaacacaggcattctgtagcatagcaaaaccttctcaaatgacagagattctgtttgctgttgagaatgttgttatttggatttctgcactgtttaacaaatgaagtaaaagaaaaacactactgcaatcacgtcttttgttatgctagtatcagtcagatgcacttagagtgaagaaacactgtaattacagcacacagattgcaagtattgcgtaccaagtgatacaactcgaaatgcagttctcatcttcctgttttgagaaatgattattttatcacgcatcagagccttcgtgctttgattatcttgtatgttaacaattctagaaaacattcatgaattcacaaaaatatgttactatggcaggggaacattttgtacacatttaagtatataaaaatactaaaatatgtaattttataacaaagtcacgggtatctttaggttcagggaactagactaggtcattcgtgtaaatggactggtagttacagtcttaggttaaagtattctaatgaagtatgggaactaaattgctggttttctaagataagatatgggatatgggtcatataacttttgtattttttatgaagttgattttgtcttgcgtgttatttttaattgtatcattgaagatgtattttaaaccaaaggaattaaattttatatgtctatttcgtaatatgtc

SEQ ID NO: 12739 - DNA, 3563 bp, Homo sapiens
  source 1..3563: mol_type = unassigned DNA
gagaaaagcaaacccaacccgtcggggccgccgctccggacccgcagccgccgccgccgcctcctccccccggatcgggtgtactgtcccaacccgaaagtccagttctgcggcccggcagcggcgagcgggcgcgatgacacaggagtacgacaacaaacggccagtgttggttcttcagaatgaagcactttatccacagcggcggtcctacactagtgaggatgaggcctggaaatccttcctggaaaaccctctcactgcagcgaccaaagcgatgatgagcatcaatggagatgaagacagcgccgctgcgctgggcctgctctatgactactacaaggttccaagagagagaaggtcatcaacagcaaagccagaggtggagcaccctgagccagatcacagcaaaagaaacagcataccaattgtgacagagcagcccctcatctctgctggagaaaacagagtgcaagtactgaaaaatgtgccatttaacattgtccttccccatggcaaccagctgggcattgataagagaggccatctgacagctccagatacgacagtcactgtctccatagcaacgatgcctacccactccatcaagacagaaacccagccacatggcttcgctgtgggaatccccccagcagtgtatcatcctgagcccactgagcgggtggtggttttcgatcggaatctcaatactgaccagttcagctctggtgctcaagccccaaatgctcaaaggcgaactccagactcgaccttctcagagaccttcaaggaaggcgttcaggaggttttcttcccctcggatctcagtctgcggatgcctggcatgaattcagaggactatgtttttgacagtgtttctgggaacaactttgaatataccctagaagcttcaaaatcacttcgacagaagccaggagacagtaccatgacgtacctgaacaaaggccagttctatcccatcaccttgaaggaggtgagcagcagtgaaggaatccatcatcccatcagcaaagttcgaagtgtgatcatggtggtttttgctgaagacaaaagcagagaagatcagttaaggcattggaagtactggcactcccggcagcacaccgctaaacaaagatgcattgacatagctgactataaagaaagcttcaacactatcagtaacatcgaggagattgcgtataacgccatttccttcacatgggacatcaacgatgaagcaaaggttttcatctctgtgaactgcttaagcacagatttctcttcccagaagggagtgaaggggttgcctcttaacattcaagttgatacctatagttacaacaaccgcagcaacaagcctgtgcaccgggcctactgccagatcaaggtcttctgtgacaagggagctgagcggaaaatcagggatgaagaacgaaagcaaagcaaaagaaaagtttctgatgttaaagtgccactgcttccctctcacaagcgaatggatatcacagttttcaaacccttcattgatctcgatactcagcctgtcctcttcattcctgacgtgcactttgccaacttgcagcggggcactcatgtccttcccattgcctctgaagaattggagggtgaaggctctgtcttgaaaagggggccgtacggcacagaagatgactttgctgtccctccttctaccaagctggcccggatagaagaaccaaagagagtgctgctctacgttcgaaaggagtcagaagaagtctttgatgccctgatgctcaaaaccccatctttgaagggcttgatggaagctatctcagacaaatacgatgttccccatgacaagattgggaaaatattcaagaagtgtaaaaaggggatcctggtgaacatggacgacaacattgtgaagcattactccaatgaggacaccttccagctgcagattgaagaagccggggggtcttacaagctcaccctgacggagatctaaaggcctgcgggccacagctccccaggagttcagtgcaggtgtttctagatcttacggtttggcaactgcaggtaaccccagtcagccatgtcgccagcacaggtctatgtcgagggaatgggttccttgcaggttggaggcggggctgcatctggcttggtggtagcatttaatctattgcattggtgtttttcagatgaaagagaaatccatataccattatgtttgaatttcctgatatatacaggatttaaagtgaaaactttattccaagagttaacagagtctctgggaagctttaggacatctgctacgttatttatcaaaatattgggatctctgccttgtgcctacagtgtcgtgggcctgctcgctagcagaagtcagaaaaggcgataggcttggctttaaggatttcgtgcccttgcctgaattcagtacaactccactgcctcacgttagcgggagcgcacctgaagagtacggggggagccctctctcccttaccctctcactctccaccagatgtttactaaacagggcatgttactgaaatcttcctttgcgactttctcggacatatcaactgcctttctcatgaagaattttaatgggttacagtatgaaatcagttaagataaagctgcattgtatataagtgcaatatatttttgaaggtctgtaaatgtgtacatacatgtcttatataaatatataatatataaatatggtgtctgtgtacatatagtgaagatatgcagtaagagctaccttaaagactttccctagacaaaggttaagttattttttgatcgtgtataccaagcagatagaatactgtgcttagtggaacccgctaaaaacctttttctctgtttttccaaacacaggcattctgtagcatagcaaaaccttctcaaatgacagagattctgtttgctgttgagaatgttgttatttggatttctgcactgtttaacaaatgaagtaaaagaaaaacactactgcaatcacgtcttttgttatgctagtatcagtcagatgcacttagagtgaagaaacactgtaattacagcacacagattgcaagtattgcgtaccaagtgatacaactcgaaatgcagttctcatcttcctgttttgagaaatgattattttatcacgcatcagagccttcgtgctttgattatcttgtatgttaacaattctagaaaacattcatgaattcacaaaaatatgttactatggcaggggaacattttgtacacatttaagtatataaaaatactaaaatatgtaattttataacaaagtcacgggtatctttaggttcagggaactagactaggtcattcgtgtaaatggactggtagttacagtcttaggttaaagtattctaatgaagtatgggaactaaattgctggttttctaagataagatatgggatatgggtcatataacttttgtattttttatgaagttgattttgtcttgcgtgttatttttaattgtatcattgaagatgtattttaaaccaaaggaattaaattttatatgtctatttcgtaa

SEQ ID NO: 12740 - DNA, 3433 bp, Homo sapiens
  source 1..3433: mol_type = unassigned DNA
ctgccaaaagaagtagaaaacaaacggccagtgttggttcttcagaatgaagcactttatccacagcggcggtcctacactagtgaggatgaggcctggaaatccttcctggaaaaccctctcactgcagcgaccaaagcgatgatgagcatcaatggagatgaagacagcgccgctgcgctgggcctgctctatgactactacaaggttccaagagagagaaggtcatcaacagcaaagccagaggtggagcaccctgagccagatcacagcaaaagaaacagcataccaattgtgacagagcagcccctcatctctgctggagaaaacagagtgcaagtactgaaaaatgtgccatttaacattgtccttccccatggcaaccagctgggcattgataagagaggccatctgacagctccagatacgacagtcactgtctccatagcaacgatgcctacccactccatcaagacagaaacccagccacatggcttcgctgtgggaatccccccagcagtgtatcatcctgagcccactgagcgggtggtggttttcgatcggaatctcaatactgaccagttcagctctggtgctcaagccccaaatgctcaaaggcgaactccagactcgaccttctcagagaccttcaaggaaggcgttcaggaggttttcttcccctcggatctcagtctgcggatgcctggcatgaattcagaggactatgtttttgacagtgtttctgggaacaactttgaatataccctagaagcttcaaaatcacttcgacagaagccaggagacagtaccatgacgtacctgaacaaaggccagttctatcccatcaccttgaaggaggtgagcagcagtgaaggaatccatcatcccatcagcaaagttcgaagtgtgatcatggtggtttttgctgaagacaaaagcagagaagatcagttaaggcattggaagtactggcactcccggcagcacaccgctaaacaaagatgcattgacatagctgactataaagaaagcttcaacactatcagtaacatcgaggagattgcgtataacgccatttccttcacatgggacatcaacgatgaagcaaaggttttcatctctgtgaactgcttaagcacagatttctcttcccagaagggagtgaaggggttgcctcttaacattcaagttgatacctatagttacaacaaccgcagcaacaagcctgtgcaccgggcctactgccagatcaaggtcttctgtgacaagggagctgagcggaaaatcagggatgaagaacgaaagcaaagcaaaagaaaagtttctgatgttaaagtgccactgcttccctctcacaagcgaatggatatcacagttttcaaacccttcattgatctcgatactcagcctgtcctcttcattcctgacgtgcactttgccaacttgcagcggggcactcatgtccttcccattgcctctgaagaattggagggtgaaggctctgtcttgaaaagggggccgtacggcacagaagatgactttgctgtccctccttctaccaagctggcccggatagaagaaccaaagagagtgctgctctacgttcgaaaggagtcagaagaagtctttgatgccctgatgctcaaaaccccatctttgaagggcttgatggaagctatctcagacaaatacgatgttccccatgacaagattgggaaaatattcaagaagtgtaaaaaggggatcctggtgaacatggacgacaacattgtgaagcattactccaatgaggacaccttccagctgcagattgaagaagccggggggtcttacaagctcaccctgacggagatctaaaggcctgcgggccacagctccccaggagttcagtgcaggtgtttctagatcttacggtttggcaactgcaggtaaccccagtcagccatgtcgccagcacaggtctatgtcgagggaatgggttccttgcaggttggaggcggggctgcatctggcttggtggtagcatttaatctattgcattggtgtttttcagatgaaagagaaatccatataccattatgtttgaatttcctgatatatacaggatttaaagtgaaaactttattccaagagttaacagagtctctgggaagctttaggacatctgctacgttatttatcaaaatattgggatctctgccttgtgcctacagtgtcgtgggcctgctcgctagcagaagtcagaaaaggcgataggcttggctttaaggatttcgtgcccttgcctgaattcagtacaactccactgcctcacgttagcgggagcgcacctgaagagtacggggggagccctctctcccttaccctctcactctccaccagatgtttactaaacagggcatgttactgaaatcttcctttgcgactttctcggacatatcaactgcctttctcatgaagaattttaatgggttacagtatgaaatcagttaagataaagctgcattgtatataagtgcaatatatttttgaaggtctgtaaatgtgtacatacatgtcttatataaatatataatatataaatatggtgtctgtgtacatatagtgaagatatgcagtaagagctaccttaaagactttccctagacaaaggttaagttattttttgatcgtgtataccaagcagatagaatactgtgcttagtggaacccgctaaaaacctttttctctgtttttccaaacacaggcattctgtagcatagcaaaaccttctcaaatgacagagattctgtttgctgttgagaatgttgttatttggatttctgcactgtttaacaaatgaagtaaaagaaaaacactactgcaatcacgtcttttgttatgctagtatcagtcagatgcacttagagtgaagaaacactgtaattacagcacacagattgcaagtattgcgtaccaagtgatacaactcgaaatgcagttctcatcttcctgttttgagaaatgattattttatcacgcatcagagccttcgtgctttgattatcttgtatgttaacaattctagaaaacattcatgaattcacaaaaatatgttactatggcaggggaacattttgtacacatttaagtatataaaaatactaaaatatgtaattttataacaaagtcacgggtatctttaggttcagggaactagactaggtcattcgtgtaaatggactggtagttacagtcttaggttaaagtattctaatgaagtatgggaactaaattgctggttttctaagataagatatgggatatgggtcatataacttttgtattttttatgaagttgattttgtcttgcgtgttatttttaattgtatcattgaagatgtattttaaaccaaaggaattaaattttatatgtctatttcgtaatatgtc

SEQ ID NO: 12741 - DNA, 5239 bp, Homo sapiens
  source 1..5239: mol_type = unassigned DNA
tccttgcgagaaagttacctgtggccgcccaagtccgccactttctgctctgtgtctgcccattgccacgatccaggaggactccgcgccgcccggccgcctccgagctcgggccccatgtgaggggcccccccttatcccacctttccggctaggtgagggcgcgagcgggcgagcgagcgagagtggtgaggggggacggaaaagcagaattacctgtagctcttgttctgccatctcgggcgctctcacacaccttcacctgcacagacttgaaagtccagtttcaccagaggctgaggctccaggaaaagcggagcaagttcattggatcaaacatgtcacaagagtcggacaataataaaagactagtggccttagtgcccatgcccagtgaccctccattcaatacccgaagagcctacaccagtgaggatgaagcctggaagtcatacttggagaatcccctgacagcagccaccaaggccatgatgagcattaatggtgatgaggacagtgctgctgccctcggcctgctctatgactactacaaggttcctcgagacaagaggctgctgtctgtaagcaaagcaagtgacagccaagaagaccaggagaaaagaaactgccttggcaccagtgaagcccagagtaatttgagtggaggagaaaaccgagtgcaagtcctaaagactgttccagtgaacctttccctaaatcaagatcacctggagaattccaagcgggaacagtacagcatcagcttccccgagagctctgccatcatcccggtgtcgggaatcacggtggtgaaagctgaagatttcacaccagttttcatggccccacctgtgcactatccccggggagatggggaagagcaacgagtggttatctttgaacagactcagtatgacgtgccctcgctggccacccacagcgcctatctcaaagacgaccagcgcagcactccggacagcacatacagcgagagcttcaaggacgcagccacagagaaatttcggagtgcttcagttggggctgaggagtacatgtatgatcagacatcaagtggcacatttcagtacaccctggaagccaccaaatctctccgtcagaagcagggggagggccccatgacctacctcaacaaaggacagttctatgccataacactcagcgagaccggagacaacaaatgcttccgacaccccatcagcaaagtcaggagtgtggtgatggtggtcttcagtgaagacaaaaacagagatgaacagctcaaatactggaaatactggcactctcggcagcatacggcgaagcagagggtccttgacattgccgattacaaggagagctttaatacgattggaaacattgaagagattgcatataatgctgtttcctttacctgggacgtgaatgaagaggcgaagattttcatcaccgtgaattgcttgagcacagatttctcctcccaaaaaggggtgaaaggacttcctttgatgattcagattgacacatacagttataacaatcgtagcaataaacccattcatagagcttattgccagatcaaggtcttctgtgacaaaggagcagaaagaaaaatccgagatgaagagcggaagcagaacaggaagaaagggaaaggccaggcctcccaaactcaatgcaacagctcctctgatgggaagttggctgccatacctttacagaagaagagtgacatcacctacttcaaaaccatgcctgatctccactcacagccagttctcttcatacctgatgttcactttgcaaacctgcagaggaccggacaggtgtattacaacacggatgatgaacgagaaggtggcagtgtccttgttaaacggatgttccggcccatggaagaggagtttggtccagtgccttcaaagcagatgaaagaagaagggacaaagcgagtgctcttgtacgtgaggaaggagactgacgatgtgttcgatgcattgatgttgaagtctcccacagtgaagggcctgatggaagcgatatctgagaaatatgggctgcccgtggagaagatagcaaagctttacaagaaaagcaaaaaaggcatcttggtgaacatggatgacaacatcatcgagcactactcgaacgaggacaccttcatcctcaacatggagagcatggtggagggcttcaaggtcacgctcatggaaatctagccctgggtttggcatccgctttggctggagctctcagtgcgttcctccctgagagagacagaagccccagccccagaacctggagacccatctcccccatctcacaactgctgttacaagaccgtgctggggagtggggcaagggacaggccccactgtcggtgtgcttggcccatccactggcacctaccacggagctgaagcctgagcccctcaggaaggtgccttaggcctgttggattcctatttattgcccaccttttcctggagcccaggtccaggcccgccaggactctgcaggtcactgctagctccagatgagaccgtccagcgttcccccttcaagagaaacactcatcccgaacagcctaaaaaattcccatcccttctctctcacccctccatatctatctcccgagtggctggacaaaatgagctacgtctgggtgcagtagttataggtggggcaagaggtggatgcccactttctggtcagacacctttaggttgctctggggaaggctgtcttgctaaatacctccagggttcccagcaagtggccaccaggccttgtacaggaagacattcagtcaccgtgtaattagtaacacagaaagtctgcctgtctgcattgtacatagtgtttataatattgtaataatatattttacctgtggtatgtgggcatgtttactgccactggcctagaggagacacagacctggagaccgttttaatgggggtttttgcctctgtgcctgttcaagagacttgcagggctaggtagagggcctttgggatgttaaggtgactgcagctgatgccaagatggactctgcaatgggcatacctgggggctcgttccctgtccccagaggaagccccctctccttctccatgggcatgactctccttcgaggccaccacgtttatctcacaatgatgtgttttgcttgactttccctttgcgctgtctcgtgggaaaggtcattctgtctgagaccccagctccttctccagctttggctgcgggcatggcctgagctttctggagagcctctgcagggggtttgccatcagggccctgtggctgggtctgctgcagagctccttggctatcaggagaatcctggacactgtactgtgcctcccagtttacaaacacgcccttcatctcaagtggccctttaaaaggcctgctgccatgtgagagctgtgaacagctcagctctgagtcggcaggctggggcttcctcctgggccaccagatggaaagggggtattgtttgcctcactcctggatgctgcgttttaaggaagtgagtgagaaagaatgtgccaagatacctggctcctgtgaaaccagcctcaggagggaaactgggagagagaagctgtggtctcctgctacatgccctgggagctggaagagaaaaacactcccctaaacaatcgcaaaatgatgaaccatcatgggccactgttctctttgaggggacaggtttaggggtttgcgttcgcccttgtgggctgaagcactagctttttggtagctagacacatcctgcacccaaaggttctctacaaaggcccagatttgtttgtaaagcactttgactcttacctggaggcccgctctctaagggcttcctgcgctcccacctcatctgtccctgagatgcagagcaggatggagggtctgcttctagctcagctgtttctccttgaggttgcggaggaattgaattgaatgggacagagggcaggtgctgtggccaagaagatctccgagcagcagtgacggggcaccttgctgtgtgtcctctgggcatgttaacccttctgtggggccaaaggtttgcatcgtggatccagctgtgctccagtctgtcccctcctcctccactctgactgccacgccccggaccagcagcttggggaccctccagggtactaatggggctctgttctgagatggacaaattcagtgttggaaatacatgttgtactatgcacttcccatgctcctagggttaggaatagtttcaaacatgattggcagacataacaacggcaaatactcggactggggcataggactccagagtaggaaaaagacaaaagatttggcagcctgacacaggcaacctacccctctctctccagcctctttatgaaactgtttgtttgccagtcctgccctaaggcagaagatgaattgaagatgctgtgcatgtttcctaagtccttgagcaatcatggtggtgacaattgccacaagggatatgaggccagtgccaccagagggtggtgccaagtgccacatcccttccgatccattcccctctgcatcctcggagcaccccagtttgcctttgatgtgtccgctgtgtatgttagctgaactttgatgagcaaaatttcctgagcgaaacactccaaagagataggaaaacttgccgcctcttcttttttgtcccttaatcaaactcaaataagcttaaaaaaaatccatggaagatcatggacatgtgaaatgagcatttttttcttttttttttttaacaaagtctgaactgaacagaacaagactttttcctcatacatctccaaattgtttaaacttactttatgagtgtttgtttagaagttcggaccaacagaaaaatgcagtcagatgtcatcttggaattggtttctaaaagagtaaggcatgtccctgcccagaaacttaggaagcatgaaataaatcaaatgtttattttccttcttatttaaaatcatgcaaatgcaacagaaatagagggtttgtgccaaatgctatgaacggccctttcttaaagacaagcaagggagattgatatatgtacaatttgctctcatgttttaaaaaaaaaaaggtaaatgtaacttaatagttttgtaaatgggagagggggaatctataaactataaatacagttattttattttttgtacatttttaaggagaaaaaataaatattcataacataagagtaaaa

SEQ ID NO: 12742 - DNA, 2140 bp, Homo sapiens
  source 1..2140: mol_type = unassigned DNA
attggatcaaacatgtcacaagagtcggacaagtaagtggatcacacgcgccggctgctgctactactaccactttgggctgatggcaactgtaataaaagactagtggccttagtgcccatgcccagtgaccctccattcaatacccgaagagcctacaccagtgaggatgaagcctggaagtcatacttggagaatcccctgacagcagccaccaaggccatgatgagcattaatggtgatgaggacagtgctgctgccctcggcctgctctatgactactacaaggttcctcgagacaagaggctgctgtctgtaagcaaagcaagtgacagccaagaagaccaggagaaaagaaactgccttggcaccagtgaagcccagagtaatttgagtggaggagaaaaccgagtgcaagtcctaaagactgttccagtgaacctttccctaaatcaagatcacctggagaattccaagcgggaacagtacagcatcagcttccccgagagctctgccatcatcccggtgtcgggaatcacggtggtgaaagctgaagatttcacaccagttttcatggccccacctgtgcactatccccggggagatggggaagagcaacgagtggttatctttgaacagactcagtatgacgtgccctcgctggccacccacagcgcctatctcaaagacgaccagcgcagcactccggacagcacatacagcgagagcttcaaggacgcagccacagagaaatttcggagtgcttcagttggggctgaggagtacatgtatgatcagacatcaagtggcacatttcagtacaccctggaagccaccaaatctctccgtcagaagcagggggagggccccatgacctacctcaacaaaggacagttctatgccataacactcagcgagaccggagacaacaaatgcttccgacaccccatcagcaaagtcaggagtgtggtgatggtggtcttcagtgaagacaaaaacagagatgaacagctcaaatactggaaatactggcactctcggcagcatacggcgaagcagagggtccttgacattgccgattacaaggagagctttaatacgattggaaacattgaagagattgcatataatgctgtttcctttacctgggacgtgaatgaagaggcgaagattttcatcaccgtgaattgcttgagcacagatttctcctcccaaaaaggggtgaaaggacttcctttgatgattcagattgacacatacagttataacaatcgtagcaataaacccattcatagagcttattgccagatcaaggtcttctgtgacaaaggagcagaaagaaaaatccgagatgaagagcggaagcagaacaggaagaaagggaaaggccaggcctcccaaactcaatgcaacagctcctctgatgggaagttggctgccatacctttacagaagaagagtgacatcacctacttcaaaaccatgcctgatctccactcacagccagttctcttcatacctgatgttcactttgcaaacctgcagaggaccggacaggtgtattacaacacggatgatgaacgagaaggtggcagtgtccttgttaaacggatgttccggcccatggaagaggagtttggtccagtgccttcaaagcagatgaaagaagaagggacaaagcgagtgctcttgtacgtgaggaaggagactgacgatgtgttcgatgcattgatgttgaagtctcccacagtgaagggcctgatggaagcgatatctgagaaatatgggctgcccgtggagaagatagcaaagctttacaagaaaagcaaaaaaggcatcttggtgaacatggatgacaacatcatcgagcactactcgaacgaggacaccttcatcctcaacatggagagcatggtggagggcttcaaggtcacgctcatggaaatctagccctgggtttggcatccgctttggctggagctctcagtgcgttcctccctgagagagacagaagccccagccccagaacctggagacccatctcccccatctcacaactgctgttacaagaccgtgctggggagtggggcaagggacaggccccactgtcggtgtgcttggcccatccactggcacctac

SEQ ID NO: 12743 - DNA, 4901 bp, Homo sapiens
  source 1..4901: mol_type = unassigned DNA
atggggaaagatggaaggagtaataaaagactagtggccttagtgcccatgcccagtgaccctccattcaatacccgaagagcctacaccagtgaggatgaagcctggaagtcatacttggagaatcccctgacagcagccaccaaggccatgatgagcattaatggtgatgaggacagtgctgctgccctcggcctgctctatgactactacaaggttcctcgagacaagaggctgctgtctgtaagcaaagcaagtgacagccaagaagaccaggagaaaagaaactgccttggcaccagtgaagcccagagtaatttgagtggaggagaaaaccgagtgcaagtcctaaagactgttccagtgaacctttccctaaatcaagatcacctggagaattccaagcgggaacagtacagcatcagcttccccgagagctctgccatcatcccggtgtcgggaatcacggtggtgaaagctgaagatttcacaccagttttcatggccccacctgtgcactatccccggggagatggggaagagcaacgagtggttatctttgaacagactcagtatgacgtgccctcgctggccacccacagcgcctatctcaaagacgaccagcgcagcactccggacagcacatacagcgagagcttcaaggacgcagccacagagaaatttcggagtgcttcagttggggctgaggagtacatgtatgatcagacatcaagtggcacatttcagtacaccctggaagccaccaaatctctccgtcagaagcagggggagggccccatgacctacctcaacaaaggacagttctatgccataacactcagcgagaccggagacaacaaatgcttccgacaccccatcagcaaagtcaggagtgtggtgatggtggtcttcagtgaagacaaaaacagagatgaacagctcaaatactggaaatactggcactctcggcagcatacggcgaagcagagggtccttgacattgccgattacaaggagagctttaatacgattggaaacattgaagagattgcatataatgctgtttcctttacctgggacgtgaatgaagaggcgaagattttcatcaccgtgaattgcttgagcacagatttctcctcccaaaaaggggtgaaaggacttcctttgatgattcagattgacacatacagttataacaatcgtagcaataaacccattcatagagcttattgccagatcaaggtcttctgtgacaaaggagcagaaagaaaaatccgagatgaagagcggaagcagaacaggaagaaagggaaaggccaggcctcccaaactcaatgcaacagctcctctgatgggaagttggctgccatacctttacagaagaagagtgacatcacctacttcaaaaccatgcctgatctccactcacagccagttctcttcatacctgatgttcactttgcaaacctgcagaggaccggacaggtgtattacaacacggatgatgaacgagaaggtggcagtgtccttgttaaacggatgttccggcccatggaagaggagtttggtccagtgccttcaaagcagatgaaagaagaagggacaaagcgagtgctcttgtacgtgaggaaggagactgacgatgtgttcgatgcattgatgttgaagtctcccacagtgaagggcctgatggaagcgatatctgagaaatatgggctgcccgtggagaagatagcaaagctttacaagaaaagcaaaaaaggcatcttggtgaacatggatgacaacatcatcgagcactactcgaacgaggacaccttcatcctcaacatggagagcatggtggagggcttcaaggtcacgctcatggaaatctagccctgggtttggcatccgctttggctggagctctcagtgcgttcctccctgagagagacagaagccccagccccagaacctggagacccatctcccccatctcacaactgctgttacaagaccgtgctggggagtggggcaagggacaggccccactgtcggtgtgcttggcccatccactggcacctaccacggagctgaagcctgagcccctcaggaaggtgccttaggcctgttggattcctatttattgcccaccttttcctggagcccaggtccaggcccgccaggactctgcaggtcactgctagctccagatgagaccgtccagcgttcccccttcaagagaaacactcatcccgaacagcctaaaaaattcccatcccttctctctcacccctccatatctatctcccgagtggctggacaaaatgagctacgtctgggtgcagtagttataggtggggcaagaggtggatgcccactttctggtcagacacctttaggttgctctggggaaggctgtcttgctaaatacctccagggttcccagcaagtggccaccaggccttgtacaggaagacattcagtcaccgtgtaattagtaacacagaaagtctgcctgtctgcattgtacatagtgtttataatattgtaataatatattttacctgtggtatgtgggcatgtttactgccactggcctagaggagacacagacctggagaccgttttaatgggggtttttgcctctgtgcctgttcaagagacttgcagggctaggtagagggcctttgggatgttaaggtgactgcagctgatgccaagatggactctgcaatgggcatacctgggggctcgttccctgtccccagaggaagccccctctccttctccatgggcatgactctccttcgaggccaccacgtttatctcacaatgatgtgttttgcttgactttccctttgcgctgtctcgtgggaaaggtcattctgtctgagaccccagctccttctccagctttggctgcgggcatggcctgagctttctggagagcctctgcagggggtttgccatcagggccctgtggctgggtctgctgcagagctccttggctatcaggagaatcctggacactgtactgtgcctcccagtttacaaacacgcccttcatctcaagtggccctttaaaaggcctgctgccatgtgagagctgtgaacagctcagctctgagtcggcaggctggggcttcctcctgggccaccagatggaaagggggtattgtttgcctcactcctggatgctgcgttttaaggaagtgagtgagaaagaatgtgccaagatacctggctcctgtgaaaccagcctcaggagggaaactgggagagagaagctgtggtctcctgctacatgccctgggagctggaagagaaaaacactcccctaaacaatcgcaaaatgatgaaccatcatgggccactgttctctttgaggggacaggtttaggggtttgcgttcgcccttgtgggctgaagcactagctttttggtagctagacacatcctgcacccaaaggttctctacaaaggcccagatttgtttgtaaagcactttgactcttacctggaggcccgctctctaagggcttcctgcgctcccacctcatctgtccctgagatgcagagcaggatggagggtctgcttctagctcagctgtttctccttgaggttgcggaggaattgaattgaatgggacagagggcaggtgctgtggccaagaagatctccgagcagcagtgacggggcaccttgctgtgtgtcctctgggcatgttaacccttctgtggggccaaaggtttgcatcgtggatccagctgtgctccagtctgtcccctcctcctccactctgactgccacgccccggaccagcagcttggggaccctccagggtactaatggggctctgttctgagatggacaaattcagtgttggaaatacatgttgtactatgcacttcccatgctcctagggttaggaatagtttcaaacatgattggcagacataacaacggcaaatactcggactggggcataggactccagagtaggaaaaagacaaaagatttggcagcctgacacaggcaacctacccctctctctccagcctctttatgaaactgtttgtttgccagtcctgccctaaggcagaagatgaattgaagatgctgtgcatgtttcctaagtccttgagcaatcatggtggtgacaattgccacaagggatatgaggccagtgccaccagagggtggtgccaagtgccacatcccttccgatccattcccctctgcatcctcggagcaccccagtttgcctttgatgtgtccgctgtgtatgttagctgaactttgatgagcaaaatttcctgagcgaaacactccaaagagataggaaaacttgccgcctcttcttttttgtcccttaatcaaactcaaataagcttaaaaaaaatccatggaagatcatggacatgtgaaatgagcatttttttcttttttttttttaacaaagtctgaactgaacagaacaagactttttcctcatacatctccaaattgtttaaacttactttatgagtgtttgtttagaagttcggaccaacagaaaaatgcagtcagatgtcatcttggaattggtttctaaaagagtaaggcatgtccctgcccagaaacttaggaagcatgaaataaatcaaatgtttattttccttcttatttaaaatcatgcaaatgcaacagaaatagagggtttgtgccaaatgctatgaacggccctttcttaaagacaagcaagggagattgatatatgtacaatttgctctcatgttttaaaaaaaaaaaggtaaatgtaacttaatagttttgtaaatgggagagggggaatctataaactataaatacagttattttattttttgtacatttttaaggagaaaaaataaatattcataacataagagtaaaa

SEQ ID NO: 12744 - DNA, 236 bp, Homo sapiens
  source 1..236: mol_type = unassigned DNA
gagaaagttacctgtggccgcccaagtccgccactttctgctctgtgtctgcccattgccacgatccaggaggactccgcgccgcccggccgcctccgagctcgggccccatgtgaggggcccccccttatcccacctttccggctagacttgaaagtccagtttcaccagaggctgaggctccaggaaaagcggagcaagttcattggatcaaacatgtcacaagagtcggacaa

SEQ ID NO: 12745 - DNA, 4316 bp, Homo sapiens
  source 1..4316: mol_type = unassigned DNA
cgtcatgttagggtgaagcagaggacctcagtgctgaacatgctaaggaggttggacaaaatcaggttcagaggtcacaagagagatgacttcctcgatctagcggagtctccaaatgcctcggacaccgaatgcagcgacgaaatccccctgaaggtaccgcggacctcgccccgggacagcgaggagctgagggaccctgctggtccagggaccctcatcatggccacaggagtccaggactttaaccggacagagtttgatcgactgaatgagatcaaaggtcacctggaaattgccttattggaaaaacatttcttacaggaggagctccggaagctgcgagaagaaaccaacgcggagatgctgcggcaggagctggaccgcgagcggcagcggcggatggagctggagcagaaggtgcaggaggtgctgaaggccagaaccgaggagcagatggctcagcagcccccaaaagggcaggcccaggccagcaatggagcagagcgccggagccaggggctgtcctcgcgcctgcagaagtggttctacgagcggtttggggagtacgtggaggacttccggttccagcccgaggagaacactgtggagacagaggaacccctgagcgcccgcaggttaactgaaaatatgagacggctcaagcgcggtgccaagccggtcactaactttgtgaagaacctctctgccttatccgactggtactccgtctacacgtctgccattgccttcaccgtgtacatgaatgccgtgtggcatggctgggccatcccattgttcttatttctagcaattctgaggttatccctcaattacctcatcgccagggggtggcggatacagtggagcatcgtgcccgaagtgtctgagcccgtggaacctccaaaggaagacctgactgtgtctgagaagttccagctggtgctggacgtcgcccagaaagcccagaaccttttcgggaagatggctgacatcctggagaagatcaagaacttgttcatgtgggtccagccggagatcacacagaagctgtatgtggcgctctgggctgccttcctggcctcctgcttcttcccctaccgcctggtggggcttgccgtgggactctatgctggtatcaagttcttcctcattgatttcatctttaaacgctgcccgaggctgcgcgccaagtacgacacgccctatatcatctggaggagtctccccaccgacccgcagctcaaggagcgctccagcgccgcagtctcacgcaggctgcagacgacctcgtcacggagctacgtacccagcgcaccggccggcctgggtaaagaggaggacgccggtcgcttccacagcaccaagaagggcaatttccacgagatcttcaatctgacagaaaacgagcgtccgctggcggtgtgcgagaatggctggcgctgctgcctcatcaacagggaccggaagatgcccacggactacatcaggaacggggtgctctacgtcacggagaattacttgtgcttcgaaagctccaaatctgggtcctcaaagaggaacaaagtcatcaagctagtggacatcacggacatccagaagtacaaggtcctgtctgtcctcccaggctcaggcatggggattgccgtgtcgacgccatccacccagaaaccgctcgtgtttggtgccatggtgcacagggatgaggccttcgagaccattctcagccagtacatcaagatcacctcagcggcagcgtctggcggggacagctagtattgacttgcccaggacgttgctggaattttctttttctttttctttttctttttttttttttacgatttggtagtggaaacaattggacatcctcatgagcttttgcaataattctcctggacctgtggttctattgtgttgacctctgcgttttatcgaccaagaaggggccagggctcacagggacgggggtgcccctctcccacagggcacgtcaggtgcctctgagggccacccgcagactgggggagggggcagaggccctcgggggcccgtggagaagacacacaggacccctggccctgcccttctccgttccagcctggacagagaaacctctccagccaccccaagaggttctcgcaaccttgtgtcccgctctccagaggccagaagctcgtccaccaccaaagccatagctgaagagtgcggggcccttcctcctggggacagaaagatgtcgtcaaggagggacatgggggcctttcaccaaccaccgagaaacgggcctggcggccctccttcctcttacatgagaccctcctgtggcatttgcccttggtgccgggctggggccgggcgcagtgaccctgcctgcgctccacactcgctccacgggaacagagagggtgagaagggcccacccctcgcctgccctcagtgtctttggtggcaccttccttgctggcctccagggcgctcagcaccgcgtctgtaagggcctgcctgctgctctcggcctgacacgccggccaggaggtctgtagctggggaccagtaagggcacaggatggtgcaggtaaaagcacatctttctcacactttgctctttggaaggcccaggagaacatccgcgaaggctgttggaggtgctccgagcactgtggcatgtctggcacatggcccccaggctgcggttgcctgggttggttgggggaggaagtggggaggagtgttccgggaccatggtggcccaggctgcagccgcctttgggccatccgagaggctctggcagcccctgtgctttagggagcaaccgtgagccgagcccagaggcctgggcctgcactgcctgcagccgacatgcgacagcgttccctcccccgcgtgcctagccggtgccggtccgggcacagacccccccagcccccgccctgccccagggaagcctgggcttcccgggaacaaggtggcatttgtggagggagcgcccgcaggcctggtctgctggggccgcctgcgctgggctgaagggagggaaaggcggcttgggcctcctggaaggaggtggccaccccgcgggcctgcgtgtctgctggggcggatcccgcagctccctcagcttgtcctgagtcccttgggtgtcgttgagattgttgttttttgaagaaacagaagattctattttttacagcgagcaagctggttttcttatttttgtatcctttttcagatgtaatttttatctttgctccgatcctcatttgctggtgtgggtgagggatccggcggcatgggctggtttcacccccttcacgaggggccgcagagtcacacgctggtgccgggggtgctttggggggagctgcgccgatcaccagattaagcacatgtcctatcccaggcggtggagcggagcccccgtggctctggactgcgcggacgttggcgtcaggatgaccacacggcggcctttcccgaatggggacagaacccgctctgagccgtgggtctggctcctgtaggggactggctctcttggtgcaccaggggagggggacatatcccagtgaaccccaccttggcgcctgaggcaacacagggtgggcactgacccacccccaggggcggctgcagaggcagtgcccgcagacaatggccacacctctctccccagggcccggcagtgcccaaggatgggtccggggcctcggggccaatgagcgcctcttcctaggtgctgggattcagtccccaaacacagcgggaggggtccctggggcagatggggctttaccagcgtcgggtggtttagttcgagtcccttttgtggagaaagggagatgaaaactgaccacgtgccaggtgtggccgaagcccccagggagggccacattcggggagcggggggtcgggggagggccaccgactggctctgctgccagcacaggcccctccctggaagtcctcgggagcggagcgcggatcggcacgggctctgggctccccgtggagagaagctgtagtttttaccaaattgtgtacatctgggcagatgtttaatttctgtgactaatcactgaactagacgaatgttaaattttttatgtctgaagcctgagtctattttggatctgtaaataatcattgccagtgtgacttttgttcaacaaaaggattgtactgtattaagaaccgatgaaaaaaattctcctgtaacatttttttaagaaaactttgtttgtttaaagaaaaagtattgtataaattataatttttatttaaataaacctaaaatgctttgtgctaaggctca

SEQ ID NO: 12746 - DNA, 4484 bp, Homo sapiens
  source 1..4484: mol_type = unassigned DNA
ctccaggctccagggcagcagacaccaccctctccgtgcctgctggtgttgggcggcttggaggctatggttcctgggtcctcgtagcacatcctggttctgggccaggacctgaaggagccacagtgaaagagtgtttctggatgtatctgagacagacggagggaacccgagcgtcatgttagggtgaagcagaggacctcagtgctgaacatgctaaggaggttggacaaaatcaggttcagaggtcacaagagagatgacttcctcgatctagcggagtctccaaatgcctcggacaccgaatgcagcgacgaaatccccctgaaggtaccgcggacctcgccccgggacagcgaggagctgagggaccctgctggtccagggaccctcatcatggccacaggagtccaggactttaaccggacagagtttgatcgactgaatgagatcaaaggtcacctggaaattgccttattggaaaaacatttcttacaggaggagctccggaagctgcgagaagaaaccaacgcggagatgctgcggcaggagctggaccgcgagcggcagcggcggatggagctggagcagaaggtgcaggaggtgctgaaggccagaaccgaggagcagatggctcagcagcccccaaaagggcaggcccaggccagcaatggagcagagcgccggagccaggggctgtcctcgcgcctgcagaagtggttctacgagcggtttggggagtacgtggaggacttccggttccagcccgaggagaacactgtggagacagaggaacccctgagcgcccgcaggttaactgaaaatatgagacggctcaagcgcggtgccaagccggtcactaactttgtgaagaacctctctgccttatccgactggtactccgtctacacgtctgccattgccttcaccgtgtacatgaatgccgtgtggcatggctgggccatcccattgttcttatttctagcaattctgaggttatccctcaattacctcatcgccagggggtggcggatacagtggagcatcgtgcccgaagtgtctgagcccgtggaacctccaaaggaagacctgactgtgtctgagaagttccagctggtgctggacgtcgcccagaaagcccagaaccttttcgggaagatggctgacatcctggagaagatcaagaacttgttcatgtgggtccagccggagatcacacagaagctgtatgtggcgctctgggctgccttcctggcctcctgcttcttcccctaccgcctggtggggcttgccgtgggactctatgctggtatcaagttcttcctcattgatttcatctttaaacgctgcccgaggctgcgcgccaagtacgacacgccctatatcatctggaggagtctccccaccgacccgcagctcaaggagcgctccagcgccgcagtctcacgcaggctgcagacgacctcgtcacggagctacgtacccagcgcaccggccggcctgggtaaagaggaggacgccggtcgcttccacagcaccaagaagggcaatttccacgagatcttcaatctgacagaaaacgagcgtccgctggcggtgtgcgagaatggctggcgctgctgcctcatcaacagggaccggaagatgcccacggactacatcaggaacggggtgctctacgtcacggagaattacttgtgcttcgaaagctccaaatctgggtcctcaaagaggaacaaagtcatcaagctagtggacatcacggacatccagaagtacaaggtcctgtctgtcctcccaggctcaggcatggggattgccgtgtcgacgccatccacccagaaaccgctcgtgtttggtgccatggtgcacagggatgaggccttcgagaccattctcagccagtacatcaagatcacctcagcggcagcgtctggcggggacagctagtattgacttgcccaggacgttgctggaattttctttttctttttctttttctttttttttttttacgatttggtagtggaaacaattggacatcctcatgagcttttgcaataattctcctggacctgtggttctattgtgttgacctctgcgttttatcgaccaagaaggggccagggctcacagggacgggggtgcccctctcccacagggcacgtcaggtgcctctgagggccacccgcagactgggggagggggcagaggccctcgggggcccgtggagaagacacacaggacccctggccctgcccttctccgttccagcctggacagagaaacctctccagccaccccaagaggttctcgcaaccttgtgtcccgctctccagaggccagaagctcgtccaccaccaaagccatagctgaagagtgcggggcccttcctcctggggacagaaagatgtcgtcaaggagggacatgggggcctttcaccaaccaccgagaaacgggcctggcggccctccttcctcttacatgagaccctcctgtggcatttgcccttggtgccgggctggggccgggcgcagtgaccctgcctgcgctccacactcgctccacgggaacagagagggtgagaagggcccacccctcgcctgccctcagtgtctttggtggcaccttccttgctggcctccagggcgctcagcaccgcgtctgtaagggcctgcctgctgctctcggcctgacacgccggccaggaggtctgtagctggggaccagtaagggcacaggatggtgcaggtaaaagcacatctttctcacactttgctctttggaaggcccaggagaacatccgcgaaggctgttggaggtgctccgagcactgtggcatgtctggcacatggcccccaggctgcggttgcctgggttggttgggggaggaagtggggaggagtgttccgggaccatggtggcccaggctgcagccgcctttgggccatccgagaggctctggcagcccctgtgctttagggagcaaccgtgagccgagcccagaggcctgggcctgcactgcctgcagccgacatgcgacagcgttccctcccccgcgtgcctagccggtgccggtccgggcacagacccccccagcccccgccctgccccagggaagcctgggcttcccgggaacaaggtggcatttgtggagggagcgcccgcaggcctggtctgctggggccgcctgcgctgggctgaagggagggaaaggcggcttgggcctcctggaaggaggtggccaccccgcgggcctgcgtgtctgctggggcggatcccgcagctccctcagcttgtcctgagtcccttgggtgtcgttgagattgttgttttttgaagaaacagaagattctattttttacagcgagcaagctggttttcttatttttgtatcctttttcagatgtaatttttatctttgctccgatcctcatttgctggtgtgggtgagggatccggcggcatgggctggtttcacccccttcacgaggggccgcagagtcacacgctggtgccgggggtgctttggggggagctgcgccgatcaccagattaagcacatgtcctatcccaggcggtggagcggagcccccgtggctctggactgcgcggacgttggcgtcaggatgaccacacggcggcctttcccgaatggggacagaacccgctctgagccgtgggtctggctcctgtaggggactggctctcttggtgcaccaggggagggggacatatcccagtgaaccccaccttggcgcctgaggcaacacagggtgggcactgacccacccccaggggcggctgcagaggcagtgcccgcagacaatggccacacctctctccccagggcccggcagtgcccaaggatgggtccggggcctcggggccaatgagcgcctcttcctaggtgctgggattcagtccccaaacacagcgggaggggtccctggggcagatggggctttaccagcgtcgggtggtttagttcgagtcccttttgtggagaaagggagatgaaaactgaccacgtgccaggtgtggccgaagcccccagggagggccacattcggggagcggggggtcgggggagggccaccgactggctctgctgccagcacaggcccctccctggaagtcctcgggagcggagcgcggatcggcacgggctctgggctccccgtggagagaagctgtagtttttaccaaattgtgtacatctgggcagatgtttaatttctgtgactaatcactgaactagacgaatgttaaattttttatgtctgaagcctgagtctattttggatctgtaaataatcattgccagtgtgacttttgttcaacaaaaggattgtactgtattaagaaccgatgaaaaaaattctcctgtaacatttttttaagaaaactttgtttgtttaaagaaaaagtattgtataaattataatttttatttaaataaacctaaaatgctttgtgctaa

SEQ ID NO: 12747 - DNA, 311 bp, Homo sapiens
  source 1..311: mol_type = unassigned DNA
ccgccgcctccgcgctcgtggccgggacccgcggggccgcctcctcccggctccccggcgccgctgggctcccgggcgggcggcaggcgtagcgcggccgggcggccggcgaggggggcgccgcggcgggtggatgagagttggccccgatatccgctcaggggaacccgagcgtcatgttagggtgaagcagaggacctcagtgctgaacatgctaaggaggttggacaaaatcaggttcagaggtcacaagagagatgacttcctcgatctagcggagtctccaaatgcctcggacaccgaatgcagcg

SEQ ID NO: 12748 - DNA, 2305 bp, Homo sapiens
  source 1..2305: mol_type = unassigned DNA
ggcgagaggaagcagggaggagagtgatttgagtagaaaagaaacacagcattccaggctggccccacctctatattgataagtagccaatgggagcgggtagccctgatccctggccaatggaaactgaggtaggcgggtcatcgcgctggggtctgtagtctgagcgctacccggttgctgctgcccaaggaccgcggagtcggacgcaggcagaccatgtggaccctggtgagctgggtggccttaacagcagggctggtggctggaacgcggtgcccagatggtcagttctgccctgtggcctgctgcctggaccccggaggagccagctacagctgctgccgtccccttctggacaaatggcccacaacactgagcaggcatctgggtggcccctgccaggttgatgcccactgctctgccggccactcctgcatctttaccgtctcagggacttccagttgctgccccttcccagaggccgtggcatgcggggatggccatcactgctgcccacggggcttccactgcagtgcagacgggcgatcctgcttccaaagatcaggtaacaactccgtgggtgccatccagtgccctgatagtcagttcgaatgcccggacttctccacgtgctgtgttatggtcgatggctcctgggggtgctgccccatgccccaggcttcctgctgtgaagacagggtgcactgctgtccgcacggtgccttctgcgacctggttcacacccgctgcatcacacccacgggcacccaccccctggcaaagaagctccctgcccagaggactaacagggcagtggccttgtccagctcggtcatgtgtccggacgcacggtcccggtgccctgatggttctacctgctgtgagctgcccagtgggaagtatggctgctgcccaatgcccaacgccacctgctgctccgatcacctgcactgctgcccccaagacactgtgtgtgacctgatccagagtaagtgcctctccaaggagaacgctaccacggacctcctcactaagctgcctgcgcacacagtgggggatgtgaaatgtgacatggaggtgagctgcccagatggctatacctgctgccgtctacagtcgggggcctggggctgctgcccttttacccaggctgtgtgctgtgaggaccacatacactgctgtcccgcggggtttacgtgtgacacgcagaagggtacctgtgaacaggggccccaccaggtgccctggatggagaaggccccagctcacctcagcctgccagacccacaagccttgaagagagatgtcccctgtgataatgtcagcagctgtccctcctccgatacctgctgccaactcacgtctggggagtggggctgctgtccaatcccagaggctgtctgctgctcggaccaccagcactgctgcccccagggctacacgtgtgtagctgaggggcagtgtcagcgaggaagcgagatcgtggctggactggagaagatgcctgcccgccgggcttccttatcccaccccagagacatcggctgtgaccagcacaccagctgcccggtggggcagacctgctgcccgagcctgggtgggagctgggcctgctgccagttgccccatgctgtgtgctgcgaggatcgccagcactgctgcccggctggctacacctgcaacgtgaaggctcgatcctgcgagaaggaagtggtctctgcccagcctgccaccttcctggcccgtagccctcacgtgggtgtgaaggacgtggagtgtggggaaggacacttctgccatgataaccagacctgctgccgagacaaccgacagggctgggcctgctgtccctaccgccagggcgtctgttgtgctgatcggcgccactgctgtcctgctggcttccgctgcgcagccaggggtaccaagtgtttgcgcagggaggccccgcgctgggacgcccctttgagggacccagccttgagacagctgctgtgagggacagtactgaagactctgcagccctcgggaccccactcggagggtgccctctgctcaggcctccctagcacctccccctaaccaaattctccctggaccccattctgagctccccatcaccatgggaggtggggcctcaatctaaggccttccctgtcagaagggggttgtggcaaaagccacattacaagctgccatcccctccccgtttcagtggaccctgtggccaggtgcttttccctatccacaggggtgtttgtgtgtgtgcgcgtgtgcgtttcaataaagtttgtacactttc

SEQ ID NO: 12749 - DNA, 1661 bp, Homo sapiens
  source 1..1661: mol_type = unassigned DNA
gctgctgcccaaggaccgcggagtcggacgcaggcagaccatgtggaccctggtgagctgggtggccttaacagcagggctggtggctggaacgcggtgcccagatggtcagttctgccctgtggcctgctgcctggaccccggaggagccagctacagctgctgccgtccccttctggacaaatggcccacaacactgagcaggcatctgggtggcccctgccaggttgatgcccactgctctgccggccactcctgcatctttaccgtctcagggacttccagttgctgccccttcccagaggccgtggcatgcggggatggccatcactgctgcccacggggcttccactgcagtgcagacgggcgatcctgcttccaaagatcaggtaacaactccgtgggtgccatccagtgccctgatagtcagttcgaatgcccggacttctccacgtgctgtgttatggtcgatggctcctgggggtgctgccccatgccccaggcttcctgctgtgaagacagggtgcactgctgtccgcacggtgccttctgcgacctggttcacacccgctgcatcacacccacgggcacccaccccctggcaaagaagctccctgcccagaggactaacagggcagtggccttgtccagctcggtcatgtgtccggacgcacggtcccggtgccctgatggttctacctgctgtgagctgcccagtgggaagtatggctgctgcccaatgcccaacgccacctgctgctccgatcacctgcactgctgcccccaagacactgtgtgtgacctgatccagagtaagtgcctctccaaggagaacgctaccacggacctcctcactaagctgcctgcgcacacagtgggggatgtgaaatgtgacatggaggtgagctgcccagatggctatacctgctgccgtctacagtcgggggcctggggctgctgcccttttacccaggctgtgtgctgtgaggaccacatacactgctgtcccgcggggtttacgtgtgacacgcagaagggtacctgtgaacaggggccccaccaggtgccctggatggagaaggccccagctcacctcagcctgccagacccacaagccttgaagagagatgtcccctgtgataatgtcagcagctgtccctcctccgatacctgctgccgagacaaccgacagggctgggcctgctgtccctaccgccagggcgtctgttgtgctgatcggcgccactgctgtcctgctggcttccgctgcgcagccaggggtaccaagtgtttgcgcagggaggccccgcgctgggacgcccctttgagggacccagccttgagacagctgctgtgagggacagtactgaagactctgcagccctcgggaccccactcggagggtgccctctgctcaggcctccctagcacctccccctaaccaaattctccctggaccccattctgagctccccatcaccatgggaggtggggcctcaatctaaggccttccctgtcagaagggggttgtggcaaaagccacattacaagctgccatcccctccccgtttcagtggaccctgtggccaggtgcttttccctatccacaggggtgtttgtgtgtgtgcgcgtgtgcgtttcaataaagtttgtacactttc

SEQ ID NO: 12750 - DNA, 1866 bp, Homo sapiens
  source 1..1866: mol_type = unassigned DNA
gctgctgcccaaggaccgcggagtcggacgcaggcagaccatgtggaccctggtgagctgggtggccttaacagcagggctggtggctggaacgcggtgcccagatggtcagttctgccctgtggcctgctgcctggaccccggaggagccagctacagctgctgccgtccccttctggacaaatggcccacaacactgagcaggcatctgggtggcccctgccaggttgatgcccactgctctgccggccactcctgcatctttaccgtctcagggacttccagttgctgccccttcccagaggccgtggcatgcggggatggccatcactgctgcccacggggcttccactgcagtgcagacgggcgatcctgcttccaaagatcaggtaacaactccgtgggtgccatccagtgccctgatagtcagttcgaatgcccggacttctccacgtgctgtgttatggtcgatggctcctgggggtgctgccccatgccccaggcttcctgctgtgaagacagggtgcactgctgtgtgtgacctgatccagagtaagtgcctctccaaggagaacgctaccacggacctcctcactaagctgcctgcgcacacagtgggggatgtgaaatgtgacatggaggtgagctgcccagatggctatacctgctgccgtctacagtcgggggcctggggctgctgcccttttacccaggctgtgtgctgtgaggaccacatacactgctgtcccgcggggtttacgtgtgacacgcagaagggtacctgtgaacaggggccccaccaggtgccctggatggagaaggccccagctcacctcagcctgccagacccacaagccttgaagagagatgtcccctgtgataatgtcagcagctgtccctcctccgatacctgctgccaactcacgtctggggagtggggctgctgtccaatcccagaggctgtctgctgctcggaccaccagcactgctgcccccagggctacacgtgtgtagctgaggggcagtgtcagcgaggaagcgagatcgtggctggactggagaagatgcctgcccgccgggcttccttatcccaccccagagacatcggctgtgaccagcacaccagctgcccggtggggcagacctgctgcccgagcctgggtgggagctgggcctgctgccagttgccccatgctgtgtgctgcgaggatcgccagcactgctgcccggctggctacacctgcaacgtgaaggctcgatcctgcgagaaggaagtggtctctgcccagcctgccaccttcctggcccgtagccctcacgtgggtgtgaaggacgtggagtgtggggaaggacacttctgccatgataaccagacctgctgccgagacaaccgacagggctgggcctgctgtccctaccgccagggcgtctgttgtgctgatcggcgccactgctgtcctgctggcttccgctgcgcagccaggggtaccaagtgtttgcgcagggaggccccgcgctgggacgcccctttgagggacccagccttgagacagctgctgtgagggacagtactgaagactctgcagccctcgggaccccactcggagggtgccctctgctcaggcctccctagcacctccccctaaccaaattctccctggaccccattctgagctccccatcaccatgggaggtggggcctcaatctaaggccttccctgtcagaagggggttgtggcaaaagccacattacaagctgccatcccctccccgtttcagtggaccctgtggccaggtgcttttccctatccacaggggtgtttgtgtgtgtgcgcgtgtgcgtttcaataaagtttgtacactttc

SEQ ID NO: 12751 - DNA, 894 bp, Homo sapiens
  source 1..894: mol_type = unassigned DNA
attttcaggttgattgatgtgggacagcagccacaatgaggaactcctatagatttctggcatcctctctctcagttgtcgtttctctcctgctaattcctgaagatgtctgtgaaaaaattattggaggaaatgaagtaactcctcattcaagaccctacatggtcctacttagtcttgacagaaaaaccatctgtgctggggctttgattgcaaaagactgggtgttgactgcagctcactgtaacttgaacaaaaggtcccaggtcattcttggggctcactcaataaccagggaagagccaacaaaacagataatgcttgttaagaaagagtttccctatccatgctatgacccagccacacgcgaaggtgaccttaaacttttacagctgatggaaaaagcaaaaattaacaaatatgtgactatccttcatctacctaaaaagggggacgatgtgaaaccaggaaccatgtgccaagttgcagggtggggcaggactcacaatagtgcatcttggtccgatactctgagagaagtcaatatcaccatcatagacagaaaagtctgcaatgatcgaaatcactataattttaaccctgtgattggaatgaatatggtttgtgctggaagcctccgaggtggaagagactcgtgcaatggagattctggaagccctttgttgtgcgagggtgttttccgaggggtcacttcctttggccttgaaaataaatgcggagaccctcgtgggcctggtgtctatattcttctctcaaagaaacacctcaactggataattatgactatcaagggagcagtttaaataaccgtttcctttcatttactgtggcttcttaatcttttcacaaataaaatcaatttgcatgactgta

SEQ ID NO: 12752 - DNA, 968 bp, Homo sapiens
  source 1..968: mol_type = unassigned DNA
ggaacatgaagtcactgagcctgctccacctctttcctctcccaagagctaaaagagagcaaggaggaaacaacagcagctccaaccagggcagccttcctgagaagatgcaaccaatcctgcttctgctggccttcctcctgctgcccagggcagatgcaggggagatcatcgggggacatgaggccaagccccactcccgcccctacatggcttatcttatgatctgggatcagaagtctctgaagaggtgcggtggcttcctgatacgagacgacttcgtgctgacagctgctcactgttggggaagctccataaatgtcaccttgggggcccacaatatcaaagaacaggagccgacccagcagtttatccctgtgaaaagacccatcccccatccagcctataatcctaagaacttctccaacgacatcatgctactgcagctggagagaaaggccaagcggaccagagctgtgcagcccctcaggctacctagcaacaaggcccaggtgaagccagggcagacatgcagtgtggccggctgggggcagacggcccccctgggaaaacactcacacacactacaagaggtgaagatgacagtgcaggaagatcgaaagtgcgaatctgacttacgccattattacgacagtaccattgagttgtgcgtgggggacccagagattaaaaagacttcctttaagggggactctggaggccctcttgtgtgtaacaaggtggcccagggcattgtctcctatggacgaaacaatggcatgcctccacgagcctgcaccaaagtctcaagctttgtacactggataaagaaaaccatgaaacgctactaactacaggaagcaaactaagcccccgctgtaatgaaacaccttctctggagccaagtccagatttacactgggagaggtgccagcaactgaataaatacctcttagctgagtggaaaa

SEQ ID NO: 12753 - DNA, 559 bp, Homo sapiens
  source 1..559: mol_type = unassigned DNA
atgcaaccaatcctgcttctgctggccttcctcctgctgcccagggcagatcagctggagagaaaggccaagcggaccagagctgtgcagcccctcaggctacctagcaacaaggcccaggtgaagccagggcagacatgcagtgtggccggctgggggcagacggcccccctgggaaaacactcacacacactacaagaggtgaagatgacagtgcaggaagatcgaaagtgcgaatctgacttacgccattattacgacagtaccattgagttgtgcgtgggggacccagagattaaaaagacttcctttaagggggactctggaggccctcttgtgtgtaacaaggtggcccagggcattgtctcctatggacgaaacaatggcatgcctccacgagcctgcaccaaagtctcaagctttgtacactggataaagaaaaccatgaaacgctactaactacaggaagcaaactaagcccccgctgtaatgaaacaccttctctggagccaagtccagatttacactgggagaggtgccagcaactgaataaatacct

SEQ ID NO: 12754 - DNA, 816 bp, Homo sapiens
  source 1..816: mol_type = unassigned DNA
ggaacatgaagtcactgagcctgctccacctctttcctctcccaagagctaaaagagagcaaggaggaaacaacagcagctccaaccagggcagccttcctgagaagatgcaaccaatcctgcttctgctggccttcctcctgctgcccagggcagatgcaggggagatcatcgggggacatgaggccaagccccactcccgcccctacatggcttatcttatgatctgggatcagaagtctctgaagaggtgcggtggcttcctgatacgagacgacttcgtgctgacagctgctcactgttggggaagactggagagaaaggccaagcggaccagagctgtgcagcccctcaggctacctagcaacaaggcccaggtgaagccagggcagacatgcagtgtggccggctgggggcagacggcccccctgggaaaacactcacacacactacaagaggtgaagatgacagtgcaggaagatcgaaagtgcgaatctgacttacgccattattacgacagtaccattgagttgtgcgtgggggacccagagattaaaaagacttcctttaagggggactctggaggccctcttgtgtgtaacaaggtggcccagggcattgtctcctatggacgaaacaatggcatgcctccacgagcctgcaccaaagtctcaagctttgtacactggataaagaaaaccatgaaacgctactaactacaggaagcaaactaagcccccgctgtaatgaaacaccttctctggagccaagtccagatttacactgggagaggtgccagcaactgaataaatacct

SEQ ID NO: 12755 - DNA, 951 bp, Homo sapiens
  source 1..951: mol_type = unassigned DNA
ggaacatgaagtcactgagcctgctccacctctttcctctcccaagagctaaaagagagcaaggaggaaacaacagcagctccaaccagggcagccttcctgagaagatgcaaccaatcctgcttctgctggccttcctcctgctgcccagggcagatgcaggggagatcatcgggggacatgaggccaagccccactcccgcccctacatggcttatcttatgatctgggatcagaagtctctgaagaggtgcggtggcttcctgatacgagacgacttcgtgctgacagctgctcactgttggggaagctccataaatgtcaccttgggggcccacaatatcaaagaacaggagccgacccagcagtttatccctgtgaaaagacccatcccccatccagcctataatcctaagaacttctccaacgacatcatgctactgcagctggagagaaaggccaagcggaccagagctgtgcagcccctcaggctacctagcaacaaggcccaggtgaagccagggcagacatgcagtgtggccggctgggggcagacggcccccctgggaaaacactcacacacactacaagaggtgaagatgacagtgcaggaagatcgaaagtgcgaatctgacttacgccattattacgacagtaccattgagttgtgcgtgggggacccagagattaaaaagacttcctttaagggggactctggaggccctcttgtgtgtaacaaggtggcccagggcattgtctcctatggacgaaacaatggcatgcctccacgagcctgcaccaaagtctcaagctttgtacactggataaagaaaaccatgaaacgctactaactacaggaagcaaactaagcccccgctgtaatgaaacaccttctctggagccaagtccagatttacactgggagaggtgccagcaactgaataaatacct

SEQ ID NO: 12756 - DNA, 923 bp, Homo sapiens
  source 1..923: mol_type = unassigned DNA
gcaaggaggaaacaacagcagctccaaccagggcagccttcctgagaagatgcaaccaatcctgcttctgctggccttcctcctgctgcccagggcagatgcagacttttccttcaggggagatcatcgggggacatgaggccaagccccactcccgcccctacatggcttatcttatgatctgggatcagaagtctctgaagaggtgcggtggcttcctgatacgagacgacttcgtgctgacagctgctcactgttggggaagctccataaatgtcaccttgggggcccacaatatcaaagaacaggagccgacccagcagtttatccctgtgaaaagacccatcccccatccagcctataatcctaagaacttctccaacgacatcatgctactgcagctggagagaaaggccaagcggaccagagctgtgcagcccctcaggctacctagcaacaaggcccaggtgaagccagggcagacatgcagtgtggccggctgggggcagacggcccccctgggaaaacactcacacacactacaagaggtgaagatgacagtgcaggaagatcgaaagtgcgaatctgacttacgccattattacgacagtaccattgagttgtgcgtgggggacccagagattaaaaagacttcctttaagggggactctggaggccctcttgtgtgtaacaaggtggcccagggcattgtctcctatggacgaaacaatggcatgcctccacgagcctgcaccaaagtctcaagctttgtacactggataaagaaaaccatgaaacgctactaactacaggaagcaaactaagcccccgctgtaatgaaacaccttctctggagccaagtccagatttacactgggagaggtgccagcaactgaataaatacctcttagctgagtggaaaa

SEQ ID NO: 12757 - DNA, 687 bp, Homo sapiens
  source 1..687: mol_type = unassigned DNA
cccatccctccttcatctccctccagcatttgtttctggaaggagtcaacaccaacagctctgacctgggcagccttcctgagaaaatgcagccattcctcctcctgttggcctttcttctgacccctggggctgggacagaggagatcatcgggggccatgaggccaagccccactcccgcccctacatggcctttgttcagtttctgcaagagaagagtcggaagaggtgtggcggcatcctagtgagaaaggactttgtgctgacagctgctcactgccagggaagctccataaatgtcaccttgggggcccacaatatcaaggaacaggagcggacccagcagtttatccctgtgaaaagacccatcccccatccagcctataatcctaagaacttctccaacgacatcatgctactgcagggggactccggggggcccctcgtgtgtaaggacgtagcccaaggtattctctcctatggaaacaaaaaagggacacctccaggagtctacatcaaggtctcacacttcctgccctggataaagagaacaatgaagcgcctctaacagcaggcatgagactaaccttcctctgggcctgaccatctctgggacagaggcaagaatccccaaggggtgggcagtcggggttgcaggactgtaataaatggatctctggtgtaaa

SEQ ID NO: 12758 - DNA, 909 bp, Homo sapiens
  source 1..909: mol_type = unassigned DNA
ggagtcaacaccaacagctctgacctgggcagccttcctgagaaaatgcagccattcctcctcctgttggcctttcttctgacccctggggctgggacagaggagatcatcgggggccatgaggccaagccccactcccgcccctacatggcctttgttcagtttctgcaagagaagagtcggaagaggtgtggcggcatcctagtgagaaaggactttgtgctgacagctgctcactgccagggaagctccataaatgtcaccttgggggcccacaatatcaaggaacaggagcggacccagcagtttatccctgtgaaaagacccatcccccatccagcctataatcctaagaacttctccaacgacatcatgctactgcagctggagagaaaggccaagtggaccacagctgtgcggcctctcaggctacctagcagcaaggcccaggtgaagccagggcagctgtgcagtgtggctggctggggttatgtctcaatgagcactttagcaaccacactgcaggaagtgttgctgacagtgcagaaggactgccagtgtgaacgtctcttccatggcaattacagcagagccactgagatttgtgtgggggatccaaagaagacacagaccggtttcaagggggactccggggggcccctcgtgtgtaaggacgtagcccaaggtattctctcctatggaaacaaaaaagggacacctccaggagtctacatcaaggtctcacacttcctgccctggataaagagaacaatgaagcgcctctaacagcaggcatgagactaaccttcctctgggcctgaccatctctgggacagaggcaagaatccccaaggggtgggcagtcggggttgcaggactgtaataaatggatctctggtgtaaatatga

SEQ ID NO: 12759 - DNA, 522 bp, Homo sapiens
  source 1..522: mol_type = unassigned DNA
tttctggaaggagtcaacaccaacagctctgacctgggcagccttcctgagaaaatgcagccattcctcctcctgttggcctttcttctgacccctggggctgggacagaggagatcatcgggggccatgaggccaagccccactcccgcccctacatggcctttgttcagtttctgcaagagaagagtcggaagaggtgtggcggcatcctagtgagaaaggactttgtgctgacagctgctcactgccagggaaggggggactccggggggcccctcgtgtgtaaggacgtagcccaaggtattctctcctatggaaacaaaaaagggacacctccaggagtctacatcaaggtctcacacttcctgccctggataaagagaacaatgaagcgcctctaacagcaggcatgagactaaccttcctctgggcctgaccatctctgggacagaggcaagaatccccaaggggtgggcagtcggggttgcaggactgtaataaatggatctctggtgtaaata

SEQ ID NO: 12760 - DNA, 947 bp, Homo sapiens
  source 1..947: mol_type = unassigned DNA
ggctcggggccggggccagcacccacactgggtctccacagcggcatggaggcctgcgtgtcttcactgctggtgctggccctgggggccctgtcagtaggcagctcctttgggacccagatcatcgggggccgggaggtgatcccccactcgcgcccgtacatggcctcactgcagagaaatggctcccacctgtgcgggggtgtcctggtgcacccaaagtgggtgctgacggctgcccactgcctggcccagcggatggcccagctgaggctggtgctggggctccacaccctggacagccccggtctcaccttccacatcaaggcagccatccagcaccctcgctacaagcccgtccctgccctggagaacgacctcgcgctgcttcagctggacgggaaagtgaagcccagccggaccatccggccgttggccctgcccagtaagcgccaggtggtggcagcagggactcggtgcagcatggccggctgggggctgacccaccagggcgggcgcctgtcccgggtgctgcgggagctggacctccaagtgctggacacccgcatgtgtaacaacagccgcttctggaacggcagcctctcccccagcatggtctgcctggcggccgactccaaggaccaggctccctgcaagggtgactcgggcgggcccctggtgtgtggcaaaggccgggtgttggccagagtcctgtccttcagctccagggtctgcactgacatcttcaagcctcccgtggccaccgctgtggcgccttacgtgtcctggatcaggaaggtcaccggccgatcggcctgatgccctggggtgatggggaccccctcgctgtctccacaggacccttcccctccaggggtgcagtggggtgggtgaggacgggtgggagggacagggagggaccaataaatcataatgaagaaacgctc

SEQ ID NO: 12761 - DNA, 5488 bp, Homo sapiens
  source 1..5488: mol_type = unassigned DNA
cctctgcctggggccccagggatgcgcctcctcctgaaagtcccctccatcctcccttagaggaacaggctgccgccgcgcccccatcagcctccattgccctgaccttatttccacctgatggtgccagaggctgcttcccagctggtatcctgagatcctcgttcccttggtggcttggttgtttaagcctccattattgattgggggcggtggtctgggtgtgattcctgtgggggaaaccagcccgaggtgccttggctcaggcttgcctgcctggagtccttgtcgtgtacccgtctgtggccctagagtcacctcctgctccttttcactgggtttctccccagaccaagcccctggatttgagcttctgagcagccaactgatttttttcatgagggaaagaattttgctcctagatttatttctaatccttttctccgtaactgaccttttctctgtaagctatttgtggctctagtgggtttttgtttgcttgcttgtttttgttttatctttgccctgaacgtccatcctggcctcggctgcctccctccccgagttcttcactacacctcctgtctcagcctcccagagagggtggcgagggtgctgatgcccagagacaccatccggcgaatggacctctcctgtcatgcggggcagggcagggctgccggcagagccatgtcctgaaccctccctcctcccccctgctctccttaagggtctttcccagatgtgaaggtccctcccaggctctactgaggtcagaccaattcccagtggcttgggtaccctcgttcactccagcaccagcccctgccctccttcttcccgggccaggctgccaggtgagccccgggccaagggtggttgccctgctgaggccgaaaggactcgagcttcccatctcctcgcctcccccaggtctttcaccgtctggactcatctctgggtaactcatggtgtgagtggccacgtggctggctcaggtgagtccttttagaccccaggtgacccaccagctagtccggggcccattgttgtgcccactaggatgtcccccatggtgtcctccctgcgctttaaagttctccttcgtgtgctgttcttcatggcccctgttcccccacaggtgtttggacagtgaacgccaggtcccctcctccccacccccggcctctcaaacacgcccagccccacgatggcagcagagacactcaactttgggcctgagtggctcagggccctgtccgggggcggcagcgtggcctccccacccccgtcccctgccatgcccaaatacaagctggctgactaccgttatgggcgagaggaaatgctggctctctacgtcaaggagaacaaggtcccggaagagctgcaggacaaggagttcgccgcggtgctgcaggacgagccactgcagcccctggctctggagccgctgactgaggaggaacagagaaacttctccctgtcagtgaacagcgtggctgtgctgaggctgatggggaaaggggctggcccccccctggctggcacctcccgaggcaggggcagcacgcggagccgaggccgcggccgtggtgacagctgcttttaccaaagaagcatcgaagaaggcgatggggcctttggacgaagcccccgggaaatccagcgcagccagagctgggatgacagaggcgagaggcggtttgagaagtcagcaaggcgggatggagcacgatgtggctttgaggagggaggggctggcccaaggaaggagcacgcccgctcagacagcgagaactggcgctccctacgggaggaacaggaggaggaggaggagggcagctggaggctcggagcagggccccggcgagacggcgaccgctggcgctccgccagccctgatggtggtccccgctctgctggctggcgggaacatggggaacggcggcgcaagtttgaatttgatttgcgaggggatcgaggagggtgtggtgaagaggaggggcggggagggggaggcagctctcacctgcggcggtgccgagcgcctgaaggctttgaggaggacaaggatgggctcccagagtggtgcctggacgatgaggatgaagaaatgggcacctttgatgcctctggggccttcttgcctctcaagaagggccccaaggagcccattcctgaggagcaggagctggacttccaagggttggaggaggaggaggaaccttccgaagggctagaggaggaagggcctgaggcaggtgggaaagagctgaccccactgcctcctcaggaggagaagtccagctccccatccccactgcccaccctgggcccactctgggggacaaacggggatggggacgaaactgcagagaaagagcccccagcggccgaagatgatattcgggggatccagctgagtcccggggtgggctcctctgctggcccacccggagatctggaggatgatgaaggcttgaagcacctgcagcaggaggcggagaagctggtggcctccctgcaggacagctccttggaggaggagcagttcacggctgccatgcagacccagggcctgcgccactctgcagccgccactgccctcccgctcagccatggggctgcccggaagtggttctacaaggacccacagggcgagatccaaggccccttcacgacacaggagatggcagagtggttccaggccggctacttttccatgtcactgctggtgaagcggggctgcgatgagggcttccagccgctgggcgaggtgatcaagatgtggggccgcgtgccctttgccccagggccctcacctcccccactgctgggaaacatggaccaggagcggctgaagaagcaacaggagctggccgcggcggccttgtaccagcagctgcagcaccagcagtttctccagctggtcagcagccgccagctcccacagtgcgcgctccgagaaaaggcagctctgggggacctgacaccgccaccaccgccgccgccacagcagcagcagcagcagctcacggcattcctgcagcagctccaggcgctcaaaccccccagaggcggggaccagaacctgctcccgacgatgagccggtccttgtcggtgccagattcgggccgcctctgggacgtacatacctcagcctcatcacagtcaggtggtgaggccagtctttgggacataccaattaactcttcgactcagggtccaattctagaacaactccagctgcaacataaattccaggagcgcagagaagtggagctcagggcgaagcgggaggaagaggaacgcaagcgtcgagaggagaagcgccgccagcagcagcaggaggagcagaagcggcggcaggaggaggaagagctgtttcggcgcaagcacgtgcggcagcaggagctattgctgaagttgctacagcagcagcaggcggtccctgtgccccccgcacccagctccccgcccccactctgggctggcctggccaagcaggggctgtccatgaagacgctcctggagttgcagctggagggcgagcggcagctgcacaaacagcccccacctcgggagccagctcgggcccaggcccccaaccaccgagtgcagcttgggggcctgggcactgcccccctgaaccagtgggtgtctgaggctgggccactgtggggcgggccagacaagagtgggggcggcagcagcggcctggggctctgggaggacacccccaagagcggcgggagcctggtccgtggcctcggcctgaagaacagccggagcagcccatctctcagtgactcatacagccacctatcgggtcggcccattcgcaaaaagacggaggaagaagagaagctgctgaagctgctgcagggcattcccaggccccaggacggcttcacccagtggtgcgagcagatgctgcacacgctgagcgccacgggcagcctggacgtgcccatggctgtagcgatcctcaaggaggtggaatccccctatgatgtccacgattatatccgttcctgcctgggggacacgctggaagccaaagaatttgccaaacaattcctggagcggagggccaagcagaaagccagccagcagcggcagcagcagcaggaggcatggctgagcagcgcctcgctgcagacggccttccaggccaaccacagcaccaaactcggccccggggagggcagcaaggccaagaggcgggcactgatgctgcactcagaccccagcatcctggggtactccctgcacggatcttctggtgagatcgagagcgtggatgactactgaccagcccggacccccagcccctgggctgtaggccagggcagccacagcggcgtggaccgagggtcccagcctgcaggctccccgcagagagcacaggaagaggcaggggcggggtccccagcacttgttacaaacacacgatgcaccttaactcacccaccacgaggcactttacagactgggggagggggtttttctttttatttttttttttaattttaaacgactgaagaaaacattaggagaggcaaaaatattgttaaaaactagactctaaacaccccttcctgctgtgaggatagtgggtgtgacaatggaaggtccacagaggtttttgttttttggttttttttttttttttaagaaaaaaagatgaaaaatgaaaaaaaaaatggttaggaggctgaaagaaaaaacacactgttattttggggcagtggggacacaggccccgtggacctgtcctgcctggcccccaaggccatacttaccccccagaaggcgggccatggggtaactggaagctgggggccagcagtttgcacaggaggcctgtctgagccccacccgccagacctgttgtgagcagctcctgtcactgaggctggctgaggtgtccggggtggggccaaagtagccccttggcttcgctgctttgggggacagttgcacaaattggacgagtggccccagctctctggctgccatcttgtgctggccgagtagacgggaggggccaagccgtgccaacctctctggctggcagggtggggcagcaggactctggttctggtgaggggcgtctcccactgctgccattttgggggacaccctgggtttgaacctgaaagccccagctctctgccttgccacgtgaatgtattctttgggccacaagcccccgcctcacccctgcctgagctgcctcacccctgtgagcggcgggggtggatgattgctccagaggctgcagagagaaggctgagctgtttctccagtgaagggggcaggaggaggggcctcaaaggcaaggagtgggtggctttgggcttagggttgcagtagaggggctgccgcccggggccccaacctgtagccagctcgtaagatgtggaccacccagctctgcacctgacccttccgctgaccaaatgggagaggagcaggtgg

SEQ ID NO: 12762 - DNA, 4477 bp, Homo sapiens
  source 1..4477: mol_type = unassigned DNA
tcgagcttcccatctcctcgcctcccccaggtctttcaccgtctggacgatgaggatgaagaaatgggcacctttgatgcctctggggccttcttgcctctcaagaagggccccaaggagcccattcctgaggagcaggagctggacttccaagggttggaggaggaggaggaaccttccgaagggctagaggaggaagggcctgaggcaggtgggaaagagctgaccccactgcctcctcaggaggagaagtccagctccccatccccactgcccaccctgggcccactctgggggacaaacggggatggggacgaaactgcagagaaagagcccccagcggccgaagatgatattcgggggatccagctgagtcccggggtgggctcctctgctggcccacccggagatctggaggatgatgaaggcttgaagcacctgcagcaggaggcggagaagctggtggcctccctgcaggacagctccttggaggaggagcagttcacggctgccatgcagacccagggcctgcgccactctgcagccgccactgccctcccgctcagccatggggctgcccggaagtggttctacaaggacccacagggcgagatccaaggccccttcacgacacaggagatggcagagtggttccaggccggctacttttccatgtcactgctggtgaagcggggctgcgatgagggcttccagccgctgggcgaggtgatcaagatgtggggccgcgtgccctttgccccagggccctcacctcccccactgctgggaaacatggaccaggagcggctgaagaagcaacaggagctggccgcggcggccttgtaccagcagctgcagcaccagcagtttctccagctggtcagcagccgccagctcccacagtgcgcgctccgagaaaaggcagctctgggggacctgacaccgccaccaccgccgccgccacagcagcagcagcagcagctcacggcattcctgcagcagctccaggcgctcaaaccccccagaggcggggaccagaacctgctcccgacgatgagccggtccttgtcggtgccagattcgggccgcctctgggacgtacatacctcagcctcatcacagtcaggtggtgaggccagtctttgggacataccaattaactcttcgactcagggtccaattctagaacaactccagctgcaacataaattccaggagcgcagagaagtggagctcagggcgaagcgggaggaagaggaacgcaagcgtcgagaggagaagcgccgccagcagcagcaggaggagcagaagcggcggcaggaggaggaagagctgtttcggcgcaagcacgtgcggcagcaggagctattgctgaagttgctacagcagcagcaggcggtccctgtgccccccgcacccagctccccgcccccactctgggctggcctggccaagcaggggctgtccatgaagacgctcctggagttgcagctggagggcgagcggcagctgcacaaacagcccccacctcgggagccagctcgggcccaggcccccaaccaccgagtgcagcttgggggcctgggcactgcccccctgaaccagtgggtgtctgaggctgggccactgtggggcgggccagacaagagtgggggcggcagcagcggcctggggctctgggaggacacccccaagagcggcgggagcctggtccgtggcctcggcctgaagaacagccggagcagcccatctctcagtgactcatacagccacctatcgggtcggcccattcgcaaaaagacggaggaagaagagaagctgctgaagctgctgcagggcattcccaggccccaggacggcttcacccagtggtgcgagcagatgctgcacacgctgagcgccacgggcagcctggacgtgcccatggctgtagcgatcctcaaggaggtggaatccccctatgatgtccacgattatatccgttcctgcctgggggacacgctggaagccaaagaatttgccaaacaattcctggagcggagggccaagcagaaagccagccagcagcggcagcagcagcaggaggcatggctgagcagcgcctcgctgcagacggccttccaggccaaccacagcaccaaactcggccccggggagggcagcaaggccaagaggcgggcactgatgctgcactcagaccccagcatcctggggtactccctgcacggatcttctggtgagatcgagagcgtggatgactactgaccagcccggacccccagcccctgggctgtaggccagggcagccacagcggcgtggaccgagggtcccagcctgcaggctccccgcagagagcacaggaagaggcaggggcggggtccccagcacttgttacaaacacacgatgcaccttaactcacccaccacgaggcactttacagactgggggagggggtttttctttttatttttttttttaattttaaacgactgaagaaaacattaggagaggcaaaaatattgttaaaaactagactctaaacaccccttcctgctgtgaggatagtgggtgtgacaatggaaggtccacagaggtttttgttttttggttttttttttttttttaagaaaaaaagatgaaaaatgaaaaaaaaaatggttaggaggctgaaagaaaaaacacactgttattttggggcagtggggacacaggccccgtggacctgtcctgcctggcccccaaggccatacttaccccccagaaggcgggccatggggtaactggaagctgggggccagcagtttgcacaggaggcctgtctgagccccacccgccagacctgttgtgagcagctcctgtcactgaggctggctgaggtgtccggggtggggccaaagtagccccttggcttcgctgctttgggggacagttgcacaaattggacgagtggccccagctctctggctgccatcttgtgctggccgagtagacgggaggggccaagccgtgccaacctctctggctggcagggtggggcagcaggactctggttctggtgaggggcgtctcccactgctgccattttgggggacaccctgggtttgaacctgaaagccccagctctctgccttgccacgtgaatgtattctttgggccacaagcccccgcctcacccctgcctgagctgcctcacccctgtgagcggcgggggtggatgattgctccagaggctgcagagagaaggctgagctgtttctccagtgaagggggcaggaggaggggcctcaaaggcaaggagtgggtggctttgggcttagggttgcagtagaggggctgccgcccggggccccaacctgtagccagctcgtaagatgtggaccacccagctctgcacctgacccttccgctgaccaaatgggagaggagcaggtggccttccgggtctgatatgatgcgctttttaccgttgggtaaggttggggtgaagagaagtgtgcggctcctgggtcagaggaggctgccccttctattgctcacccacttcttattcccggtcccctacttgggttcgtctccgcccattttgggttttgtaacagttttgtcttttgggtttctcatccagctcctcccattgacctcattgctcagagtgcagtattagggcaaggcttcgccactgcctccctccatgaatgtatttctccctcctgccctggggacatggggagtggcccgtttctttccccatctagtcccagaaagatggtgtttggttttctgttgttggatttttttttttttttttttttttttgcaccaaagtggcaactaggtcagtgttgggggatcaagctggcctcggggtggggggcccccacctgcctctccctggttcccacagtgttagcgtccctgaaaagacaatattctctctaaagcaataaggggtgacgggccggggggagtgtttgctgctgctggcccccagctccccttccctcttgccaggtgtgggggagactcctgttgtgactgaatgtaacccccccacccctgccgcagccaatgcaggggaagggggacactcttcctgtctcttctccccagctaaagagactttggacttagggggcccatgagcctggagaggccttaaccctgtgaggaagtatagggggagccctctcccacccccatccccttctgagagtggtcaatgtttacaagcccctgagcccccctgcccagggactcagaccctgttgctgtccttccccggccccggtcttcctgggccctcgctgctcccctgcccttcctggggttggggtgggtgcaggggtcaccgtgttccctgtctgccttgtacccacagtctccccgccccctctccaccctgtgtgacttccctctcttttacctgctcctgtaaatactcccttctcccaataaaacttggtgtgtgttctccc

SEQ ID NO: 12763 - DNA, 5847 bp, Homo sapiens
  source 1..5847: mol_type = unassigned DNA
gacgtgcgtggcgacgtgtcggccatcttgtgttgttgaggctgaggactgactggggttctgagactccctgtcccggaccgcagcgttaaaaggatctgaacaaagtctgctcaaatctcctgctgtgaaccagcagaatttttgaacaggtttcttcacatataaaaatctattgtaaaaatacggaaaagaatggcagcggaaacgcagacactgaactttgggcctgaatggctccgagctctgtccagtggtgggagtattacatcccctcctctttctccagcattgccgaagtataaattagcagattatcgttacggcagagaagaaatgttagcacttttccttaaagacaacaagataccttcagaccttctggataaagaatttctgcctatcctccaggaggaaccccttccaccattggctctggtaccctttacagaagaagaacagagaaacttttccatgtctgtaaatagtgctgctgtcctgcgattgacaggacgaggaggaggaggaacagtggtgggggctcctagaggtcgaagttcttcaagagggcgaggcagaggcagaggtgaatgtggtttctaccaaagaagttttgatgaagtagagggtgtttttggtcgaggaggtggcagagaaatgcatagatcgcagagctgggaggaaaggggtgacagacgttttgaaaaaccaggacgaaaagatgtagggagaccaaattttgaggaaggtggaccaacatcagtagggagaaagcatgaatttatacgctcagaaagtgaaaattggcgcatctttagagaggaacaaaatggagaagatgaagatggaggttggcgactagctggatcaaggagggatggagagaggtggcgacctcacagtcctgatggccctcgttctgcaggctggcgggaacacatggaacgacgtcggaggtttgagtttgattttcgagatagagatgatgaacggggttaccgaagggttcgctctggcagtgggagcatagatgatgacagggatagcttgcccgaatggtgcttagaggatgctgaagaagaaatgggtacatttgactcatctggagcattcctttctctaaaaaaagtacagaaagagcctattccagaagagcaggagatggacttccggcctgtggacgaaggggaggagtgctctgactctgagggtagccataatgaagaggccaaagaacccgataagacaaataagaaagaaggagagaaaacagatagagtaggagttgaagctagtgaggaaactccccagacctcatcatcatctgctagaccaggtactccttcagaccatcagtctcaggaagcatcacagtttgagaggaaagatgaaccaaaaactgagcaaacggaaaaagctgaagaggagactcggatggaaaatagtctaccagccaaagtgcccagcagaggggatgaaatggttgctgatgtccagcagcccctgtcgcagattccttcagatacagcctctcctcttctcatacttccacctcctgttcccaatcctagtcctactctccggccagttgaaacaccagttgtaggtgctcctggtatgggcagtgtttccacagaacctgatgatgaagaaggtctcaaacatttggagcagcaagctgagaaaatggtggcttatctccaagacagtgcactagatgatgaaagattggcatcaaaactgcaagagcacagagctaaaggagtgtcgattccattgatgcatgaagcaatgcagaagtggtattacaaagatcctcagggagaaattcaaggtcccttcaataatcaggagatggcagaatggtttcaggcgggctattttactatgtctttattggtgaagagagcgtgtgatgaaagcttccaacctcttggcgatatcatgaaaatgtggggaagggttcccttttctccaggtccagctccccctcctcatatgggagagctggaccaggaacgactgaccaggcagcaagaactcacagccttataccagatgcagcacctgcagtaccagcagtttttaatacaacaacaatatgcacaggttttggcccaacagcagaaagcagcactgtcttcccagcagcagcagcagttggcacttcttcttcaacagtttcagaccttgaagatgagaatatctgatcagaacatcattccctcagtaactaggtctgtgtccgtgccagatactggctctatctgggagcttcagccaacagcttcacagcctacagtttgggaaggtggtagtgtatgggatcttcctctggacaccacgacaccaggccctgccctggaacagcttcagcagctagagaaggccaaagctgcaaagctagagcaagagagaagagaggcagaaatgagggcaaaacgggaagaggaagagcgaaagaggcaggaagaactccgaagacaacaggaggaaattcttcggcgacagcaggaagaagaaaggaaaaggcgagaggaagaagaacttgcccgaaggaaacaggaagaggctctgcgtcgccagcgggagcaagaaattgcattaaggcgacagcgagaagaggaagaaagacagcagcaagaagaagctcttagaagactggaagagaggagaagagaagaggaagaaaggcggaagcaggaagaattgttacgcaaacaggaagaggaggctgcaaaatgggcccgggaagaagaagaagcccagcgtcgattagaggagaaccggctgcggatggaagaggaggcagccagactccggcatgaggaagaagaacggaagagaaaggagctggaggtccagcggcagaaggagttaatgcgccagaggcagcagcagcaagaggctctccggaggttgcagcagcagcagcagcaacaacagctggcgcagatgaagcttccttcttcttcaacgtggggccagcagtccaatacaacagcatgtcagtcccaggccacgctgtcgttggctgaaatccaaaaactagaggaagaacgagaacggcagcttcgagaagagcaaaggcgccagcagagggagttgatgaaagctcttcagcagcagcagcaacagcaacagcagaaactctcaggttgggggaatgtcagcaaaccttcaggtaccacgaaatctcttctggagatccagcaggaagaggccaggcaaatgcaaaagcagcagcagcagcagcagcaacaccagcaaccaaacagagctcgtaacaatacgcattccaacctgcacaccagcattgggaattctgtttggggctctataaatactggtcctcctaaccagtgggcatctgacctagtcagtagtatttggagtaatgctgacactaaaaactccaacatgggattctgggatgatgcagtgaaagaggtgggacctaggaattcaacaaataaaaataaaaacaacgccagtctcagtaaatctgtaggtgtgtctaaccggcagaataagaaagtagaagaagaagaaaagttgctgaagctctttcagggagtaaataaagcccaagatggatttacgcagtggtgtgaacagatgcttcatgcccttaatacggcaaataacttggatgttcccacatttgtttctttcctgaaagaagtagaatctccttatgaggtccatgattatatcagggcctatttaggagatacttctgaggccaaggagtttgccaagcagttccttgagcgccgtgccaaacagaaagccaaccagcagcgtcagcagcagcagctgccacagcagcagcagcagcagccgccacagcagccgccacagcagccacaacagcaggactctgtgtgggggatgaaccacagtacactccattcagtatttcagaccaatcaaagcaacaaccaacaatccaattttgaggctgtgcagagtggcaagaagaagaaaaagcagaagatggtccgagcagatcccagtttattaggattttcagtcaatgcatcatcggagcgactcaacatgggtgaaatcgagacgttggatgactactgagcacctgccagtggactggccatccctctcctgtctgccgactatggagtctccacctttggacacaacacttactcaccatttactctttatcactctgcaacaaatcacagaaccgatcatctcaggctttttcttctggccctttgtgtccaagattctttaatccatttttgttggtgaacatctcagactatagataagtggactggaccctgtgtcttgggggtggcagttgggattactccccaacaaggctgattttaggcagcatgtgttcactgtgctgtgatttcatctactgtctcccagaaagtgtgttgggatcggccattagcagcttgctttctcttgtcactttttttcttctattttgttttttcttcttctttttccccccatcagggcaaatggtctaactggtgcaatcatgaagagagttaatggttaacagacattggccaataacaaaacaccccatggactgtgactcgagtatccaacaggcagtcagagctctcccggtctgaaagttgcattgccactgctaactttgggattgcatcagagaggccctgagtggggttgagatgaggttggtttggtttgatgttacacactcctcacctgttctttctgagtgtcctttctctgaaaggatttatgtttttcttcgttagatagtgacttctgagcaagctgatctcccctggcatgctccaacctgattggacaaaggaagctctatggcctgggagagagactattcttaatttttctttcttacaaaaactgatttttcccataaatatttttacttcagaggactaggaccattttgttttgggcccttctgctgaaaatttgtctcgtttaagaggcagctagaatctttaccatatgtatgaatttgtataatttcatttttggatagggataaacttttgcttctgataaaagcctggaatttcatctggtcctcagagcattgcgtgtgtgtcttgctgtagcccggaaaaggttttgtgtaaagattctgggatggcaagttgtttgccttttctgaaaagagaacatacagaacctgtccatctttaagaccttcatccatggaatctactatacaggaggatgcagtgggctggaggggatgggcgaaaatgggagcaggaagcctggcctggcttctggtcatggcctcctaaaaccttaaacttcaagtagaaatgtactcaagccctatttataaacaaatacttttcctgcctccaccaaacccctacagaacatcacctggaattgccactcacactgggttggagtcattgggcagctgtgcctgtgcgagaggtgctgtggtctgggcagcccctggaaaagcacctttgctgcctgtcattgttgcctgaagaaggctggagttgctctgagagcagtttgggtttggagtattatatttggcttctatttttattattttggatcaccattctccctatcccttcttgcctccctcccttctaaacatgtgtaataactatacagagactgctacaaaattgtatatagtttttggatcaaatagcatgaggggagaggaaaccattaaaagttggggctcctactctcctttgctttgtaaattcaaaagttgggggtgggtaagagggatagttaaaatgtttacaaaactttaggctccctcggaacttttgccagtgtggaggaaaataaaaaagaacttaaataaaa

SEQ ID NO: 12764 - DNA, 7878 bp, Homo sapiens
  source 1..7878: mol_type = unassigned DNA
gtgacgtgcgtggcgacgtgtcggccatcttgtgttgttgaggctgaggactgactggggttctgagactccctgtcccggaccgcagcgttaaaaggatctgaacaaagtctgctcaaatctcctgctgtgaaccagcagaatttttgaacaggtttcttcacatataaaaatctattgtaaaaatacggaaaagaatggcagcggaaacgcagacactgaactttgggcctgaatggctccgagctctgtccagtggtgggagtattacatcccctcctctttctccagcattgccgaagtataaattagcagattatcgttacggcagagaagaaatgttagcacttttccttaaagacaacaagataccttcagaccttctggataaagaatttctgcctatcctccaggaggaaccccttccaccattggctctggtaccctttacagaagaagaacagagaaacttttccatgtctgtaaatagtgctgctgtcctgcgattgacaggacgaggaggaggaggaacagtggtgggggctcctagaggtcgaagttcttcaagagggcgaggcagaggcagaggtgaatgtggtttctaccaaagaagttttgatgaagtagagggtgtttttggtcgaggaggtggcagagaaatgcatagatcgcagagctgggaggaaaggggtgacagacgttttgaaaaaccaggacgaaaagatgtaggaaagaagaatggatattattgcatgtactcaccagttcttttgctgggtcagcctttatgccaagggagaccaaattttgaggaaggtggaccaacatcagtagggagaaagcatgaatttatacgctcagaaagtgaaaattggcgcatctttagagaggaacaaaatggagaagatgaagatggaggttggcgactagctggatcaaggagggatggagagaggtggcgacctcacagtcctgatggccctcgttctgcaggctggcgggaacacatggaacgacgtcggaggtttgagtttgattttcgagatagagatgatgaacggggttaccgaagggttcgctctggcagtgggagcatagatgatgacagggatagcttgcccgaatggtgcttagaggatgctgaagaagaaatgggtacatttgactcatctggagcattcctttctctaaaaaaagtacagaaagagcctattccagaagagcaggagatggacttccggcctgtggacgaaggggaggagtgctctgactctgagggtagccataatgaagaggccaaagaacccgataagacaaataagaaagaaggagagaaaacagatagagtaggagttgaagctagtgaggaaactccccagacctcatcatcatctgctagaccaggtactccttcagaccatcagtctcaggaagcatcacagtttgagaggaaagatgaaccaaaaactgagcaaacggaaaaagctgaagaggagactcggatggaaaatagtctaccagccaaagtgcccagcagaggggatgaaatggttgctgatgtccagcagcccctgtcgcagattccttcagatacagcctctcctcttctcatacttccacctcctgttcccaatcctagtcctactctccggccagttgaaacaccagttgtaggtgctcctggtatgggcagtgtttccacagaacctgatgatgaagaaggtctcaaacatttggagcagcaagctgagaaaatggtggcttatctccaagacagtgcactagatgatgaaagattggcatcaaaactgcaagagcacagagctaaaggagtgtcgattccattgatgcatgaagcaatgcagaagtggtattacaaagatcctcagggagaaattcaaggtcccttcaataatcaggagatggcagaatggtttcaggcgggctattttactatgtctttattggtgaagagagcgtgtgatgaaagcttccaacctcttggcgatatcatgaaaatgtggggaagggttcccttttctccaggtccagctccccctcctcatatgggagagctggaccaggaacgactgaccaggcagcaagaactcacagccttataccagatgcagcacctgcagtaccagcagtttttaatacaacaacaatatgcacaggttttggcccaacagcagaaagcagcactgtcttcccagcagcagcagcagttggcacttcttcttcaacagtttcagaccttgaagatgagaatatctgatcagaacatcattccctcagtaactaggtctgtgtccgtgccagatactggctctatctgggagcttcagccaacagcttcacagcctacagtttgggaaggtggtagtgtatgggatcttcctctggacaccacgacaccaggccctgccctggaacagcttcagcagctagagaaggccaaagctgcaaagctagagcaagagagaagagaggcagaaatgagggcaaaacgggaagaggaagagcgaaagaggcaggaagaactccgaagacaacaggaggaaattcttcggcgacagcaggaagaagaaaggaaaaggcgagaggaagaagaacttgcccgaaggaaacaggaagaggctctgcgtcgccagcgggagcaagaaattgcattaaggcgacagcgagaagaggaagaaagacagcagcaagaagaagctcttagaagactggaagagaggagaagagaagaggaagaaaggcggaagcaggaagaattgttacgcaaacaggaagaggaggctgcaaaatgggcccgggaagaagaagaagcccagcgtcgattagaggagaaccggctgcggatggaagaggaggcagccagactccggcatgaggaagaagaacggaagagaaaggagctggaggtccagcggcagaaggagttaatgcgccagaggcagcagcagcaagaggctctccggaggttgcagcagcagcagcagcaacaacagctggcgcagatgaagcttccttcttcttcaacgtggggccagcagtccaatacaacagcatgtcagtcccaggccacgctgtcgttggctgaaatccaaaaactagaggaagaacgagaacggcagcttcgagaagagcaaaggcgccagcagagggagttgatgaaagctcttcagcagcagcagcaacagcaacagcagaaactctcaggttgggggaatgtcagcaaaccttcaggtaccacgaaatctcttctggagatccagcaggaagaggccaggcaaatgcaaaagcagcagcagcagcagcagcaacaccagcaaccaaacagagctcgtaacaatacgcattccaacctgcacaccagcattgggaattctgtttggggctctataaatactggtcctcctaaccagtgggcatctgacctagtcagtagtatttggagtaatgctgacactaaaaactccaacatgggattctgggatgatgcagtgaaagaggtgggacctaggaattcaacaaataaaaataaaaacaacgccagtctcagtaaatctgtaggtgtgtctaaccggcagaataagaaagtagaagaagaagaaaagttgctgaagctctttcagggagtaaataaagcccaagatggatttacgcagtggtgtgaacagatgcttcatgcccttaatacggcaaataacttggatgttcccacatttgtttctttcctgaaagaagtagaatctccttatgaggtccatgattatatcagggcctatttaggagatacttctgaggccaaggagtttgccaagcagttccttgagcgccgtgccaaacagaaagccaaccagcagcgtcagcagcagcagctgccacagcagcagcagcagcagccgccacagcagccgccacagcagccacaacagcaggactctgtgtgggggatgaaccacagtacactccattcagtatttcagaccaatcaaagcaacaaccaacaatccaattttgaggctgtgcagagtggcaagaagaagaaaaagcagaagatggtccgagcagatcccagtttattaggattttcagtcaatgcatcatcggagcgactcaacatgggtgaaatcgagacgttggatgactactgagcacctgccagtggactggccatccctctcctgtctgccgactatggagtctccacctttggacacaacacttactcaccatttactctttatcactctgcaacaaatcacagaaccgatcatctcaggctttttcttctggccctttgtgtccaagattctttaatccatttttgttggtgaacatctcagactatagataagtggactggaccctgtgtcttgggggtggcagttgggattactccccaacaaggctgattttaggcagcatgtgttcactgtgctgtgatttcatctactgtctcccagaaagtgtgttgggatcggccattagcagcttgctttctcttgtcactttttttcttctattttgttttttcttcttctttttccccccatcagggcaaatggtctaactggtgcaatcatgaagagagttaatggttaacagacattggccaataacaaaacaccccatggactgtgactcgagtatccaacaggcagtcagagctctcccggtctgaaagttgcattgccactgctaactttgggattgcatcagagaggccctgagtggggttgagatgaggttggtttggtttgatgttacacactcctcacctgttctttctgagtgtcctttctctgaaaggatttatgtttttcttcgttagatagtgacttctgagcaagctgatctcccctggcatgctccaacctgattggacaaaggaagctctatggcctgggagagagactattcttaatttttctttcttacaaaaactgatttttcccataaatatttttacttcagaggactaggaccattttgttttgggcccttctgctgaaaatttgtctcgtttaagaggcagctagaatctttaccatatgtatgaatttgtataatttcatttttggatagggataaacttttgcttctgataaaagcctggaatttcatctggtcctcagagcattgcgtgtgtgtcttgctgtagcccggaaaaggttttgtgtaaagattctgggatggcaagttgtttgccttttctgaaaagagaacatacagaacctgtccatctttaagaccttcatccatggaatctactatacaggaggatgcagtgggctggaggggatgggcgaaaatgggagcaggaagcctggcctggcttctggtcatggcctcctaaaaccttaaacttcaagtagaaatgtactcaagccctatttataaacaaatacttttcctgcctccaccaaacccctacagaacatcacctggaattgccactcacactgggttggagtcattgggcagctgtgcctgtgcgagaggtgctgtggtctgggcagcccctggaaaagcacctttgctgcctgtcattgttgcctgaagaaggctggagttgctctgagagcagtttgggtttggagtattatatttggcttctatttttattattttggatcaccattctccctatcccttcttgcctccctcccttctaaacatgtgtaataactatacagagactgctacaaaattgtatatagtttttggatcaaatagcatgaggggagaggaaaccattaaaagttggggctcctactctcctttgctttgtaaattcaaaagttgggggtgggtaagagggatagttaaaatgtttacaaaactttaggctccctcggaacttttgccagtgtggaggaaaataaaaaagaacttaaataaaatctgattgtattctatctgagtgcacctcttgtactcacctttatggaggctgagttctgcactaaactgttcctcttggtaccatggaaaagctccaagcacccaagacatggaggcagccatggcttctttctctgccagaccacgtagcactggctggttctgtatttgagaatgtagaggtcaaggcagatgtcggtaagtttgaccaaatatcttttctctttttgactctccctttctgctaacatgtggatcagctcctgccctcataccgcagacacacccactctgaacacacccctccagagcttgcccacaccttcccaactagactctgtgtgtgtattcaggaaaaatgaaaataaatttttaaaaattgggagtggaatgggcagattagggggaacaaagtcattttggtcatggaacatccatttgcttaaccaaggagacttgcttctatctgaggaatttcccacttagtagaaagaaacactcttccctgggaatgtttgtttctgtctctctcaatgctactctctttcatattctcatttgctcaccctttcacttagagccaccgttttctcatcccattctatgaacttatttccaaattctcctaactattcctgagttttgaagtatttgttttgtaccctctctgcttccggttttttgtttggttggcttttttggagatagggtcttgtgatgttgcccacactggtctcgagcccctgggctcaagtgatcctcccgcctcagcctcctaaatatctaggactacaggtgtgtgccaccatgcccagctccagttttgttggttgatttgtttaaattcagagatttaaaaacatcccagacaagacagtttgattatggagactgtccccaagcagattggtgtgctggtggctgctgtgcataacagattccctccagattggcttacaacagctacttcattctgtgggtcaggaatttggatagggctcagctgggtggtggttctcctggggtattctttggttgtggtcagatgtcttccagggcatcattcctatgaaggcttaatgaattaggcaagctgtccaagatggctcactcgtgtaatgacagttgacgttggctgtaggctgggaactcagctgggttgatgactggaggagcttatgtgtgtcgtctccggaatggcagcttcagaggagttgaacttaagtggtgattggcttcccccagagaaccaggcagaagctgtgttacctttttgagctcttagctcaggagtcacatagagtcacttctgtgacactgtgttgcatcaaagtagtcacaaacccactcagattcaagagaagggagcatggccctctccctgcaaccccctccccccccgccttgatgaaaggagtgacaaggtcacattggagaagagcttgtggggtgggagatattatagccatttttgggaaatatctgcataaaatgagtttatgcatacatgaaggactttattttcattggctttaagttgagggtttttgtttttgtttttgtattggagatgggttcttactatgttgcccaggctggtctcaaacccctgggctcaagtgatcctgttgcctcagcctcccaagtagctgggactacagctatgtgccagtgcacccagcttgttttttttaaattttaggatagataatggtacttctggctttatttaaataatttttttagggaaaccattgtatttatacatgcatatatttttatatatacaaatatgtatataaaagtatatgttttacattttcaatatatatataatatatacatatatgttatatacgtatatatattgcaccctactttaaaattgactgataacaaaattggtaattttgtataaaatgcccaactgtgcattattaataaaagtatgtgaatgactct

SEQ ID NO: 12765 - DNA, 5976 bp, Homo sapiens
  source 1..5976: mol_type = unassigned DNA
gtgcgtggcgacgtgtcggccatcttgtgttgttgaggctgaggactgactggggttctgagactccctgtcccggaccgcagattatagtgggaccagtctcattaggttgaatctacagcctatgttggtgttaacccaggtctcttagagcgttaaaaggatctgaacaaagtctgctcaaatctcctgctgtgaaccagcagaatttttgaacaggtttcttcacatataaaaatctattgtaaaaatacggaaaagaatggcagcggaaacgcagacactgaactttgggcctgaatggctccgagctctgtccagtggtgggagtattacatcccctcctctttctccagcattgccgaagtataaattagcagattatcgttacggcagagaagaaatgttagcacttttccttaaagacaacaagataccttcagaccttctggataaagaatttctgcctatcctccaggaggaaccccttccaccattggctctggtaccctttacagaagaagaacagagaaacttttccatgtctgtaaatagtgctgctgtcctgcgattgacaggacgaggaggaggaggaacagtggtgggggctcctagaggtcgaagttcttcaagagggcgaggcagaggcagaggtgaatgtggtttctaccaaagaagttttgatgaagtagagggtgtttttggtcgaggaggtggcagagaaatgcatagatcgcagagctgggaggaaaggggtgacagacgttttgaaaaaccaggacgaaaagatgtaggaaagaagaatggatattattgcatgtactcaccagttcttttgctgggtcagcctttatgccaagggagaccaaattttgaggaaggtggaccaacatcagtagggagaaagcatgaatttatacgctcagaaagtgaaaattggcgcatctttagagaggaacaaaatggagaagatgaagatggaggttggcgactagctggatcaaggagggatggagagaggtggcgacctcacagtcctgatggccctcgttctgcaggctggcgggaacacatggaacgacgtcggaggtttgagtttgattttcgagatagagatgatgaacggggttaccgaagggttcgctctggcagtgggagcatagatgatgacagggatagcttgcccgaatggtgcttagaggatgctgaagaagaaatgggtacatttgactcatctggagcattcctttctctaaaaaaagtacagaaagagcctattccagaagagcaggagatggacttccggcctgtggacgaaggggaggagtgctctgactctgagggtagccataatgaagaggccaaagaacccgataagacaaataagaaagaaggagagaaaacagatagagtaggagttgaagctagtgaggaaactccccagacctcatcatcatctgctagaccaggtactccttcagaccatcagtctcaggaagcatcacagtttgagaggaaagatgaaccaaaaactgagcaaacggaaaaagctgaagaggagactcggatggaaaatagtctaccagccaaagtgcccagcagaggggatgaaatggttgctgatgtccagcagcccctgtcgcagattccttcagatacagcctctcctcttctcatacttccacctcctgttcccaatcctagtcctactctccggccagttgaaacaccagttgtaggtgctcctggtatgggcagtgtttccacagaacctgatgatgaagaaggtctcaaacatttggagcagcaagctgagaaaatggtggcttatctccaagacagtgcactagatgatgaaagattggcatcaaaactgcaagagcacagagctaaaggagtgtcgattccattgatgcatgaagcaatgcagaagtggtattacaaagatcctcagggagaaattcaaggtcccttcaataatcaggagatggcagaatggtttcaggcgggctattttactatgtctttattggtgaagagagcgtgtgatgaaagcttccaacctcttggcgatatcatgaaaatgtggggaagggttcccttttctccaggtccagctccccctcctcatatgggagagctggaccaggaacgactgaccaggcagcaagaactcacagccttataccagatgcagcacctgcagtaccagcagtttttaatacaacaacaatatgcacaggttttggcccaacagcagaaagcagcactgtcttcccagcagcagcagcagttggcacttcttcttcaacagtttcagaccttgaagatgagaatatctgatcagaacatcattccctcagtaactaggtctgtgtccgtgccagatactggctctatctgggagcttcagccaacagcttcacagcctacagtttgggaaggtggtagtgtatgggatcttcctctggacaccacgacaccaggccctgccctggaacagcttcagcagctagagaaggccaaagctgcaaagctagagcaagagagaagagaggcagaaatgagggcaaaacgggaagaggaagagcgaaagaggcaggaagaactccgaagacaacaggaggaaattcttcggcgacagcaggaagaagaaaggaaaaggcgagaggaagaagaacttgcccgaaggaaacaggaagaggctctgcgtcgccagcgggagcaagaaattgcattaaggcgacagcgagaagaggaagaaagacagcagcaagaagaagctcttagaagactggaagagaggagaagagaagaggaagaaaggcggaagcaggaagaattgttacgcaaacaggaagaggaggctgcaaaatgggcccgggaagaagaagaagcccagcgtcgattagaggagaaccggctgcggatggaagaggaggcagccagactccggcatgaggaagaagaacggaagagaaaggagctggaggtccagcggcagaaggagttaatgcgccagaggcagcagcagcaagaggctctccggaggttgcagcagcagcagcagcaacaacagctggcgcagatgaagcttccttcttcttcaacgtggggccagcagtccaatacaacagcatgtcagtcccaggccacgctgtcgttggctgaaatccaaaaactagaggaagaacgagaacggcagcttcgagaagagcaaaggcgccagcagagggagttgatgaaagctcttcagcagcagcagcaacagcaacagcagaaactctcaggttgggggaatgtcagcaaaccttcaggtaccacgaaatctcttctggagatccagcaggaagaggccaggcaaatgcaaaagcagcagcagcagcagcagcaacaccagcaaccaaacagagctcgtaacaatacgcattccaacctgcacaccagcattgggaattctgtttggggctctataaatactggtcctcctaaccagtgggcatctgacctagtcagtagtatttggagtaatgctgacactaaaaactccaacatgggattctgggatgatgcagtgaaagaggtgggacctaggaattcaacaaataaaaataaaaacaacgccagtctcagtaaatctgtaggtgtgtctaaccggcagaataagaaagtagaagaagaagaaaagttgctgaagctctttcagggagtaaataaagcccaagatggatttacgcagtggtgtgaacagatgcttcatgcccttaatacggcaaataacttggatgttcccacatttgtttctttcctgaaagaagtagaatctccttatgaggtccatgattatatcagggcctatttaggagatacttctgaggccaaggagtttgccaagcagttccttgagcgccgtgccaaacagaaagccaaccagcagcgtcagcagcagcagctgccacagcagcagcagcagcagccgccacagcagccgccacagcagccacaacagcaggactctgtgtgggggatgaaccacagtacactccattcagtatttcagaccaatcaaagcaacaaccaacaatccaattttgaggctgtgcagagtggcaagaagaagaaaaagcagaagatggtccgagcagatcccagtttattaggattttcagtcaatgcatcatcggagcgactcaacatgggtgaaatcgagacgttggatgactactgagcacctgccagtggactggccatccctctcctgtctgccgactatggagtctccacctttggacacaacacttactcaccatttactctttatcactctgcaacaaatcacagaaccgatcatctcaggctttttcttctggccctttgtgtccaagattctttaatccatttttgttggtgaacatctcagactatagataagtggactggaccctgtgtcttgggggtggcagttgggattactccccaacaaggctgattttaggcagcatgtgttcactgtgctgtgatttcatctactgtctcccagaaagtgtgttgggatcggccattagcagcttgctttctcttgtcactttttttcttctattttgttttttcttcttctttttccccccatcagggcaaatggtctaactggtgcaatcatgaagagagttaatggttaacagacattggccaataacaaaacaccccatggactgtgactcgagtatccaacaggcagtcagagctctcccggtctgaaagttgcattgccactgctaactttgggattgcatcagagaggccctgagtggggttgagatgaggttggtttggtttgatgttacacactcctcacctgttctttctgagtgtcctttctctgaaaggatttatgtttttcttcgttagatagtgacttctgagcaagctgatctcccctggcatgctccaacctgattggacaaaggaagctctatggcctgggagagagactattcttaatttttctttcttacaaaaactgatttttcccataaatatttttacttcagaggactaggaccattttgttttgggcccttctgctgaaaatttgtctcgtttaagaggcagctagaatctttaccatatgtatgaatttgtataatttcatttttggatagggataaacttttgcttctgataaaagcctggaatttcatctggtcctcagagcattgcgtgtgtgtcttgctgtagcccggaaaaggttttgtgtaaagattctgggatggcaagttgtttgccttttctgaaaagagaacatacagaacctgtccatctttaagaccttcatccatggaatctactatacaggaggatgcagtgggctggaggggatgggcgaaaatgggagcaggaagcctggcctggcttctggtcatggcctcctaaaaccttaaacttcaagtagaaatgtactcaagccctatttataaacaaatacttttcctgcctccaccaaacccctacagaacatcacctggaattgccactcacactgggttggagtcattgggcagctgtgcctgtgcgagaggtgctgtggtctgggcagcccctggaaaagcacctttgctgcctgtcattgttgcctgaagaaggctggagttgctctgagagcagtttgggtttggagtattatatttggcttctatttttattattttggatcaccattctccctatcccttcttgcctccctcccttctaaacatgtgtaataactatacagagactgctacaaaattgtatatagtttttggatcaaatagcatgaggggagaggaaaccattaaaagttggggctcctactctcctttgctttgtaaattcaaaagttgggggtgggtaagagggatagttaaaatgtttacaaaactttaggctccctcggaacttttgccagtgtggaggaaaataaaaaagaacttaaat

SEQ ID NO: 12766 - DNA, 5978 bp, Homo sapiens
  source 1..5978: mol_type = unassigned DNA
atcttgtgttgttgaggctgaggactgactggggttctgagactccctgtcccggaccgcagattatagtgggaccagtctcattaggttgaatctacagcctatgttggtgttaacccaggtctcttagagcgttaaaaggatctgaacaaagtctgctcaaatctcctgctgtgaaccagcagaatttttgaacagagaccacgtctccacctcctgggctccaacgattctcccatcttggcctcccaaagcgctggatttacaggtttcttcacatataaaaatctattgtaaaaatacggaaaagaatggcagcggaaacgcagacactgaactttgggcctgaatggctccgagctctgtccagtggtgggagtattacatcccctcctctttctccagcattgccgaagtataaattagcagattatcgttacggcagagaagaaatgttagcacttttccttaaagacaacaagataccttcagaccttctggataaagaatttctgcctatcctccaggaggaaccccttccaccattggctctggtaccctttacagaagaagaacagagaaacttttccatgtctgtaaatagtgctgctgtcctgcgattgacaggacgaggaggaggaggaacagtggtgggggctcctagaggtcgaagttcttcaagagggcgaggcagaggcagaggtgaatgtggtttctaccaaagaagttttgatgaagtagagggtgtttttggtcgaggaggtggcagagaaatgcatagatcgcagagctgggaggaaaggggtgacagacgttttgaaaaaccaggacgaaaagatgtagggagaccaaattttgaggaaggtggaccaacatcagtagggagaaagcatgaatttatacgctcagaaagtgaaaattggcgcatctttagagaggaacaaaatggagaagatgaagatggaggttggcgactagctggatcaaggagggatggagagaggtggcgacctcacagtcctgatggccctcgttctgcaggctggcgggaacacatggaacgacgtcggaggtttgagtttgattttcgagatagagatgatgaacggggttaccgaagggttcgctctggcagtgggagcatagatgatgacagggatagcttgcccgaatggtgcttagaggatgctgaagaagaaatgggtacatttgactcatctggagcattcctttctctaaaaaaagtacagaaagagcctattccagaagagcaggagatggacttccggcctgtggacgaaggggaggagtgctctgactctgagggtagccataatgaagaggccaaagaacccgataagacaaataagaaagaaggagagaaaacagatagagtaggagttgaagctagtgaggaaactccccagacctcatcatcatctgctagaccaggtactccttcagaccatcagtctcaggaagcatcacagtttgagaggaaagatgaaccaaaaactgagcaaacggaaaaagctgaagaggagactcggatggaaaatagtctaccagccaaagtgcccagcagaggggatgaaatggttgctgatgtccagcagcccctgtcgcagattccttcagatacagcctctcctcttctcatacttccacctcctgttcccaatcctagtcctactctccggccagttgaaacaccagttgtaggtgctcctggtatgggcagtgtttccacagaacctgatgatgaagaaggtctcaaacatttggagcagcaagctgagaaaatggtggcttatctccaagacagtgcactagatgatgaaagattggcatcaaaactgcaagagcacagagctaaaggagtgtcgattccattgatgcatgaagcaatgcagaagtggtattacaaagatcctcagggagaaattcaaggtcccttcaataatcaggagatggcagaatggtttcaggcgggctattttactatgtctttattggtgaagagagcgtgtgatgaaagcttccaacctcttggcgatatcatgaaaatgtggggaagggttcccttttctccaggtccagctccccctcctcatatgggagagctggaccaggaacgactgaccaggcagcaagaactcacagccttataccagatgcagcacctgcagtaccagcagtttttaatacaacaacaatatgcacaggttttggcccaacagcagaaagcagcactgtcttcccagcagcagcagcagttggcacttcttcttcaacagtttcagaccttgaagatgagaatatctgatcagaacatcattccctcagtaactaggtctgtgtccgtgccagatactggctctatctgggagcttcagccaacagcttcacagcctacagtttgggaaggtggtagtgtatgggatcttcctctggacaccacgacaccaggccctgccctggaacagcttcagcagctagagaaggccaaagctgcaaagctagagcaagagagaagagaggcagaaatgagggcaaaacgggaagaggaagagcgaaagaggcaggaagaactccgaagacaacaggaggaaattcttcggcgacagcaggaagaagaaaggaaaaggcgagaggaagaagaacttgcccgaaggaaacaggaagaggctctgcgtcgccagcgggagcaagaaattgcattaaggcgacagcgagaagaggaagaaagacagcagcaagaagaagctcttagaagactggaagagaggagaagagaagaggaagaaaggcggaagcaggaagaattgttacgcaaacaggaagaggaggctgcaaaatgggcccgggaagaagaagaagcccagcgtcgattagaggagaaccggctgcggatggaagaggaggcagccagactccggcatgaggaagaagaacggaagagaaaggagctggaggtccagcggcagaaggagttaatgcgccagaggcagcagcagcaagaggctctccggaggttgcagcagcagcagcagcaacaacagctggcgcagatgaagcttccttcttcttcaacgtggggccagcagtccaatacaacagcatgtcagtcccaggccacgctgtcgttggctgaaatccaaaaactagaggaagaacgagaacggcagcttcgagaagagcaaaggcgccagcagagggagttgatgaaagctcttcagcagcagcagcaacagcaacagcagaaactctcaggttgggggaatgtcagcaaaccttcaggtaccacgaaatctcttctggagatccagcaggaagaggccaggcaaatgcaaaagcagcagcagcagcagcagcaacaccagcaaccaaacagagctcgtaacaatacgcattccaacctgcacaccagcattgggaattctgtttggggctctataaatactggtcctcctaaccagtgggcatctgacctagtcagtagtatttggagtaatgctgacactaaaaactccaacatgggattctgggatgatgcagtgaaagaggtgggacctaggaattcaacaaataaaaataaaaacaacgccagtctcagtaaatctgtaggtgtgtctaaccggcagaataagaaagtagaagaagaagaaaagttgctgaagctctttcagggagtaaataaagcccaagatggatttacgcagtggtgtgaacagatgcttcatgcccttaatacggcaaataacttggatgttcccacatttgtttctttcctgaaagaagtagaatctccttatgaggtccatgattatatcagggcctatttaggagatacttctgaggccaaggagtttgccaagcagttccttgagcgccgtgccaaacagaaagccaaccagcagcgtcagcagcagcagctgccacagcagcagcagcagcagccgccacagcagccgccacagcagccacaacagcaggactctgtgtgggggatgaaccacagtacactccattcagtatttcagaccaatcaaagcaacaaccaacaatccaattttgaggctgtgcagagtggcaagaagaagaaaaagcagaagatggtccgagcagatcccagtttattaggattttcagtcaatgcatcatcggagcgactcaacatgggtgaaatcgagacgttggatgactactgagcacctgccagtggactggccatccctctcctgtctgccgactatggagtctccacctttggacacaacacttactcaccatttactctttatcactctgcaacaaatcacagaaccgatcatctcaggctttttcttctggccctttgtgtccaagattctttaatccatttttgttggtgaacatctcagactatagataagtggactggaccctgtgtcttgggggtggcagttgggattactccccaacaaggctgattttaggcagcatgtgttcactgtgctgtgatttcatctactgtctcccagaaagtgtgttgggatcggccattagcagcttgctttctcttgtcactttttttcttctattttgttttttcttcttctttttccccccatcagggcaaatggtctaactggtgcaatcatgaagagagttaatggttaacagacattggccaataacaaaacaccccatggactgtgactcgagtatccaacaggcagtcagagctctcccggtctgaaagttgcattgccactgctaactttgggattgcatcagagaggccctgagtggggttgagatgaggttggtttggtttgatgttacacactcctcacctgttctttctgagtgtcctttctctgaaaggatttatgtttttcttcgttagatagtgacttctgagcaagctgatctcccctggcatgctccaacctgattggacaaaggaagctctatggcctgggagagagactattcttaatttttctttcttacaaaaactgatttttcccataaatatttttacttcagaggactaggaccattttgttttgggcccttctgctgaaaatttgtctcgtttaagaggcagctagaatctttaccatatgtatgaatttgtataatttcatttttggatagggataaacttttgcttctgataaaagcctggaatttcatctggtcctcagagcattgcgtgtgtgtcttgctgtagcccggaaaaggttttgtgtaaagattctgggatggcaagttgtttgccttttctgaaaagagaacatacagaacctgtccatctttaagaccttcatccatggaatctactatacaggaggatgcagtgggctggaggggatgggcgaaaatgggagcaggaagcctggcctggcttctggtcatggcctcctaaaaccttaaacttcaagtagaaatgtactcaagccctatttataaacaaatacttttcctgcctccaccaaacccctacagaacatcacctggaattgccactcacactgggttggagtcattgggcagctgtgcctgtgcgagaggtgctgtggtctgggcagcccctggaaaagcacctttgctgcctgtcattgttgcctgaagaaggctggagttgctctgagagcagtttgggtttggagtattatatttggcttctatttttattattttggatcaccattctccctatcccttcttgcctccctcccttctaaacatgtgtaataactatacagagactgctacaaaattgtatatagtttttggatcaaatagcatgaggggagaggaaaccattaaaagttggggctcctactctcctttgctttgtaaattcaaaagttgggggtgggtaagagggatagttaaaatgtttacaaaactttaggctccctcggaacttttgccagtgtggaggaaaataaaaaagaacttaaataaaatctgattgtattcta

SEQ ID NO: 12767 - DNA, 7641 bp, Homo sapiens
  source 1..7641: mol_type = unassigned DNA
gtgacgtgcgtggcgacgtgtcggccatcttgtgttgttgaggctgaggactgactggggttctgagactccctgtcccggaccgcagcgttaaaaggatctgaacaaagtctgctcaaatctcctgctgtgaaccagcagaatttttgaacaggtttcttcacatataaaaatctattgtaaaaatacggaaaagaatggcagcggaaacgcagacactgaactttgggcctgaatggctccgagctctgtccagtggtgggagtattacatcccctcctctttctccagcattgccgaagtataaattagcagattatcgttacggcagagaagaaatgttagcacttttccttaaagacaacaagataccttcagaccttctggataaagaatttctgcctatcctccaggaggaaccccttccaccattggctctggtaccctttacagaagaagaacagagaaacttttccatgtctgtaaatagtgctgctgtcctgcgattgacaggacgaggaggaggaggaacagtggtgggggctcctagaggtcgaagttcttcaagagggcgagggagaccaaattttgaggaaggtggaccaacatcagtagggagaaagcatgaatttatacgctcagaaagtgaaaattggcgcatctttagagaggaacaaaatggagaagatgaagatggaggttggcgactagctggatcaaggagggatggagagaggtggcgacctcacagtcctggctggcgggaacacatggaacgacgtcggaggtttgagtttgattttcgagatagagatgatgaacggggttaccgaagggttcgctctggcagtgggagcatagatgatgacagggatagcttgcccgaatggtgcttagaggatgctgaagaagaaatgggtacatttgactcatctggagcattcctttctctaaaaaaagtacagaaagagcctattccagaagagcaggagatggacttccggcctgtggacgaaggggaggagtgctctgactctgagggtagccataatgaagaggccaaagaacccgataagacaaataagaaagaaggagagaaaacagatagagtaggagttgaagctagtgaggaaactccccagacctcatcatcatctgctagaccaggtactccttcagaccatcagtctcaggaagcatcacagtttgagaggaaagatgaaccaaaaactgagcaaacggaaaaagctgaagaggagactcggatggaaaatagtctaccagccaaagtgcccagcagaggggatgaaatggttgctgatgtccagcagcccctgtcgcagattccttcagatacagcctctcctcttctcatacttccacctcctgttcccaatcctagtcctactctccggccagttgaaacaccagttgtaggtgctcctggtatgggcagtgtttccacagaacctgatgatgaagaaggtctcaaacatttggagcagcaagctgagaaaatggtggcttatctccaagacagtgcactagatgatgaaagattggcatcaaaactgcaagagcacagagctaaaggagtgtcgattccattgatgcatgaagcaatgcagaagtggtattacaaagatcctcagggagaaattcaaggtcccttcaataatcaggagatggcagaatggtttcaggcgggctattttactatgtctttattggtgaagagagcgtgtgatgaaagcttccaacctcttggcgatatcatgaaaatgtggggaagggttcccttttctccaggtccagctccccctcctcatatgggagagctggaccaggaacgactgaccaggcagcaagaactcacagccttataccagatgcagcacctgcagtaccagcagtttttaatacaacaacaatatgcacaggttttggcccaacagcagaaagcagcactgtcttcccagcagcagcagcagttggcacttcttcttcaacagtttcagaccttgaagatgagaatatctgatcagaacatcattccctcagtaactaggtctgtgtccgtgccagatactggctctatctgggagcttcagccaacagcttcacagcctacagtttgggaaggtggtagtgtatgggatcttcctctggacaccacgacaccaggccctgccctggaacagcttcagcagctagagaaggccaaagctgcaaagctagagcaagagagaagagaggcagaaatgagggcaaaacgggaagaggaagagcgaaagaggcaggaagaactccgaagacaacaggaggaaattcttcggcgacagcaggaagaagaaaggaaaaggcgagaggaagaagaacttgcccgaaggaaacaggaagaggctctgcgtcgccagcgggagcaagaaattgcattaaggcgacagcgagaagaggaagaaagacagcagcaagaagaagctcttagaagactggaagagaggagaagagaagaggaagaaaggcggaagcaggaagaattgttacgcaaacaggaagaggaggctgcaaaatgggcccgggaagaagaagaagcccagcgtcgattagaggagaaccggctgcggatggaagaggaggcagccagactccggcatgaggaagaagaacggaagagaaaggagctggaggtccagcggcagaaggagttaatgcgccagaggcagcagcagcaagaggctctccggaggttgcagcagcagcagcagcaacaacagctggcgcagatgaagcttccttcttcttcaacgtggggccagcagtccaatacaacagcatgtcagtcccaggccacgctgtcgttggctgaaatccaaaaactagaggaagaacgagaacggcagcttcgagaagagcaaaggcgccagcagagggagttgatgaaagctcttcagcagcagcagcaacagcaacagcagaaactctcaggttgggggaatgtcagcaaaccttcaggtaccacgaaatctcttctggagatccagcaggaagaggccaggcaaatgcaaaagcagcagcagcagcagcagcaacaccagcaaccaaacagagctcgtaacaatacgcattccaacctgcacaccagcattgggaattctgtttggggctctataaatactggtcctcctaaccagtgggcatctgacctagtcagtagtatttggagtaatgctgacactaaaaactccaacatgggattctgggatgatgcagtgaaagaggtgggacctaggaattcaacaaataaaaataaaaacaacgccagtctcagtaaatctgtaggtgtgtctaaccggcagaataagaaagtagaagaagaagaaaagttgctgaagctctttcagggagtaaataaagcccaagatggatttacgcagtggtgtgaacagatgcttcatgcccttaatacggcaaataacttggatgttcccacatttgtttctttcctgaaagaagtagaatctccttatgaggtccatgattatatcagggcctatttaggagatacttctgaggccaaggagtttgccaagcagttccttgagcgccgtgccaaacagaaagccaaccagcagcgtcagcagcagcagctgccacagcagcagcagcagcagccgccacagcagccgccacagcagccacaacagcaggactctgtgtgggggatgaaccacagtacactccattcagtatttcagaccaatcaaagcaacaaccaacaatccaattttgaggctgtgcagagtggcaagaagaagaaaaagcagaagatggtccgagcagatcccagtttattaggattttcagtcaatgcatcatcggagcgactcaacatgggtgaaatcgagacgttggatgactactgagcacctgccagtggactggccatccctctcctgtctgccgactatggagtctccacctttggacacaacacttactcaccatttactctttatcactctgcaacaaatcacagaaccgatcatctcaggctttttcttctggccctttgtgtccaagattctttaatccatttttgttggtgaacatctcagactatagataagtggactggaccctgtgtcttgggggtggcagttgggattactccccaacaaggctgattttaggcagcatgtgttcactgtgctgtgatttcatctactgtctcccagaaagtgtgttgggatcggccattagcagcttgctttctcttgtcactttttttcttctattttgttttttcttcttctttttccccccatcagggcaaatggtctaactggtgcaatcatgaagagagttaatggttaacagacattggccaataacaaaacaccccatggactgtgactcgagtatccaacaggcagtcagagctctcccggtctgaaagttgcattgccactgctaactttgggattgcatcagagaggccctgagtggggttgagatgaggttggtttggtttgatgttacacactcctcacctgttctttctgagtgtcctttctctgaaaggatttatgtttttcttcgttagatagtgacttctgagcaagctgatctcccctggcatgctccaacctgattggacaaaggaagctctatggcctgggagagagactattcttaatttttctttcttacaaaaactgatttttcccataaatatttttacttcagaggactaggaccattttgttttgggcccttctgctgaaaatttgtctcgtttaagaggcagctagaatctttaccatatgtatgaatttgtataatttcatttttggatagggataaacttttgcttctgataaaagcctggaatttcatctggtcctcagagcattgcgtgtgtgtcttgctgtagcccggaaaaggttttgtgtaaagattctgggatggcaagttgtttgccttttctgaaaagagaacatacagaacctgtccatctttaagaccttcatccatggaatctactatacaggaggatgcagtgggctggaggggatgggcgaaaatgggagcaggaagcctggcctggcttctggtcatggcctcctaaaaccttaaacttcaagtagaaatgtactcaagccctatttataaacaaatacttttcctgcctccaccaaacccctacagaacatcacctggaattgccactcacactgggttggagtcattgggcagctgtgcctgtgcgagaggtgctgtggtctgggcagcccctggaaaagcacctttgctgcctgtcattgttgcctgaagaaggctggagttgctctgagagcagtttgggtttggagtattatatttggcttctatttttattattttggatcaccattctccctatcccttcttgcctccctcccttctaaacatgtgtaataactatacagagactgctacaaaattgtatatagtttttggatcaaatagcatgaggggagaggaaaccattaaaagttggggctcctactctcctttgctttgtaaattcaaaagttgggggtgggtaagagggatagttaaaatgtttacaaaactttaggctccctcggaacttttgccagtgtggaggaaaataaaaaagaacttaaataaaatctgattgtattctatctgagtgcacctcttgtactcacctttatggaggctgagttctgcactaaactgttcctcttggtaccatggaaaagctccaagcacccaagacatggaggcagccatggcttctttctctgccagaccacgtagcactggctggttctgtatttgagaatgtagaggtcaaggcagatgtcggtaagtttgaccaaatatcttttctctttttgactctccctttctgctaacatgtggatcagctcctgccctcataccgcagacacacccactctgaacacacccctccagagcttgcccacaccttcccaactagactctgtgtgtgtattcaggaaaaatgaaaataaatttttaaaaattgggagtggaatgggcagattagggggaacaaagtcattttggtcatggaacatccatttgcttaaccaaggagacttgcttctatctgaggaatttcccacttagtagaaagaaacactcttccctgggaatgtttgtttctgtctctctcaatgctactctctttcatattctcatttgctcaccctttcacttagagccaccgttttctcatcccattctatgaacttatttccaaattctcctaactattcctgagttttgaagtatttgttttgtaccctctctgcttccggttttttgtttggttggcttttttggagatagggtcttgtgatgttgcccacactggtctcgagcccctgggctcaagtgatcctcccgcctcagcctcctaaatatctaggactacaggtgtgtgccaccatgcccagctccagttttgttggttgatttgtttaaattcagagatttaaaaacatcccagacaagacagtttgattatggagactgtccccaagcagattggtgtgctggtggctgctgtgcataacagattccctccagattggcttacaacagctacttcattctgtgggtcaggaatttggatagggctcagctgggtggtggttctcctggggtattctttggttgtggtcagatgtcttccagggcatcattcctatgaaggcttaatgaattaggcaagctgtccaagatggctcactcgtgtaatgacagttgacgttggctgtaggctgggaactcagctgggttgatgactggaggagcttatgtgtgtcgtctccggaatggcagcttcagaggagttgaacttaagtggtgattggcttcccccagagaaccaggcagaagctgtgttacctttttgagctcttagctcaggagtcacatagagtcacttctgtgacactgtgttgcatcaaagtagtcacaaacccactcagattcaagagaagggagcatggccctctccctgcaaccccctccccccccgccttgatgaaaggagtgacaaggtcacattggagaagagcttgtggggtgggagatattatagccatttttgggaaatatctgcataaaatgagtttatgcatacatgaaggactttattttcattggctttaagttgagggtttttgtttttgtttttgtattggagatgggttcttactatgttgcccaggctggtctcaaacccctgggctcaagtgatcctgttgcctcagcctcccaagtagctgggactacagctatgtgccagtgcacccagcttgttttttttaaattttaggatagataatggtacttctggctttatttaaataatttttttagggaaaccattgtatttatacatgcatatatttttatatatacaaatatgtatataaaagtatatgttttacattttcaatatatatataatatatacatatatgttatatacgtatatatattgcaccctactttaaaattgactgataacaaaattggtaattttgtataaaatgcccaactgtgcattattaataaaagtatgtgaatgactct

SEQ ID NO: 12768 - DNA, 564 bp, Homo sapiens
  source 1..564: mol_type = unassigned DNA
atcttgtgttgttgaggctgaggactgactggggttctgagactccctgtcccggaccgcagcgttaaaaggatctgaacaaagtctgctcaaatctcctgctgtgaaccagcagaatttttgaacagatgctgcttgaatctggggcttcgtttatatttcaagactgctgcctgtaggagctccatctgtatcatttgtgttaatagtgaccctggagttttgtacttccagaacctatgtttcttcacatataaaaatctattgtaaaaatacggaaaagaatggcagcggaaacgcagacactgaactttgggcctgaatggctccgagctctgtccagtggtgggagtattacatcccctcctctttctccagcattgccgaagtataaattagcagattatcgttacggcagagaagaaatgttagcacttttccttaaagacaacaagataccttcagaccttctggataaagaatttctgcctatcctccaggaggaaccccttccaccattggctctggtaccctttacagaagaagaacagagaaacttttcca

SEQ ID NO: 12769 - DNA, 588 bp, Homo sapiens
  source 1..588: mol_type = unassigned DNA
atcttgtgttgttgaggctgaggactgactggggttctgagactccctgtcccggaccgcagcgttaaaaggatctgaacaaagtctgctcaaatctcctgctgtgaaccagcagaatttttgaacagagactgtctcgctctgtcacccaggctagagtgcagtggtgctatcgtaactcactggagccctgatctaggctcaaaccatcctcccacctcagcctcccaagtagctgggactaaggtttcttcacatataaaaatctattgtaaaaatacggaaaagaatggcagcggaaacgcagacactgaactttgggcctgaatggctccgagctctgtccagtggtgggagtattacatcccctcctctttctccagcattgccgaagtataaattagcagattatcgttacggcagagaagaaatgttagcacttttccttaaagacaacaagataccttcagaccttctggataaagaatttctgcctatcctccaggaggaaccccttccaccattggctctggtaccctttacagaagaagaacagagaaacttttccatgtctgtaaatagtgctgc

SEQ ID NO: 12770 - DNA, 530 bp, Homo sapiens
  source 1..530: mol_type = unassigned DNA
gtgacgtgcgtggcgacgtgtcggccatcttgtgttgttgaggctgaggactgactggggttctgagactccctgtcccggaccgcagattatagtgggaccagtctcattaggttgaatctacagcctatgttggtgttaacccaggtctcttagagcgttaaaaggatctgaacaaagtctgctcaaatctcctgctgtgaaccagcagaatttttgaacagagatactgtagctaagtgcaacaaggtgtcctgaattggagactggcacagaacaaggatgttgttggaaaaactgatgaaatctgaataaactctgaagtatagagactgtctcgctctgtcacccaggctagagtgcagtggtgctatcgtaactcactggagccctgatctaggctcaaaccatcctcccacctcagcctcccaagtagctgggactaaggtttcttcacatataaaaatctattgtaaaaatacggaaaagaatggcagcggaaacgcagacactgaactttgggcctgaat

SEQ ID NO: 12771 - DNA, 544 bp, Homo sapiens
  source 1..544: mol_type = unassigned DNA
acgtgcgtggcgacgtgtcggccatcttgtgttgttgaggctgaggactgactggggttctgagactccctgtcccggaccgcagagaccacgtctccacctcctgggctccaacgattctcccatcttggcctcccaaagcgctggatttacaggtttcttcacatataaaaatctattgtaaaaatacggaaaagaatggcagcggaaacgcagacactgaactttgggcctgaatggctccgagctctgtccagtggtgggagtattacatcccctcctctttctccagcattgccgaagtataaattagcagattatcgttacggcagagaagaaatgttagcacttttccttaaagacaacaagataccttcagaccttctggataaagaatttctgcctatcctccaggaggaaccccttccaccattggctctggtaccctttacagaagaagaacagagaaacttttccatgtctgtaaatagtgctgctgtcctgcgattgacaggacgaggaggaggaggaacagtggtggggg

SEQ ID NO: 12772 - DNA, 606 bp, Homo sapiens
  source 1..606: mol_type = unassigned DNA
ggactgactggggttctgagactccctgtcccggaccgcagcgttaaaaggatctgaacaaagtctgctcaaatctcctgctgtgaaccagcagaatttttgaacagatgctgcttgaatctggggcttcgtttatatttcaagactgctgcctgtaggagctccatctgtatcatttgtgttaatagtgaccctggagttttgtacttccagaacctatgtgagcatatgtgatggccttgtagtttcttcacatataaaaatctattgtaaaaatacggaaaagaatggcagcggaaacgcagacactgaactttgggcctgaatggctccgagctctgtccagtggtgggagtattacatcccctcctctttctccagcattgccgaagtataaattagcagattatcgttacggcagagaagaaatgttagcacttttccttaaagacaacaagataccttcagaccttctggataaagaatttctgcctatcctccaggaggaaccccttccaccattggctctggtaccctttacagaagaagaacagagaaacttttccatgtctgtaaatagtgctgctgtcctgcgattgacaggac

SEQ ID NO: 12773 - DNA, 561 bp, Homo sapiens
  source 1..561: mol_type = unassigned DNA
atcttgtgttgttgaggctgaggactgactggggttctgagactccctgtcccggaccgcagagactgtctcgctctgtcacccaggctagagtgcagtggtgctatcgtaactcactggagccctgatctaggctcaaaccatcctcccacctcagcctcccaagtagctgggactaaggtttcttcacatataaaaatctattgtaaaaatacggaaaagaatggcagcggaaacgcagacactgaactttgggcctgaatggctccgagctctgtccagtggtgggagtattacatcccctcctctttctccagcattgccgaagtataaattagcagattatcgttacggcagagaagaaatgttagcacttttccttaaagacaacaagataccttcagaccttctggataaagaatttctgcctatcctccaggaggaaccccttccaccattggctctggtaccctttacagaagaagaacagagaaacttttccatgtctgtaaatagtgctgctgtcctgcgattgacaggacgaggaggaggaggaacagt

SEQ ID NO: 12774 - DNA, 2913 bp, Homo sapiens
  source 1..2913: mol_type = unassigned DNA
tcatgctatctttatcagtttccaaaggaacgtttaaagttagttccgaagtagtcttcctgatcatgtgtgcaagacttcatgaccaagctcccagatgatccagggagaccaaattttgaggaaggtggaccaacatcagtagggagaaagcatgaatttatacgctcagaaagtgaaaattggcgcatctttagagaggaacaaaatggagaagatgaagatggaggttggcgactagctggatcaaggagggatggagagaggtggcgacctcacagtcctgatggccctcgttctgcaggctggcgggaacacatggaacgacgtcggaggtttgagtttgattttcgagatagagatgatgaacggggttaccgaagggttcgctctggcagtgggagcatagatgatgacagggatagcttgcccgaatggtgcttagaggatgctgaagaagaaatgggtacatttgactcatctggagcattcctttctctaaaaaaagtacagaaagagcctattccagaagagcaggagatggacttccggcctgtggacgaaggggaggagtgctctgactctgagggtagccataatgaagaggccaaagaacccgataagacaaataagaaagaaggagagaaaacagatagagtaggagttgaagctagtgaggaaactccccagacctcatcatcatctgctagaccaggtactccttcagaccatcagtctcaggaagcatcacagtttgagaggaaagatgaaccaaaaactgagcaaacggaaaaagctgaagaggagactcggatggaaaatagtctaccagccaaagtgcccagcagaggggatgaaatggttgctgatgtccagcagcccctgtcgcagattccttcagatacagcctctcctcttctcatacttccacctcctgttcccaatcctagtcctactctccggccagttgaaacaccagttgtaggtgctcctggtatgggcagtgtttccacagaacctgatgatgaagaaggtctcaaacatttggagcagcaagctgagaaaatggtggcttatctccaagacagtgcactagatgatgaaagattggcatcaaaactgcaagagcacagagctaaaggagtgtcgattccattgatgcatgaagcaatgcagaagtggtattacaaagatcctcagggagaaattcaaggtcccttcaataatcaggagatggcagaatggtttcaggcgggctattttactatgtctttattggtgaagagagcgtgtgatgaaagcttccaacctcttggcgatatcatgaaaatgtggggaagggttcccttttctccaggtccagctccccctcctcatatgggagagctggaccaggaacgactgaccaggcagcaagaactcacagccttataccagatgcagcacctgcagtaccagcagtttttaatacaacaacaatatgcacaggttttggcccaacagcagaaagcagcactgtcttcccagcagcagcagcagttggcacttcttcttcaacagtttcagaccttgaagatgagaatatctgatcagaacatcattccctcagtaactaggtctgtgtccgtgccagatactggctctatctgggagcttcagccaacagcttcacagcctacagtttgggaaggtggtagtgtatgggatcttcctctggacaccacgacaccaggccctgccctggaacagcttcagcagctagagaaggccaaagctgcaaagctagagcaagagagaagagaggcagaaatgagggcaaaacgggaagaggaagagcgaaagaggcaggaagaactccgaagacaacaggaggaaattcttcggcgacagcaggaagaagaaaggaaaaggcgagaggaagaagaacttgcccgaaggaaacaggaagaggctctgcgtcgccagcgggagcaagaaattgcattaaggcgacagcgagaagaggaagaaagacagcagcaagaagaagctcttagaagactggaagagaggagaagagaagaggaagaaaggcggaagcaggaagaattgttacgcaaacaggaagaggaggctgcaaaatgggcccgggaagaagaagaagcccagcgtcgattagaggagaaccggctgcggatggaagaggaggcagccagactccggcatgaggaagaagaacggaagagaaaggagctggaggtccagcggcagaaggagttaatgcgccagaggcagcagcagcaagaggctctccggaggttgcagcagcagcagcagcaacaacagctggcgcagatgaagcttccttcttcttcaacgtggggccagcagtccaatacaacagcatgtcagtcccaggccacgctgtcgttggctgaaatccaaaaactagaggaagaacgagaacggcagcttcgagaagaggaatcctcagctagcttctgtttttatgcaacagcaaaggcgccagcagagggagttgatgaaagctcttcagcagcagcagcaacagcaacagcagaaactctcaggttgggggaatgtcagcaaaccttcaggtaccacgaaatctcttctggagatccagcaggaagaggccaggcaaatgcaaaagcagcagcagcagcagcagcaacaccagcaaccaaacagagctcgtaacaatacgcattccaacctgcacaccagcattgggaattctgtttggggctctataaatactggtcctcctaaccagtgggcatctgacctagtcagtagtatttggagtaatgctgacactaaaaactccaacatgggattctgggatgatgcagtgaaagaggtgggacctaggaattcaacaaataaaaataaaaacaacgccagtctcag

SEQ ID NO: 12775 - DNA, 2675 bp, Homo sapiens
  source 1..2675: mol_type = unassigned DNA
atcttgtgttgttgaggctgaggactgactggggttctgagactccctgtcccggaccgcagattatagtgggaccagtctcattaggttgaatctacagcctatgttggtgttaacccaggtctcttagagcgttaaaaggatctgaacaaagtctgctcaaatctcctgctgtgaaccagcagaatttttgaacaggtttcttcacatataaaaatctattgtaaaaatacggaaaagaatggcagcggaaacgcagacactgaactttgggcctgaatggctccgagctctgtccagtggtgggagtattacatcccctcctctttctccagcattgccgaagtataaattagcagattatcgttacggcagagaagaaatgttagcacttttccttaaagacaacaagataccttcagaccttctggataaagaatttctgcctatcctccaggaggaaccccttccaccattggctctggtaccctttacagaagaagaacagagaaacttttccatgtctgtaaatagtgctgctgtcctgcgattgacaggacgaggaggaggaggaacagtggtgggggctcctagaggtcgaagttcttcaagagggcgaggcagaggcagaggtgaatgtggtttctaccaaagaagttttgatgaagtagagggtgtttttggtcgaggaggtggcagagaaatgcatagatcgcagagctgggaggaaaggggtgacagacgttttgaaaaaccaggacgaaaagatgtagggagaccaaattttgaggaaggtggaccaacatcagtagggagaaagcatgaatttatacgctcagaaagtgaaaattggcgcatctttagagaggaacaaaatggagaagatgaagatggaggttggcgactagctggatcaaggagggatggagagaggtggcgacctcacagtcctgatggccctcgttctgcaggctggcgggaacacatggaacgacgtcggaggtttgagtttgattttcgagatagagatgatgaacggggttaccgaagggttcgctctggcagtgggagcatagatgatgacagggatagcttgcccgaatggtgcttagaggatgctgaagaagaaatgggtacatttgactcatctggagcattcctttctctaaaaaaagtacagaaagagcctattccagaagagcaggagatggacttccggcctgtggacgaaggggaggagtgctctgactctgagggtagccataatgaagaggccaaagaacccgataagacaaataagaaagaaggagagaaaacagatagagtaggagttgaagctagtgaggaaactccccagacctcatcatcatctgctagaccaggtactccttcagaccatcagtctcaggaagcatcacagtttgagaggaaagatgaaccaaaaactgagcaaacggaaaaagctgaagaggagactcggatggaaaatagtctaccagccaaagtgcccagcagaggggatgaaatggttgctgatgtccagcagcccctgtcgcagattccttcagatacagcctctcctcttctcatacttccacctcctgttcccaatcctagtcctactctccggccagttgaaacaccagttgtaggtgctcctggtatgggcagtgtttccacagaacctgatgatgaagaaggtctcaaacatttggagcagcaagctgagaaaatggtggcttatctccaagacagtgcactagatgatgaaagattggcatcaaaactgcaagagcacagagctaaaggagtgtcgattccattgatgcatgaagcaatgcagaagtggtattacaaagatcctcagggagaaattcaaggtcccttcaataatcaggagatggcagaatggtttcaggcgggctattttactatgtctttattggtgaagagagcgtgtgatgaaagcttccaacctcttggcgatatcatgaaaatgtggggaagggttcccttttctccaggtccagctccccctcctcatatgggagagctggaccaggaacgactgaccaggcagcaagaactcacagccttataccagatgcagcacctgcagtaccagcagtttttaatacaacaacaatatgcacaggttttggcccaacagcagaaagcagcactgtcttcccagcagcagcagcagttggcacttcttcttcaacagtttcagaccttgaagatgagaatatctgatcagaacatcattccctcagtaactaggtctgtgtccgtgccagatactggctctatctgggagcttcagccaacagcttcacagcctacagtttgggaaggtggtagtgtatgggatcttcctctggacaccacgacaccaggccctgccctggaacagcttcagcagctagagaaggccaaagctgcaaagctagagcaagagagaagagaggcagaaatgagggcaaaacgggaagaggaagagcgaaagaggcaggaagaactccgaagacaacaggaggaaattcttcggcgacagcaggaagaagaaaggaaaaggcgagaggtgggtaagagggatagttaaaatgtttacaaaactttaggctccctcggaacttttgccagtgtggaggaaaataaaaaagaacttaaat

SEQ ID NO: 12776 - DNA, 5747 bp, Homo sapiens
  source 1..5747: mol_type = unassigned DNA
gttgttgaggctgaggactgactggggttctgagactccctgtcccggaccgcaggtttcttcacatataaaaatctattgtaaaaatacggaaaagaatggcagcggaaacgcagacactgaactttgggcctgaatggctccgagctctgtccagtggtgggagtattacatcccctcctctttctccagcattgccgaagtataaattagcagattatcgttacggcagagaagaaatgttagcacttttccttaaagacaacaagataccttcagaccttctggataaagaatttctgcctatcctccaggaggaaccccttccaccattggctctggtaccctttacagaagaagaacagagaaacttttccatgtctgtaaatagtgctgctgtcctgcgattgacaggacgaggaggaggaggaacagtggtgggggctcctagaggtcgaagttcttcaagagggcgaggcagaggcagaggtgaatgtggtttctaccaaagaagttttgatgaagtagagggtgtttttggtcgaggaggtggcagagaaatgcatagatcgcagagctgggaggaaaggggtgacagacgttttgaaaaaccaggacgaaaagatgtagggagaccaaattttgaggaaggtggaccaacatcagtagggagaaagcatgaatttatacgctcagaaagtgaaaattggcgcatctttagagaggaacaaaatggagaagatgaagatggaggttggcgactagctggatcaaggagggatggagagaggtggcgacctcacagtcctggctggcgggaacacatggaacgacgtcggaggtttgagtttgattttcgagatagagatgatgaacggggttaccgaagggttcgctctggcagtgggagcatagatgatgacagggatagcttgcccgaatggtgcttagaggatgctgaagaagaaatgggtacatttgactcatctggagcattcctttctctaaaaaaagtacagaaagagcctattccagaagagcaggagatggacttccggcctgtggacgaaggggaggagtgctctgactctgagggtagccataatgaagaggccaaagaacccgataagacaaataagaaagaaggagagaaaacagatagagtaggagttgaagctagtgaggaaactccccagacctcatcatcatctgctagaccaggtactccttcagaccatcagtctcaggaagcatcacagtttgagaggaaagatgaaccaaaaactgagcaaacggaaaaagctgaagaggagactcggatggaaaatagtctaccagccaaagtgcccagcagaggggatgaaatggttgctgatgtccagcagcccctgtcgcagattccttcagatacagcctctcctcttctcatacttccacctcctgttcccaatcctagtcctactctccggccagttgaaacaccagttgtaggtgctcctggtatgggcagtgtttccacagaacctgatgatgaagaaggtctcaaacatttggagcagcaagctgagaaaatggtggcttatctccaagacagtgcactagatgatgaaagattggcatcaaaactgcaagagcacagagctaaaggagtgtcgattccattgatgcatgaagcaatgcagaagtggtattacaaagatcctcagggagaaattcaaggtcccttcaataatcaggagatggcagaatggtttcaggcgggctattttactatgtctttattggtgaagagagcgtgtgatgaaagcttccaacctcttggcgatatcatgaaaatgtggggaagggttcccttttctccaggtccagctccccctcctcatatgggagagctggaccaggaacgactgaccaggcagcaagaactcacagccttataccagatgcagcacctgcagtaccagcagtttttaatacaacaacaatatgcacaggttttggcccaacagcagaaagcagcactgtcttcccagcagcagcagcagttggcacttcttcttcaacagtttcagaccttgaagatgagaatatctgatcagaacatcattccctcagtaactaggtctgtgtccgtgccagatactggctctatctgggagcttcagccaacagcttcacagcctacagtttgggaaggtggtagtgtatgggatcttcctctggacaccacgacaccaggccctgccctggaacagcttcagcagctagagaaggccaaagctgcaaagctagagcaagagagaagagaggcagaaatgagggcaaaacgggaagaggaagagcgaaagaggcaggaagaactccgaagacaacaggaggaaattcttcggcgacagcaggaagaagaaaggaaaaggcgagaggaagaagaacttgcccgaaggaaacaggaagaggctctgcgtcgccagcgggagcaagaaattgcattaaggcgacagcgagaagaggaagaaagacagcagcaagaagaagctcttagaagactggaagagaggagaagagaagaggaagaaaggcggaagcaggaagaattgttacgcaaacaggaagaggaggctgcaaaatgggcccgggaagaagaagaagcccagcgtcgattagaggagaaccggctgcggatggaagaggaggcagccagactccggcatgaggaagaagaacggaagagaaaggagctggaggtccagcggcagaaggagttaatgcgccagaggcagcagcagcaagaggctctccggaggttgcagcagcagcagcagcaacaacagctggcgcagatgaagcttccttcttcttcaacgtggggccagcagtccaatacaacagcatgtcagtcccaggccacgctgtcgttggctgaaatccaaaaactagaggaagaacgagaacggcagcttcgagaagagcaaaggcgccagcagagggagttgatgaaagctcttcagcagcagcagcaacagcaacagcagaaactctcaggttgggggaatgtcagcaaaccttcaggtaccacgaaatctcttctggagatccagcaggaagaggccaggcaaatgcaaaagcagcagcagcagcagcagcaacaccagcaaccaaacagagctcgtaacaatacgcattccaacctgcacaccagcattgggaattctgtttggggctctataaatactggtcctcctaaccagtgggcatctgacctagtcagtagtatttggagtaatgctgacactaaaaactccaacatgggattctgggatgatgcagtgaaagaggtgggacctaggaattcaacaaataaaaataaaaacaacgccagtctcagtaaatctgtaggtgtgtctaaccggcagaataagaaagtagaagaagaagaaaagttgctgaagctctttcagggagtaaataaagcccaagatggatttacgcagtggtgtgaacagatgcttcatgcccttaatacggcaaataacttggatgttcccacatttgtttctttcctgaaagaagtagaatctccttatgaggtccatgattatatcagggcctatttaggagatacttctgaggccaaggagtttgccaagcagttccttgagcgccgtgccaaacagaaagccaaccagcagcgtcagcagcagcagctgccacagcagcagcagcagcagccgccacagcagccgccacagcagccacaacagcaggactctgtgtgggggatgaaccacagtacactccattcagtatttcagaccaatcaaagcaacaaccaacaatccaattttgaggctgtgcagagtggcaagaagaagaaaaagcagaagatggtccgagcagatcccagtttattaggattttcagtcaatgcatcatcggagcgactcaacatgggtgaaatcgagacgttggatgactactgagcacctgccagtggactggccatccctctcctgtctgccgactatggagtctccacctttggacacaacacttactcaccatttactctttatcactctgcaacaaatcacagaaccgatcatctcaggctttttcttctggccctttgtgtccaagattctttaatccatttttgttggtgaacatctcagactatagataagtggactggaccctgtgtcttgggggtggcagttgggattactccccaacaaggctgattttaggcagcatgtgttcactgtgctgtgatttcatctactgtctcccagaaagtgtgttgggatcggccattagcagcttgctttctcttgtcactttttttcttctattttgttttttcttcttctttttccccccatcagggcaaatggtctaactggtgcaatcatgaagagagttaatggttaacagacattggccaataacaaaacaccccatggactgtgactcgagtatccaacaggcagtcagagctctcccggtctgaaagttgcattgccactgctaactttgggattgcatcagagaggccctgagtggggttgagatgaggttggtttggtttgatgttacacactcctcacctgttctttctgagtgtcctttctctgaaaggatttatgtttttcttcgttagatagtgacttctgagcaagctgatctcccctggcatgctccaacctgattggacaaaggaagctctatggcctgggagagagactattcttaatttttctttcttacaaaaactgatttttcccataaatatttttacttcagaggactaggaccattttgttttgggcccttctgctgaaaatttgtctcgtttaagaggcagctagaatctttaccatatgtatgaatttgtataatttcatttttggatagggataaacttttgcttctgataaaagcctggaatttcatctggtcctcagagcattgcgtgtgtgtcttgctgtagcccggaaaaggttttgtgtaaagattctgggatggcaagttgtttgccttttctgaaaagagaacatacagaacctgtccatctttaagaccttcatccatggaatctactatacaggaggatgcagtgggctggaggggatgggcgaaaatgggagcaggaagcctggcctggcttctggtcatggcctcctaaaaccttaaacttcaagtagaaatgtactcaagccctatttataaacaaatacttttcctgcctccaccaaacccctacagaacatcacctggaattgccactcacactgggttggagtcattgggcagctgtgcctgtgcgagaggtgctgtggtctgggcagcccctggaaaagcacctttgctgcctgtcattgttgcctgaagaaggctggagttgctctgagagcagtttgggtttggagtattatatttggcttctatttttattattttggatcaccattctccctatcccttcttgcctccctcccttctaaacatgtgtaataactatacagagactgctacaaaattgtatatagtttttggatcaaatagcatgaggggagaggaaaccattaaaagttggggctcctactctcctttgctttgtaaattcaaaagttgggggtgggtaagagggatagttaaaatgtttacaaaactttaggctccctcggaacttttgccagtgtggaggaaaataaaaaagaacttaaataaaatctgattgtattcta

SEQ ID NO: 12777 - DNA, 5937 bp, Homo sapiens
  source 1..5937: mol_type = unassigned DNA
ggctgaggactgactggggttctgagactccctgtcccggaccgcagattatagtgggaccagtctcattaggttgaatctacagcctatgttggtgttaacccaggtctcttagagcgttaaaaggatctgaacaaagtctgctcaaatctcctgctgtgaaccagcagaatttttgaacaggtttcttcacatataaaaatctattgtaaaaatacggaaaagaatggcagcggaaacgcagacactgaactttgggcctgaatggctccgagctctgtccagtggtgggagtattacatcccctcctctttctccagcattgccgaagtataaattagcagattatcgttacggcagagaagaaatgttagcacttttccttaaagacaacaagataccttcagaccttctggataaagaatttctgcctatcctccaggaggaaccccttccaccattggctctggtaccctttacagaagaagaacagagaaacttttccatgtctgtaaatagtgctgctgtcctgcgattgacaggacgaggaggaggaggaacagtggtgggggctcctagaggtcgaagttcttcaagagggcgaggcagaggcagaggtgaatgtggtttctaccaaagaagttttgatgaagtagagggtgtttttggtcgaggaggtggcagagaaatgcatagatcgcagagctgggaggaaaggggtgacagacgttttgaaaaaccaggacgaaaagatgtaggaaagaagaatggatattattgcatgtactcaccagttcttttgctgggtcagcctttatgccaagggagaccaaattttgaggaaggtggaccaacatcagtagggagaaagcatgaatttatacgctcagaaagtgaaaattggcgcatctttagagaggaacaaaatggagaagatgaagatggaggttggcgactagctggatcaaggagggatggagagaggtggcgacctcacagtcctgatggccctcgttctgcaggctggcgggaacacatggaacgacgtcggaggtttgagtttgattttcgagatagagatgatgaacggggttaccgaagggttcgctctggcagtgggagcatagatgatgacagggatagcttgcccgaatggtgcttagaggatgctgaagaagaaatgggtacatttgactcatctggagcattcctttctctaaaaaaagtacagaaagagcctattccagaagagcaggagatggacttccggcctgtggacgaaggggaggagtgctctgactctgagggtagccataatgaagaggccaaagaacccgataagacaaataagaaagaaggagagaaaacagatagagtaggagttgctagtgaggaaactccccagacctcatcatcatctgctagaccaggtactccttcagaccatcagtctcaggaagcatcacagtttgagaggaaagatgaaccaaaaactgagcaaacggaaaaagctgaagaggagactcggatggaaaatagtctaccagccaaagtgcccagcagaggggatgaaatggttgctgatgtccagcagcccctgtcgcagattccttcagatacagcctctcctcttctcatacttccacctcctgttcccaatcctagtcctactctccggccagttgaaacaccagttgtaggtgctcctggtatgggcagtgtttccacagaacctgatgatgaagaaggtctcaaacatttggagcagcaagctgagaaaatggtggcttatctccaagacagtgcactagatgatgaaagattggcatcaaaactgcaagagcacagagctaaaggagtgtcgattccattgatgcatgaagcaatgcagaagtggtattacaaagatcctcagggagaaattcaaggtcccttcaataatcaggagatggcagaatggtttcaggcgggctattttactatgtctttattggtgaagagagcgtgtgatgaaagcttccaacctcttggcgatatcatgaaaatgtggggaagggttcccttttctccaggtccagctccccctcctcatatgggagagctggaccaggaacgactgaccaggcagcaagaactcacagccttataccagatgcagcacctgcagtaccagcagtttttaatacaacaacaatatgcacaggttttggcccaacagcagaaagcagcactgtcttcccagcagcagcagcagttggcacttcttcttcaacagtttcagaccttgaagatgagaatatctgatcagaacatcattccctcagtaactaggtctgtgtccgtgccagatactggctctatctgggagcttcagccaacagcttcacagcctacagtttgggaaggtggtagtgtatgggatcttcctctggacaccacgacaccaggccctgccctggaacagcttcagcagctagagaaggccaaagctgcaaagctagagcaagagagaagagaggcagaaatgagggcaaaacgggaagaggaagagcgaaagaggcaggaagaactccgaagacaacaggaggaaattcttcggcgacagcaggaagaagaaaggaaaaggcgagaggaagaagaacttgcccgaaggaaacaggaagaggctctgcgtcgccagcgggagcaagaaattgcattaaggcgacagcgagaagaggaagaaagacagcagcaagaagaagctcttagaagactggaagagaggagaagagaagaggaagaaaggcggaagcaggaagaattgttacgcaaacaggaagaggaggctgcaaaatgggcccgggaagaagaagaagcccagcgtcgattagaggagaaccggctgcggatggaagaggaggcagccagactccggcatgaggaagaagaacggaagagaaaggagctggaggtccagcggcagaaggagttaatgcgccagaggcagcagcagcaagaggctctccggaggttgcagcagcagcagcagcaacaacagctggcgcagatgaagcttccttcttcttcaacgtggggccagcagtccaatacaacagcatgtcagtcccaggccacgctgtcgttggctgaaatccaaaaactagaggaagaacgagaacggcagcttcgagaagagcaaaggcgccagcagagggagttgatgaaagctcttcagcagcagcagcaacagcaacagcagaaactctcaggttgggggaatgtcagcaaaccttcaggtaccacgaaatctcttctggagatccagcaggaagaggccaggcaaatgcaaaagcagcagcagcagcagcagcaacaccagcaaccaaacagagctcgtaacaatacgcattccaacctgcacaccagcattgggaattctgtttggggctctataaatactggtcctcctaaccagtgggcatctgacctagtcagtagtatttggagtaatgctgacactaaaaactccaacatgggattctgggatgatgcagtgaaagaggtgggacctaggaattcaacaaataaaaataaaaacaacgccagtctcagtaaatctgtaggtgtgtctaaccggcagaataagaaagtagaagaagaagaaaagttgctgaagctctttcagggagtaaataaagcccaagatggatttacgcagtggtgtgaacagatgcttcatgcccttaatacggcaaataacttggatgttcccacatttgtttctttcctgaaagaagtagaatctccttatgaggtccatgattatatcagggcctatttaggagatacttctgaggccaaggagtttgccaagcagttccttgagcgccgtgccaaacagaaagccaaccagcagcgtcagcagcagcagctgccacagcagcagcagcagcagccgccacagcagccgccacagcagccacaacagcaggactctgtgtgggggatgaaccacagtacactccattcagtatttcagaccaatcaaagcaacaaccaacaatccaattttgaggctgtgcagagtggcaagaagaagaaaaagcagaagatggtccgagcagatcccagtttattaggattttcagtcaatgcatcatcggagcgactcaacatgggtgaaatcgagacgttggatgactactgagcacctgccagtggactggccatccctctcctgtctgccgactatggagtctccacctttggacacaacacttactcaccatttactctttatcactctgcaacaaatcacagaaccgatcatctcaggctttttcttctggccctttgtgtccaagattctttaatccatttttgttggtgaacatctcagactatagataagtggactggaccctgtgtcttgggggtggcagttgggattactccccaacaaggctgattttaggcagcatgtgttcactgtgctgtgatttcatctactgtctcccagaaagtgtgttgggatcggccattagcagcttgctttctcttgtcactttttttcttctattttgttttttcttcttctttttccccccatcagggcaaatggtctaactggtgcaatcatgaagagagttaatggttaacagacattggccaataacaaaacaccccatggactgtgactcgagtatccaacaggcagtcagagctctcccggtctgaaagttgcattgccactgctaactttgggattgcatcagagaggccctgagtggggttgagatgaggttggtttggtttgatgttacacactcctcacctgttctttctgagtgtcctttctctgaaaggatttatgtttttcttcgttagatagtgacttctgagcaagctgatctcccctggcatgctccaacctgattggacaaaggaagctctatggcctgggagagagactattcttaatttttctttcttacaaaaactgatttttcccataaatatttttacttcagaggactaggaccattttgttttgggcccttctgctgaaaatttgtctcgtttaagaggcagctagaatctttaccatatgtatgaatttgtataatttcatttttggatagggataaacttttgcttctgataaaagcctggaatttcatctggtcctcagagcattgcgtgtgtgtcttgctgtagcccggaaaaggttttgtgtaaagattctgggatggcaagttgtttgccttttctgaaaagagaacatacagaacctgtccatctttaagaccttcatccatggaatctactatacaggaggatgcagtgggctggaggggatgggcgaaaatgggagcaggaagcctggcctggcttctggtcatggcctcctaaaaccttaaacttcaagtagaaatgtactcaagccctatttataaacaaatacttttcctgcctccaccaaacccctacagaacatcacctggaattgccactcacactgggttggagtcattgggcagctgtgcctgtgcgagaggtgctgtggtctgggcagcccctggaaaagcacctttgctgcctgtcattgttgcctgaagaaggctggagttgctctgagagcagtttgggtttggagtattatatttggcttctatttttattattttggatcaccattctccctatcccttcttgcctccctcccttctaaacatgtgtaataactatacagagactgctacaaaattgtatatagtttttggatcaaatagcatgaggggagaggaaaccattaaaagttggggctcctactctcctttgctttgtaaattcaaaagttgggggtgggtaagagggatagttaaaatgtttacaaaactttaggctccctcggaacttttgccagtgtggaggaaaataaaaaagaacttaaat

SEQ ID NO: 12778 - DNA, 2648 bp, Homo sapiens
  source 1..2648: mol_type = unassigned DNA
gagtccgagcgctgctgaggcagctggcgagacggcacgtctggaggcgaggcgggcgcactgaaaggaggccggcgcgcccgcggccccggctcgcgttctgttcaggttcgtgggcctgcagaggagagactcgaactcgtggaacccgcgcaccgtggagtctgtccgcccagtccgtccggggtgcgcgaccaggagagctaggttctcgccactgcgcgctcggcaggcgtcggctgtgtcgggagcgcgcccgccgcccctcagctgcccggcccggagcccgagacgcgcgcaccatgagcggtggtgaagtggtctgctccggatggctccgcaagtcccccccggagaaaaagttgaagcgttatgcatggaagaggagatggttcgtgttacgcagtggccgtttaactggagatccagatgttttggaatattacaaaaatgatcatgccaagaagcctattcgtattattgatttaaatttatgtcaacaagtagatgctggattgacatttaacaaaaaagagtttgaaaacagctacatttttgatatcaacactattgaccggattttctacttggtagcagacagcgaggaggagatgaataagtgggttcgttgtatttgtgacatctgtgggtttaatccaacagaagaagatcctgtgaagccacctggcagctctttacaagcaccagctgatttacctttagctataaatacagcaccaccatccacccaggcagattcatcctctgctactctacctcctccatatcagctaatcaatgttccaccacacctggaaactcttggcattcaggaggatcctcaagactacctgttgctcatcaactgtcaaagcaagaagcccgaacccaccagaacgcatgctgattctgcaaaatccacctcttctgaaacagactgcaatgataacgtcccttctcataaaaatcctgcttcctcccagagcaaacatggaatgaatggcttttttcagcagcaaatgatatacgactctccaccttcacgtgccccatctgcttcagttgactccagcctttataacctgcccaggagttattcccatgatgttttaccaaaggtgtctccatcaagtactgaagcagatggagaactctatgtttttaataccccatctgggacatcgagtgtagagactcaaatgaggcatgtatctattagttatgacattcctccaacacctggtaatacttatcagattccacgaacatttccagaaggaaccttgggacagacatcaaagctagacactattccagatattcctccacctcggccaccgaaaccacatccagctcatgaccgatctcctgtggaaacgtgtagtatcccacgcaccgcctcagacactgacagtagttactgtatccctacagcagggatgtcgccttcacgtagtaataccatttccactgtggatttaaacaaattgcgaaaagatgctagttctcaagactgctatgatattccacgagcatttccaagtgatagatctagttcacttgaaggcttccataaccactttaaagtcaaaaatgtgttgacagtgggaagtgtttcaagtgaagaactggatgaaaattacgtcccaatgaatcccaattcaccaccacgacaacattccagcagttttacagaaccaattcaggaagcaaattatgtgccaatgactccaggaacatttgatttttcctcatttggaatgcaagttcctcctcctgctcatatgggcttcaggtccagcccaaaaacccctcccagaaggccagttcctgttgcagactgtgaaccaccccccgtggataggaacctcaagccagacagaaaagtcaagccagcgcctttagaaataaaacctttgccagaatgggaagaattacaagccccagttagatctcccatcactaggagttttgctcgagactcttccaggtttcccatgtccccccgaccagattcagtgcatagcacaacttcaagcagtgactcacacgacagtgaagagaattatgttcccatgaacccaaacctgtccagtgaagacccaaatctctttggcagtaacagtcttgatggaggaagcagccctatgatcaagcccaaaggagacaaacaggtggaatacttagatctcgacttagattctgggaaatccacaccaccacgtaagcaaaagagcagtggctcaggcagcagtgtagcagatgagagagtggattatgttgttgttgaccaacagaagaccttggctctaaagagtacccgggaagcctggacagatgggagacagtccacagaatcagaaacgccagcgaagagtgtgaaatgaaaatattgccttgccatttctgaacaaaagaaaactgaattgtaaagataaatcccttttgaagaatgacttgacacttccactctaggtagatcctcaaatgagtagagttgaagtcaaaggacctttctgacataatcaagcaatttagacttaagtggtgctttgtggtatctgaacaattcataacatgtaaataatgtgggaaaatagtattgtttagctcccagagaaacatttgttccacagttaacacactcg

SEQ ID NO: 12779 - DNA, 7981 bp, Homo sapiens
  source 1..7981: mol_type = unassigned DNA
gtgtgtgtgtgtgtgtgtgagcagcgctgtgtctgtttcggaaagcgctctggggaggtcttgtccctagggggcggagcgcaaaggacagaagctccggcaccgagtcggggcagagtcccgctgagtccgagcgctgctgaggcagctggcgagacggcacgtctggaggcgaggcgggcgcactgaaaggaggccggcgcgcccgcggccccggctcgcgttctgttcaggttcgtgggcctgcagaggagagactcgaactcgtggaacccgcgcaccgtggagtctgtccgcccagtccgtccggggtgcgcgaccaggagagctaggttctcgccactgcgcgctcggcaggcgtcggctgtgtcgggagcgcgcccgccgcccctcagctgcccggcccggagcccgagacgcgcgcaccatgagcggtggtgaagtggtctgctccggatggctccgcaagtcccccccggagaaaaagttgaagcgttatgcatggaagaggagatggttcgtgttacgcagtggccgtttaactggagatccagatgttttggaatattacaaaaatgatcatgccaagaagcctattcgtattattgatttaaatttatgtcaacaagtagatgctggattgacatttaacaaaaaagagtttgaaaacagctacatttttgatatcaacactattgaccggattttctacttggtagcagacagcgaggaggagatgaataagtgggttcgttgtatttgtgacatctgtgggtttaatccaacagaagaagatcctgtgaagccacctggcagctctttacaagcaccagctgatttacctttagctataaatacagcaccaccatccacccaggcagattcatcctctgctactctacctcctccatatcagctaatcaatgttccaccacacctggaaactcttggcattcaggaggatcctcaagactacctgttgctcatcaactgtcaaagcaagaagcccgaacccaccagaacgcatgctgattctgcaaaatccacctcttctgaaacagactgcaatgataacgtcccttctcataaaaatcctgcttcctcccagagcaaacatggaatgaatggcttttttcagcagcaaatgatatacgactctccaccttcacgtgccccatctgcttcagttgactccagcctttataacctgcccaggagttattcccatgatgttttaccaaaggtgtctccatcaagtactgaagcagatggagaactctatgtttttaataccccatctgggacatcgagtgtagagactcaaatgaggcatgtatctattagttatgacattcctccaacacctggtaatacttatcagattccacgaacatttccagaaggaaccttgggacagacatcaaagctagacactattccagatattcctccacctcggccaccgaaaccacatccagctcatgaccgatctcctgtggaaacgtgtagtatcccacgcaccgcctcagacactgacagtagttactgtatccctacagcagggatgtcgccttcacgtagtaataccatttccactgtggatttaaacaaattgcgaaaagatgctagttctcaagactgctatgatattccacgagcatttccaagtgatagatctagttcacttgaaggcttccataaccactttaaagtcaaaaatgtgttgacagtgggaagtgtttcaagtgaagaactggatgaaaattacgtcccaatgaatcccaattcaccaccacgacaacattccagcagttttacagaaccaattcaggaagcaaattatgtgccaatgactccaggaacatttgatttttcctcatttggaatgcaagttcctcctcctgctcatatgggcttcaggtccagcccaaaaacccctcccagaaggccagttcctgttgcagactgtgaaccaccccccgtggataggaacctcaagccagacagaaaaggtcaaagtcctaaaattttaagactcaaaccccatggtttagagcgaactgattcacaaaccataggtgactttgctacaagaagaaaggtcaagccagcgcctttagaaataaaacctttgccagaatgggaagaattacaagccccagttagatctcccatcactaggagttttgctcgagactcttccaggtttcccatgtccccccgaccagattcagtgcatagcacaacttcaagcagtgactcacacgacagtgaagagaattatgttcccatgaacccaaacctgtccagtgaagacccaaatctctttggcagtaacagtcttgatggaggaagcagccctatgatcaagcccaaaggagacaaacaggtggaatacttagatctcgacttagattctgggaaatccacaccaccacgtaagcaaaagagcagtggctcaggcagcagtgtagcagatgagagagtggattatgttgttgttgaccaacagaagaccttggctctaaagagtacccgggaagcctggacagatgggagacagtccacagaatcagaaacgccagcgaagagtgtgaaatgaaaatattgccttgccatttctgaacaaaagaaaactgaattgtaaagataaatcccttttgaagaatgacttgacacttccactctaggtagatcctcaaatgagtagagttgaagtcaaaggacctttctgacataatcaagcaatttagacttaagtggtgctttgtggtatctgaacaattcataacatgtaaataatgtgggaaaatagtattgtttagctcccagagaaacatttgttccacagttaacacactcgtagtattactgtatttatgcactttttcatctaaaacattgttctgggttttcccaatgtaccttaccataattcctttgggagttcttgttttttgtcacactactttatataacaatactaagtcaactaagctacttttagatttggaaattgctgtttacagtctaacaacattaaaatgagaggtagattcacaagttagctttctacctgaagcttcaggtgataaccattagcttatacttggactcatcatttgttgccttccaaaatgctgaggataatgtatgtactggtgtcaggacctagttctctggttaatgtacatttagtttttaatggtggaactttgttatattttgttaattacagtgtttttggttcattgagtgaagattctgccgggtgggatcttgcacctttgaaagactgaataattacactaccaagtaagcctgcaaatcattgatggcatgcagtgatgatgtgctcttacacttgttaacatgtattaagtgttatttgcaaaaggtagattatgtaaccaatcaggtacgtaccaggcagtgatgtgctaatacactgatcaggtttagacaatgagctttggttgtgttcttgttagtcctaatattggttttcagtttggaattaataaagcagttgacattcactgttagttacagcaacatactgtgatttttaattagatagtaattcagatttattactctatgaaattctgtcttttgacaccatagtgccctttctatgattttttttacttaatattcttcttggccttatatttaattccctatgcaattaatattttatatctgcatttttttaaaaaaaatagatgttatataagtgattctcgtatgtagcacctgttgcttttccactgaaagaattacggattttgtactgtgatttatattcactgccccaattcaagaaatattggagccttgctacaatgtgaaatgttatagtcatggactccttccaaccagatttctgaaaacaccagagggatggtataattctgtctcacctataacatggtcctgtgacatagatattaagaccacaagttgtagtgaggctacaattatattcgtctgtcttggctttgcaacataatttagaaagcacgtatagttgttttttaaccaagttacatacaatctcatgtactgatttgagacttataacaatttttggagggggcatagagaaaggagtgcccacagttgaggcatgaccccctccattcagacctctaactgttgcctgagtacacagatgtgccctgatttctggcccattggccatagtactgtgcctaatcaatgtaataggtttattttcccaatcctcaaactaaaaatgttcataacaagatgaattgtagactagtaacatttgatgcttttaaatatttgcttctttttaaacaaaaactaaaacccagaagtgaatttttaggtggatttttaaataaaaaagattgattgagtttggtgtgcaagctgttttataatgaaacaacaaaatgaaatctaaaatcctgaaatgtgcctaaactatcaaaacacacgatacagctaatgtgtaaagatgctaaattctgttacttggaggatgaatatatttaagatttaaaacacaataataaatacatgattaattcaaaaataaaaatctttacagctgcctatcaagggtctaaagcacttaatgaatgtttttagtctaacttatcattaactttttacaagtcaccatatttgaagatctgtagcactctgattttcagaaaatttttcattctgaataatttaaaaatggtgatgtattagaaaggcagtttgctttagaaaactaaatcacattgaacattgtattagagaattaaattaaaagtttcttacagagcagtattttccaaacatttttagcactagaatctttttagatgaaattttatgtataaccccaatacataaagcctgaaaactcaattttatcaatataaatgtattttgggttcacatttatgcttattcattttggctcattactaagcataataagattctgagttatttctgaataacacaaatgtggagttatacatagttgatgaaaccagcagccaatttatagctatgccctgttttatttgtatactatcaagaaaattttgattcacacaaatgtaagcaaaaataataggttttaaacatacatctcaggaaattctttaattagagatagctaaagttattcaaggtctatacaaaaataagttatcctggtagtggaagttaatacataagcagtctccagtgtggtaaagtagggtatgtaacacatcagaatgtgcgtttttattaggttttaaaatatgcacgtataaaaactaaatttgaatcaaacccttttaactcacctccaagaagctagactttggccaggaatgggctaaaaaccactggttaacgatgtgacagttatgatcttggagattggaaatctttcttccacattagagttctttaccttaattccttattctgaaaaattgtaagattttatgaaggtttgaatactgaagcacagttctgctttcaaaaattaaaattcaaacttgaaaaagctgtttaacccatggaagatatcatttagtaagatgtaaaagattttttaaatctacacttcagtttatacatctttatcattatcaatactatataagttactgtgagcattttagagaattccataaaggtactatgagtgtgtctgtatgtgtgtgtatatatagcattgtatttaatcatagactaaatttaatttgatatagaaatactactttacttgtacattaaggtcataatttctgctggactcttttatatttaattaatggggattatagtcttccttcataaatgcatttaaacctgaaattgaacaccagtgtttttctttttctacttatgggaagttgtctgcttccccctttagagaaaacagtatttttatattttgttaaaatattaactactttatgcctacacactatgctgtagatactgatcataattcttgggtgttcacaaacactcctagtgcctcttttttggcccgttgaaagtgttggtattactactttcactacagagcctttggccctctaataatgctgaggtgggctgatccttcccatttctgtcttcgggtcattctggtaggtcttctcctccactgtcaagtaagcaatcaggtccgtgacagggattggacatatgaacaaattaagtggatacacacagtgagaaagatacatgcattctatggtaacaactactgtcaataacatctgatgttacatgcacatttatatatatataattttaaaaactgaactatgagaagccatggtataaatgaatattgtggacatcatggacttgatatgatagaaatcaattgtcagcttgagaaagttgtttttaatctgtctaaatagttcatgcattactacagttaaaaatagtttcatttgtcttctatagacttaattttattccggttcagtataatctctgttaacagagtttcagcaaactgattggtcaaggtattaacatagcttctacttcctttacttaaaaagatgtggttttatgtaagttcttgattactgatgatcatcccaaattttgacaacaaaatcatatgtataaatttatttctcccctcttgttcatcatcttttgtaaaggtcccattgtagatcttttctgctaccaaataaaacttttcaaacaatttggtttcaagaccttaaatagacaagttggatactaagattgtgaactgataaggacatataaatttatatttccagcccttccttagagtctttatctgcatcaaaaacccaattctgccattaactgtgcttcccagtcccacctctatatgtcactcattttctgcaacaaagatctcactaaatcatgttgaaacacaagtcatgatcctctctaagtaaatagaaaaagctccctggaaaaactctgttgccacatgcacgtgccctgttactcctccagccagccagtgctgccagcattttattgtgtaaaagtccaaataaataagggcctgcatgcaacctttatcttcagaaactaggttttatatgtaaaatgtgacttgggaaatgattctgtttattaactggctgggatttttcatttctatgaaagtttcaaacatctccagtactttataaaatcccaacaattgctgtaagtcagcactttggtccactcagcccacccagcccacttgcaactctgactcttcactgaatcatatttgggaagtttgggtagggtgaggctatcttcttcaagattattttctcatatgtctgtctgtcaccttgtaaaccatgagactcctgggtatttgcatgtaacttctttgaggaagttaccaccatctctgatatagacacactttttgagttgcagtttctgttagaattttttggagactaacttgccaattctgtgaatgttattgaatatttaaaaagctgggtctgtaatgggaggcattttattagctgttgtgattgggtaacatgtccccttagatttcctgatttaaaattatacaaaattactatttttgataaaataaaggaacacctacagaaaattaagtttctaagatgtttctatacttcattagaaaagattttattactattacttatggttattggtgattaacacttaatgcgtctcctctgattttgtgttccatgaggtgcttggaacatttggagtgctctgtgcgagggacatacagtgatataggaaatttaaaaattaaaataatacccaaaacccactttatcagatatggtattgtgatggttaatattatgtgtcaacttggtgaggctatggcgcccatgtgtttggtcaaacactagcctagatgttgctgtgaatatattttgtagatgtgattaacatttacaatcagttgattttaagtaaagcagattctcatccataa

SEQ ID NO: 12780 - DNA, 2477 bp, Homo sapiens
  source 1..2477: mol_type = unassigned DNA
attactttcctagactctagtcatgaacaggatgttggaagtcagaggtacagagaagctgcctttttaggccgctcacatgaaaggcatggaagaggagatggttcgtgttacgcagtggccgtttaactggagatccagatgttttggaatattacaaaaatgatcatgccaagaagcctattcgtattattgatttaaatttatgtcaacaagtagatgctggattgacatttaacaaaaaagagtttgaaaacagctacatttttgatatcaacactattgaccggattttctacttggtagcagacagcgaggaggagatgaataagtgggttcgttgtatttgtgacatctgtgggtttaatccaacagaagaagatcctgtgaagccacctggcagctctttacaagcaccagctgatttacctttagctataaatacagcaccaccatccacccaggcagattcatcctctgctactctacctcctccatatcagctaatcaatgttccaccacacctggaaactcttggcattcaggaggatcctcaagactacctgttgctcatcaactgtcaaagcaagaagcccgaacccaccagaacgcatgctgattctgcaaaatccacctcttctgaaacagactgcaatgataacgtcccttctcataaaaatcctgcttcctcccagagcaaacatggaatgaatggcttttttcagcagcaaatgatatacgactctccaccttcacgtgccccatctgcttcagttgactccagcctttataacctgcccaggagttattcccatgatgttttaccaaaggtgtctccatcaagtactgaagcagatggagaactctatgtttttaataccccatctgggacatcgagtgtagagactcaaatgaggcatgtatctattagttatgacattcctccaacacctggtaatacttatcagattccacgaacatttccagaaggaaccttgggacagacatcaaagctagacactattccagatattcctccacctcggccaccgaaaccacatccagctcatgaccgatctcctgtggaaacgtgtagtatcccacgcaccgcctcagacactgacagtagttactgtatccctacagcagggatgtcgccttcacgtagtaataccatttccactgtggatttaaacaaattgcgaaaagatgctagttctcaagactgctatgatattccacgagcatttccaagtgatagatctagttcacttgaaggcttccataaccactttaaagtcaaaaatgtgttgacagtgggaagtgtttcaagtgaagaactggatgaaaattacgtcccaatgaatcccaattcaccaccacgacaacattccagcagttttacagaaccaattcaggaagcaaattatgtgccaatgactccaggaacatttgatttttcctcatttggaatgcaagttcctcctcctgctcatatgggcttcaggtccagcccaaaaacccctcccagaaggccagttcctgttgcagactgtgaaccaccccccgtggataggaacctcaagccagacagaaaagtcaagccagcgcctttagaaataaaacctttgccagaatgggaagaattacaagccccagttagatctcccatcactaggagttttgctcgagactcttccaggtttcccatgtccccccgaccagattcagtgcatagcacaacttcaagcagtgactcacacgacagtgaagagaattatgttcccatgaacccaaacctgtccagtgaagacccaaatctctttggcagtaacagtcttgatggaggaagcagccctatgatcaagcccaaaggagacaaacaggtggaatacttagatctcgacttagattctgggaaatccacaccaccacgtaagcaaaagagcagtggctcaggcagcagtgtagcagatgagagagtggattatgttgttgttgaccaacagaagaccttggctctaaagagtacccgggaagcctggacagatgggagacagtccacagaatcagaaacgccagcgaagagtgtgaaatgaaaatattgccttgccatttctgaacaaaagaaaactgaattgtaaagataaatcccttttgaagaatgacttgacacttccactctaggtagatcctcaaatgagtagagttgaagtcaaaggacctttctgacataatcaagcaatttagacttaagtggtgctttgtggtatctgaacaattcataacatgtaaataatgtgggaaaatagtattgtttagctcccagagaaacatttgttccacagttaacacactcgtagtattactgtatttatgcactttttcatctaaaacattgttctgggttttcccaatgtaccttaccataattcctttgggagttcttgttttttgtcacactactttatataaca

SEQ ID NO: 12781 - DNA, 6052 bp, Homo sapiens
  source 1..6052: mol_type = unassigned DNA
gaaattttgagaagtggtgggatgaagaagatccctgaagagaggagtaactgagacaaaggcgaggctagcaatagagagacaagtgagggaattagacctttggtatcatcatgaaaaggcctggaagaaacgctggtttatcctgcggagtggccggatgagcggtgacccagatgttctggaatactacaagaacgatcactccaagaagcctctgcggatcatcaacctgaacttctgtgagcaggtagatgcaggcctgacctttaacaagaaggagctgcaggatagttttgtgtttgacatcaagaccagtgaacgcaccttttacctggtggctgagacagaagaggacatgaataagtgggtccagagcatctgccagatctgtggcttcaatcaggctgaggagagcacagactccctgagaaatgtttcctcagccggtcatggcccccgctcttctccagctgagctcagcagctctagccagcaccttctccgagagcgcaagtcctcagccccatcacactccagccagccaactctgttcacgtttgaaccccctgtgtcaaaccacatgcagcccaccttgtccaccagcgcacctcaggagtatctctacttgcaccagtgcataagccgaagagcagaaaatgcaaggagtgccagcttctctcagggcaccagagcctcttttctcatgaggagtgacacagctgtacaaaaacttgcccagggcaatggacactgtgtcaacgggatcagtggtcaagtccatggcttctatagccttcccaagccgagccggcacaatacagaattcagagacagtacctacgacctcccccgcagcctggcctcccatggccacaccaagggcagcctcacaggctccgagacagataatgaggatgtgtacaccttcaagacgcccagcaacaccctgtgcagggagttcggggacctcctggtagacaatatggatgttccggccaccccactctcagcctaccagatccctaggacattcactctggacaaaaaccacaatgccatgacagtggccactcctggggactcagccatagctcccccaccccgcccccccaagccaagtcaggcagaaacacctcgatggggcagtcctcagcagagaccgccaatcagtgaaaatagcagatctgtcgctgccaccatccccagacgcaacaccctccctgcaatggacaacagccgacttcaccgagcttcttcctgtgagacctacgagtacccacagcgtggtggagagagtgcaggccggtctgctgaatccatgagtgatggagttggctctttcctgccagggaaaatgattgtgggccgatcggacagcaccaattctgaagacaactatgtgcccatgaatccaggttcttccaccctgttggccatggaacgagcaggtgataattcccagagcgtctacatcccaatgagcccaggggcccatcactttgactcacttggctacccatcaacaacccttcctgtgcaccgaggccccagcagaggaagtgagattcagccaccccctgtcaaccgcaacctcaaacctgatcggaaagcaaagccaacaccacttgacctgaggaacaacaccgtcatcgatgaactccccttcaagtcacctatcaccaagtcttggtctagggccaaccacaccttcaactccagctcctcccagtactgccgccccatctccacccagagcatcaccagcacagactcaggagacagcgaagagaactatgtccctatgcaaaacccagtgtctgcatctcccgttcccagtggcacgaacagtcctgcccctaagaagagcaccggcagcgttgattatctggccctggacttccagccgagctccccaagcccccaccgcaagccatctacttcatccgtcacctctgatgagaaggtggactacgttcaggtggacaaggagaagacccaggccctgcagaacaccatgcaggagtggacagacgtgcggcagtcctcagagccttccaagggtgccaagctgtgatgagagggccaccgcagagcccaggaggcagcatctccagagctggcccttcccatctcccctctcccctctcccgttcttcctcccatccacctcctctctactctgccagtctcagccttcaaagcacttgacatcagggaccctgaacccttcccctgggaggtgagggcctgatcaaggcacctcctctgcccactcggggcccagctgtgatttttatcagtaatggccatgcctccacccaccttagttaggagctacttccaaaaagcatccttcagcctcttcctgtcctttagacctgactctctaccagatgtttggagggaagggctggggctctgagccagattccacacctcacgttcagtcacagccctcagctatcttccctccggccactgggctacctctccttcagtcccagaagacaagtctcaccaacccagggagtcaaggaccagcaaaccaaagtggataatggactttttcattcctgtttttcttggcaggagagaagcaaggccactaaaagaggagatggtggagacggaggctcagcagtggtcttgaggggtaaaggacttagatgcccagatgaagagggaaagctgacatctgcagggaacccactttgaggctgaggccatggcaggacagctgctgtggggtgcagaggcagaagatgaaggacaaaaggaagggaaaactgatggccaacctagagcagcaaggagcagggcttggagctcgggtggtggagatgacaaggacactgtggggtctgggtccccagaactctggagctacaggccactctaggcccaagggctagtcctcttccccagtcccctcagaggcccccgccagccccaccttgaaagcagcatacaggggaaggcttggaccaagctgggcgaccaagcacatggggcaggaacacatggtaaaggggtggggaatatgggagggagtgtggtgtggatgggggtgatgcagggactgaggggaaccctgggacaggcacaggctgggcagaggcacagggcagtgcaggggactctgcagtggggtcgggaagtgagtttctttgcagtgagcagtgcagtggaagtcgggcacagaggtagcagacagatgtgaagcagtggtgaaggccatgtagcaagtggggaaatacatccaaagggcctgggagttggggggtgcccaacgcaatccttgggggtgcagggtggagcagaaagtgaaggagggacacgtgcaagagtggtgtgcatggtggtgtgacatgaggaccgttcctaggatgggacagtgggtcaggcaggacaaggagaaagcagggcagaatgatgcctagaggaccacatcaggcatggctgacagcttgtgcccatgggctgtggcgtatgtcagatcgcagggtaggaacgagtctggcctggtgccggcccagtgtttcctcagctcatccgccctctgttgctccctagcattccaggagccatcttggactctcctccccaggtttgaaaggccatcagattagcagggacggggtgtagggcatcacccaaggttccttctcttaaactaagggtgggggatctgaatgtttttatgttgactgttcttgactaaattttcaagagtttcagaagcaacaggacagaccagacgtttcattctaccctggggcgaacagaacttcttcctcccaaacaatgacttcctgccatgtttgatggggacagctaccactgtcctctgcccccattcccctttcagctcccatgagcatgcatagttcaccagaccaatggcctagccattctctaagtcccatcctggaagaagttatttcttcaagagctgcacctctcctcctagcattagtttagatcaactcaaggagtatttattaatggctgctgtctccagtttctggggttaagcactaaggacacaagaatcaatcagaccttctccctgaacttaagatagccacaatcagaaaaaggacaaggacatgagacagtggtgatggccatcagacagagacttcaaatgctgatggagggcagaggaagtacttagggaggttggtgtcagaggcaggagtgggggatcagggaaggtggattctaggaaaagggagtgcctgaggtaggccttagaaggggatgagtcagatttttacagaggaggagggcagggcttgggtccagtggaggaagaaggaaggagaggcttggaaagccttgtgtcttgggaacaaaaggcctttgagcatatgggtccagccactcagaagtgtaggggccatgccttggtgttccaataagtgaatggaagcagtggtggtagctacactgggcagagttggcagggtgctggttcactctgcccagccctgaatgtgtgccttaaaggccccctacaaggggccccatacgacagagcttttaactggtgccttccctgtacccgcagcagccacaagtgggcccagactattgcagcctcccataaacatgtgagcatgttctgagtgtgccatgatgtgagtggacctggctggaatcttcggagagcgactgaggtgttcaaatcgaatctcccaggaggcttccttccagccccctattctggtaactaccaggaggcttccttccagccccctattctggtaactaccaaaatccctcgggtgcaagtgtaggggtagagatggaaggatgagaggtgaaattgaccttttgaaagcaaagctctggctcacaggccccaaactaccagccgtatctagcatatccccaccctccacccactacctcctccaacaaaggagtcaactcagttgaaaaaactggtcctttggcctatccatgggtcaaagtccacctctcctgggggcctggagaggactgagcctacggaaaggggataccttcccactcagcactgcttcacacaggccccctgcctggggctctccaaggagccttcttcacccacttccagctccacttctgcaaggttaagtcaagtgagaacgatgagaaatagggagatggtgtctccttaagtccttgatctgcctgtctgtggaatgggaggttggattagctgcgctgaggtcccatccacagctggtgctcagctgcttgaaggggagactccctcctctgtaacttctttctgggggattggggtgggcagtacctatccccagtcccctcctagcttgactttagtggtttccaatgtagaagttaacaaagtatgccccattcctgtgacaaaagcacaaccattctgaagttactggagcatgggctcagctcatcctccctctggccccttctcccatggggacatctcggcccagcacccctatcccatttccagagttcttccttccccatctgggccttcataaaatgcaggggaagccagactggtctcaggagcgctaaagcccttccgtggggggtcgtctttctgggactagccctgctgtttaggacctgggaccacaatggggtacctgccgagggggtccccaagagatccaggctgtcatgtgatttatggtggcatgtgttgtgtatttgttggctacttgtgtcttgaaatctagaattatttcacgcagaattgtcactgtttgtcaggaagagaaaatgggctagtggaagcccagtcttgagttcttgtcttgttaccatttaaaattgacatttaattttcaaatcactgttggtgcctaatcacttaagttattaatttattctgttgtattcttttttttaaattgtaacatatttatccggtgggtgggacaggagtgtgttcaagtgggtcatgtttttgctgtggtgacacatggtacaggcttggagcttgcaggtccctttctactgtggtgttggagcaggacaataaagtccactagaaatgcacccc

SEQ ID NO: 12782 - DNA, 6092 bp, Homo sapiens
  source 1..6092: mol_type = unassigned DNA
gagctgcgcaccgccggccgctgccccagctgcccgagcccgcgccctcgtccgcgcgacccggcggggggctccaggccggcagcatgagcggcggcggcgacgtggtgtgcaccggctggctgaggaaatcgcctcccgagaagaagttgaggcgctatgcctggaagaaacgctggtttatcctgcggagtggccggatgagcggtgacccagatgttctggaatactacaagaacgatcactccaagaagcctctgcggatcatcaacctgaacttctgtgagcaggtagatgcaggcctgacctttaacaagaaggagctgcaggatagttttgtgtttgacatcaagaccagtgaacgcaccttttacctggtggctgagacagaagaggacatgaataagtgggtccagagcatctgccagatctgtggcttcaatcaggctgaggagagcacagactccctgagaaatgtttcctcagccggtcatggcccccgctcttctccagctgagctcagcagctctagccagcaccttctccgagagcgcaagtcctcagccccatcacactccagccagccaactctgttcacgtttgaaccccctgtgtcaaaccacatgcagcccaccttgtccaccagcgcacctcaggagtatctctacttgcaccagtgcataagccgaagagcagaaaatgcaaggagtgccagcttctctcagggcaccagagcctcttttctcatgaggagtgacacagctgtacaaaaacttgcccagggcaatggacactgtgtcaacgggatcagtggtcaagtccatggcttctatagccttcccaagccgagccggcacaatacagaattcagagacagtacctacgacctcccccgcagcctggcctcccatggccacaccaagggcagcctcacaggctccgagacagataatgaggatgtgtacaccttcaagacgcccagcaacaccctgtgcagggagttcggggacctcctggtagacaatatggatgttccggccaccccactctcagcctaccagatccctaggacattcactctggacaaaaaccacaatgccatgacagtggccactcctggggactcagccatagctcccccaccccgcccccccaagccaagtcaggcagaaacacctcgatggggcagtcctcagcagagaccgccaatcagtgaaaatagcagatctgtcgctgccaccatccccagacgcaacaccctccctgcaatggacaacagccgacttcaccgagcttcttcctgtgagacctacgagtacccacagcgtggtggagagagtgcaggccggtctgctgaatccatgagtgatggagttggctctttcctgccagggaaaatgattgtgggccgatcggacagcaccaattctgaagacaactatgtgcccatgaatccaggttcttccaccctgttggccatggaacgagcaggtgataattcccagagcgtctacatcccaatgagcccaggggcccatcactttgactcacttggctacccatcaacaacccttcctgtgcaccgaggccccagcagaggaagtgagattcagccaccccctgtcaaccgcaacctcaaacctgatcggaaagcaaagccaacaccacttgacctgaggaacaacaccgtcatcgatgaactccccttcaagtcacctatcaccaagtcttggtctagggccaaccacaccttcaactccagctcctcccagtactgccgccccatctccacccagagcatcaccagcacagactcaggagacagcgaagagaactatgtccctatgcaaaacccagtgtctgcatctcccgttcccagtggcacgaacagtcctgcccctaagaagagcaccggcagcgttgattatctggccctggacttccagccgagctccccaagcccccaccgcaagccatctacttcatccgtcacctctgatgagaaggtggactacgttcaggtggacaaggagaagacccaggccctgcagaacaccatgcaggagtggacagacgtgcggcagtcctcagagccttccaagggtgccaagctgtgatgagagggccaccgcagagcccaggaggcagcatctccagagctggcccttcccatctcccctctcccctctcccgttcttcctcccatccacctcctctctactctgccagtctcagccttcaaagcacttgacatcagggaccctgaacccttcccctgggaggtgagggcctgatcaaggcacctcctctgcccactcggggcccagctgtgatttttatcagtaatggccatgcctccacccaccttagttaggagctacttccaaaaagcatccttcagcctcttcctgtcctttagacctgactctctaccagatgtttggagggaagggctggggctctgagccagattccacacctcacgttcagtcacagccctcagctatcttccctccggccactgggctacctctccttcagtcccagaagacaagtctcaccaacccagggagtcaaggaccagcaaaccaaagtggataatggactttttcattcctgtttttcttggcaggagagaagcaaggccactaaaagaggagatggtggagacggaggctcagcagtggtcttgaggggtaaaggacttagatgcccagatgaagagggaaagctgacatctgcagggaacccactttgaggctgaggccatggcaggacagctgctgtggggtgcagaggcagaagatgaaggacaaaaggaagggaaaactgatggccaacctagagcagcaaggagcagggcttggagctcgggtggtggagatgacaaggacactgtggggtctgggtccccagaactctggagctacaggccactctaggcccaagggctagtcctcttccccagtcccctcagaggcccccgccagccccaccttgaaagcagcatacaggggaaggcttggaccaagctgggcgaccaagcacatggggcaggaacacatggtaaaggggtggggaatatgggagggagtgtggtgtggatgggggtgatgcagggactgaggggaaccctgggacaggcacaggctgggcagaggcacagggcagtgcaggggactctgcagtggggtcgggaagtgagtttctttgcagtgagcagtgcagtggaagtcgggcacagaggtagcagacagatgtgaagcagtggtgaaggccatgtagcaagtggggaaatacatccaaagggcctgggagttggggggtgcccaacgcaatccttgggggtgcagggtggagcagaaagtgaaggagggacacgtgcaagagtggtgtgcatggtggtgtgacatgaggaccgttcctaggatgggacagtgggtcaggcaggacaaggagaaagcagggcagaatgatgcctagaggaccacatcaggcatggctgacagcttgtgcccatgggctgtggcgtatgtcagatcgcagggtaggaacgagtctggcctggtgccggcccagtgtttcctcagctcatccgccctctgttgctccctagcattccaggagccatcttggactctcctccccaggtttgaaaggccatcagattagcagggacggggtgtagggcatcacccaaggttccttctcttaaactaagggtgggggatctgaatgtttttatgttgactgttcttgactaaattttcaagagtttcagaagcaacaggacagaccagacgtttcattctaccctggggcgaacagaacttcttcctcccaaacaatgacttcctgccatgtttgatggggacagctaccactgtcctctgcccccattcccctttcagctcccatgagcatgcatagttcaccagaccaatggcctagccattctctaagtcccatcctggaagaagttatttcttcaagagctgcacctctcctcctagcattagtttagatcaactcaaggagtatttattaatggctgctgtctccagtttctggggttaagcactaaggacacaagaatcaatcagaccttctccctgaacttaagatagccacaatcagaaaaaggacaaggacatgagacagtggtgatggccatcagacagagacttcaaatgctgatggagggcagaggaagtacttagggaggttggtgtcagaggcaggagtgggggatcagggaaggtggattctaggaaaagggagtgcctgaggtaggccttagaaggggatgagtcagatttttacagaggaggagggcagggcttgggtccagtggaggaagaaggaaggagaggcttggaaagccttgtgtcttgggaacaaaaggcctttgagcatatgggtccagccactcagaagtgtaggggccatgccttggtgttccaataagtgaatggaagcagtggtggtagctacactgggcagagttggcagggtgctggttcactctgcccagccctgaatgtgtgccttaaaggccccctacaaggggccccatacgacagagcttttaactggtgccttccctgtacccgcagcagccacaagtgggcccagactattgcagcctcccataaacatgtgagcatgttctgagtgtgccatgatgtgagtggacctggctggaatcttcggagagcgactgaggtgttcaaatcgaatctcccaggaggcttccttccagccccctattctggtaactaccaggaggcttccttccagccccctattctggtaactaccaaaatccctcgggtgcaagtgtaggggtagagatggaaggatgagaggtgaaattgaccttttgaaagcaaagctctggctcacaggccccaaactaccagccgtatctagcatatccccaccctccacccactacctcctccaacaaaggagtcaactcagttgaaaaaactggtcctttggcctatccatgggtcaaagtccacctctcctgggggcctggagaggactgagcctacggaaaggggataccttcccactcagcactgcttcacacaggccccctgcctggggctctccaaggagccttcttcacccacttccagctccacttctgcaaggttaagtcaagtgagaacgatgagaaatagggagatggtgtctccttaagtccttgatctgcctgtctgtggaatgggaggttggattagctgcgctgaggtcccatccacagctggtgctcagctgcttgaaggggagactccctcctctgtaacttctttctgggggattggggtgggcagtacctatccccagtcccctcctagcttgactttagtggtttccaatgtagaagttaacaaagtatgccccattcctgtgacaaaagcacaaccattctgaagttactggagcatgggctcagctcatcctccctctggccccttctcccatggggacatctcggcccagcacccctatcccatttccagagttcttccttccccatctgggccttcataaaatgcaggggaagccagactggtctcaggagcgctaaagcccttccgtggggggtcgtctttctgggactagccctgctgtttaggacctgggaccacaatggggtacctgccgagggggtccccaagagatccaggctgtcatgtgatttatggtggcatgtgttgtgtatttgttggctacttgtgtcttgaaatctagaattatttcacgcagaattgtcactgtttgtcaggaagagaaaatgggctagtggaagcccagtcttgagttcttgtcttgttaccatttaaaattgacatttaattttcaaatcactgttggtgcctaatcacttaagttattaatttattctgttgtattcttttttttaaattgtaacatatttatccggtgggtgggacaggagtgtgttcaagtgggtcatgtttttgctgtggtgacacatggtacaggcttggagcttgcaggtccctttctactgtggtgttggagcaggacaataaagtccactagaaatgcacccc

SEQ ID NO: 12783 - DNA, 543 bp, Homo sapiens
  source 1..543: mol_type = unassigned DNA
gtagtaggtccgtctcctcctcccgccgagggacgccagagttaaggagcttcttgctgggaaggggtccctcctttcagccggaacctgacccgcagaatgtatcggaaatgcctggaagaaacgctggtttatcctgcggagtggccggatgagcggtgacccagatgttctggaatactacaagaacgatcactccaagaagcctctgcggatcatcaacctgaacttctgtgagcaggtagatgcaggcctgacctttaacaagaaggagctgcaggatagttttgtgtttgacatcaagaccagtgaacgcaccttttacctggtggctgagacagaagaggacatgaataagtgggtccagagcatctgccagatctgtggcttcaatcaggctgaggagagcacagactccctgagaaatgtttcctcagccggtcatggcccccgctcttctccagctgagctcagcagctctagccagcaccttctccgagagcgcaagtcctcagccccatcacactccagccagccaactct

SEQ ID NO: 12784 - DNA, 567 bp, Homo sapiens
  source 1..567: mol_type = unassigned DNA
agctgcccgagcccgcgccctcgtccgcgcgacccggcggggggctccaggccggcagcatgagcggcggcggcgacgtggtgtgcaccggctggctgaggaaatcgcctcccgagaagaagttgaggcgctattaccttctgtctgacttcaaccccacatctgcttgacaagaattaactcaaatatctcttcttaacacctacctgattctggcatacagcctggaagaaacgctggtttatcctgcggagtggccggatgagcggtgacccagatgttctggaatactacaagaacgatcactccaagaagcctctgcggatcatcaacctgaacttctgtgagcaggtagatgcaggcctgacctttaacaagaaggagctgcaggatagttttgtgtttgacatcaagaccagtgaacgcaccttttacctggtggctgagacagaagaggacatgaataagtgggtccagagcatctgccagatctgtggcttcaatcaggctgaggagagcacagactccctgagaaatgtttcctcagccggtcatggcccccgctct

SEQ ID NO: 12785 - DNA, 3893 bp, Homo sapiens
  source 1..3893: mol_type = unassigned DNA
acagactgcagggctgactagggttagtttggaggagggagtaagaggtggggaggaggaggcacagttaatggatctgtaaacttgcaccctctttcagagtggtacatggaagacagcacaaagtggatccatactctgaaatgcagtaactctgatgcttgaatttgtctcccttcttgccagaaaggattctaataactcggtgtcaaagccaagacataaactcaaccccttctcttccaaaagcttcacgttacagcatggaagctgttgccaagtttgatttcactgcttcaggtgaggatgaactgagctttcacactggagatgttttgaagattttaagtaaccaagaggagtggtttaaggcggagcttgggagccaggaaggatatgtgcccaagaatttcatagacatccagtttcccaaatggtttcacgaaggcctctctcgacaccaggcagagaacttactcatgggcaaggaggttggcttcttcatcatccgggccagccagagctccccaggggacttctccatctctgtcaggcatgaggatgacgttcaacacttcaaggtcatgcgagacaacaagggtaattactttctgtggactgagaagtttccatccctaaataagctggtagactactacaggacaaattccatctccagacagaagcagatcttccttagagacagaacccgagaagaccagggtcaccggggcaacagcctggaccggaggtcccagggaggcccacacctcagtggggctgtgggagaagaaatccgaccttcgatgaaccggaagctgtcggatcaccccccgacccttcccctgcagcagcaccagcaccagccacagcctccgcaatatgccccagcgccccagcagctgcagcagcccccacagcagcgatatctgcagcaccaccatttccaccaggaacgccgaggaggcagccttgacataaatgatgggcattgtggcaccggcttgggcagtgaaatgaatgcggccctcatgcatcggagacacacagacccagtgcagctccaggcggcagggcgagtgcggtgggcccgggcgctgtatgactttgaggccctggaggatgacgagctggggttccacagcggggaggtggtggaggtcctggatagctccaacccatcctggtggaccggccgcctgcacaacaagctgggcctcttccctgccaactacgtggcacccatgacccgataaactcttcaggggacagaagctttttgtctggagctgcccacaagaaagagggcaaggaaaaaaggctggactccatgactatatatacatacatctatctacatctgcctgtgtacacacacaactttttatactagtaatttattggcaattgggctggtaattagttgatgcaaaagggaactcaggtggagaataatattgacacttgcttttctgcccccctcaggggtgtgtggaaggcagtgggggagttgggaggggggcagggaaatgaaatggagttttgtcctggccttcagctgtcactgcttcctccttgtcttgggaattttcacggagaacagctaagcagagaccacacctcggcactggacacagaacaacagggtggggttgaacttggtggggcacgttctagctgacctgcaagccccgctcacctggagggcttgcagagcagctctcctcctgttctccaaggggtgggcactgttgcattaggaattaaggtgcagcccagtgctgcgggcagccaagcgagtctgagcggggatgtgaaggcaggacggggttggagagaccctgcctgtgcaaggctggcctcctagtcaacacctagctgagacattcatctctgttcaaattaatattccttgggtctttcaaatgaatgtttcaatgtgaggagcgaagtactgggaaatcgagggattttccacaatccccaagcagcttactcagtggaacctctgtttccccagctatgaaggaaatagcatcctacattccgtaaagtgcttgaagaagctctagctgagaatgctgaattttacagtcattgttttatggttacaagggtatgtcttcagggctctgttcattttccctcttgattttctcttttgaagatgccttgcccagtggcatggaaagaagcccacttgatgataggagcctgactatgaattgattgactaaacatgaccccaggtggaagctggctttgacaccagcttcctgttcagtctgaccactgctgtcctcctgctgcccaagagttgcacctggagcaaggaaccccaccatggctgtcgctctccatcccatcacgctagaatcatgtgtccaagggctcactctggaggtgcacagcacaggtcagcctggccaggggcgaaggagacagtagagaggaagctcagggccttaggggaggccgggtgcaaacccgttctgcaccaagtgcactcggagtttgtgggtatgggtgtgtacccctgcaggtgtgcacatgtgtgcttgcacgcacatatttgtgcactcctgtgtgtatacatgtgtgcttgtgtatgcatatgtgtgcattcctgcatgtgtggacatgtgcgtgcatgcatctgtgtgtctgtgtgtgtgctgagacaggaaagggggtgaaagtgttggtgagggagcctggaagttttctcttccccaacctctcttgctctaaggagggatggggttgggggcagccgttattgaaggtgatcggagaagaaagattttctgactcagaagtgactgccagtgtagcacaagcagtgtcccttgtgactgtgattctacagttctctgatcctcatgtttcctttagaggaaagaggaaaaaaggaactctgtggtgggtattgggagggaaaagaaaatagcctggtggaggcaggagggagtcgagtgtgagtaaggagcacctgcagcttttggaagtgaaagcagagagagggaaaggtagctaagacatccaggaggatcaaggggcagcgtgagaggcacagggggaggaaagggagagggtgagtggggccagggaagagaacggtgtggagttggtgggcagatggtgcaggaggagggctgggcagtggggagaggaagaatcagagcagagaaaccgctgctgcggaaggcagggagcaaagaagcataaggaaaagaacaggagaaagaacaaaggcagagaagacctcctcagctattttggtgctaggtaatgtgaaatgctgcagtaaataaaagccataagtaatgtttgattttacagtatttacaaaccatatgctttaaacagcccacaaactccatccagttgtctgatgatgtgggaggaccagctctagttagacggaggtatgtgattcgattctggtggagactttgtgccttgaaaggcttctcaggaaagcagtaataaaacaaagtgtccttgtttggccaggccgtgtctggtgtctgcgttgcatacccctcaggtagagagtgagaacgagaccagggggtgacaggggtcatcggcctgcaggagctgaccccgtaggcaggcggtatgagcagagctttcagaacccctggagctcggtgttctgttgtagcaaaagctactgaagagtattttgtactgagatgccaaagcatctttcccttgctcatcagcctccattcagaaggaagcgggaaagtcacccaaaccacctacaaggaatgagggctcttagcggccaggtaaagaggacaagaaccaaactgtccacattatggaggggagggggaaagagagctcaacccccctcagcctctggtgctgccagggggagc

SEQ ID NO: 12786 - DNA, 1066 bp, Homo sapiens
  source 1..1066: mol_type = unassigned DNA
gagttcctcaatcgctggctctcaggagctgtttggaaaattcgttgccatgcatgagtcgggggattggttttttttccactggaaattgttaatggggactgcattagcggccccttatcgctttgcctgatagagagacagcaggttcgcccaaacaattctggaaccctgatcactgccaattaggggagtattgtctggctgacataatcaaatggtttcacgaaggcctctctcgacaccaggcagagaacttactcatgggcaaggaggttggcttcttcatcatccgggccagccagagctccccaggggacttctccatctctgtcagggtcaccggggcaacagcctggaccggaggtcccagggaggcccacacctcagtggggctgtgggagaagaaatccgaccttcgatgaaccggaagctgtcggatcaccccccgacccttcccctgcagcagcaccagcaccagccacagcctccgcaatatgccccagcgccccagcagctgcagcagcccccacagcagcgatatctgcagcaccaccatttccaccaggaacgccgaggaggcagccttgacataaatgatgggcattgtggcaccggcttgggcagtgaaatgaatgcggccctcatgcatcggagacacacagacccagtgcagctccaggcggcagggcgagtgcggtgggcccgggcgctgtatgactttgaggccctggaggatgacgagctggggttccacagcggggaggtggtggaggtcctggatagctccaacccatcctggtggaccggccgcctgcacaacaagctgggcctcttccctgccaactacgtggcacccatgacccgataaactcttcaggggacagaagctttttgtctggagctgcccacaagaaagagggcaaggaaaaaaggctggactccatgactatatatacatacatctatctacatctgcctgtgtacacacacaactttttatactagtaatttattggcaattgggctggtaattagttgatgcaaaagggaactcaggtggaga

SEQ ID NO: 12787 - DNA, 1304 bp, Homo sapiens
  source 1..1304: mol_type = unassigned DNA
gatgatgaaaggagaagggaaaggctgcggatggccttcatttcctgctcctggcatctggggattccgagaatgatcccaggacctagatcctatagattccggcagctcttcctgcaaacacaagcccttgttgtgtgcctgagccttgctctccggcctggagacatccatctgcccactctcctaggaactgctgattaccaggaagcaccatcggctctgctgccctccccctggcagagaggcacaatgaccacattatttctcttccagcttcacgttacagcatggaagctgttgccaagtttgatttcactgcttcaggtgaggatgaactgagctttcacactggagatgttttgaagattttaagtaaccaagaggagtggtttaaggcggagcttgggagccaggaaggatatgtgcccaagaatttcatagacatccagtttcccaaatggtttcacgaaggcctctctcgacaccaggcagagaacttactcatgggcaaggaggttggcttcttcatcatccgggccagccagagctccccaggggacttctccatctctgtcaggcatgaggatgacgttcaacacttcaaggtcatgcgagacaacaagggtaattactttctgtggactgagaagtttccatccctaaataagctggtagactactacaggacaaattccatctccagacagaagcagatcttccttagagacagaacccgagaagaccagggtcaccggggcaacagcctggaccggaggtcccagggaggcccacacctcagtggggctgtgggagaagaaatccgaccttcgatgaaccggaagctgtcggatcaccccccgacccttcccctgcagcagcaccagcaccagccacagcctccgcaatatgccccagcgccccagcagctgcagcagcccccacagcagcgatatctgcagcaccaccatttccaccaggaacgccgaggaggcagccttgacataaatgatgggcattgtggcaccggcttgggcagtgaaatgaatgcggccctcatgcatcggagacacacagacccagtgcagctccaggcggcagggcgagtgcggtgggcccgggcgctgtatgactttgaggccctggaggatgacgagctggggttccacagcggggaggtggtggaggtcctggatagctccaacccatcctggtggaccggccgcctgcacaacaagctgggcctcttccctgccaactacgtggcacccatgacccgataaactcttcaggggacagaagct

SEQ ID NO: 12788 - DNA, 568 bp, Homo sapiens
  source 1..568: mol_type = unassigned DNA
aaaagtcataaaagcattctatgctggaccggttcgtgttaagtctgagttcctcaatcgctggctctcaggagctgtttggaaaattcgttgccatgcatgagtcgggggattggttttttttccactggaaattgttaatggggactgcattagcggccccttatcgctttgcctgatagagagacagcaggttcgcccaaacaattctggaaccctgatcactgccaattaggggagtattgtctggctgacataatcaacttcacgttacagcatggaagctgttgccaagtttgatttcactgcttcaggtgaggatgaactgagctttcacactggagatgttttgaagattttaagtaaccaagaggagtggtttaaggcggagcttgggagccaggaaggatatgtgcccaagaatttcatagacatccagtttcccaaatggtttcacgaaggcctctctcgacaccaggcagagaacttactcatgggcaaggaggttggcttcttcatcatccgggccagccagagctccccaggggacttctccatctctgtcagg

SEQ ID NO: 12789 - DNA, 1279 bp, Homo sapiens
  source 1..1279: mol_type = unassigned DNA
tttggaggagggagtaagaggtggggaggaggaggcacagttaatggatctgtaaacttgcaccctctttcagagtggtacatggaagacagcacaaagtggatccatactctgaaatgcagtaactctgatgcttgaatttgtctcccttcttgccagaaaggattctaataactcggtgtcaaagccaagacataaactcaaccccttctcttccaaaaggcatgaggatgacgttcaacacttcaaggtcatgcgagacaacaagggtaattactttctgtggactgagaagtttccatccctaaataagctggtagactactacaggacaaattccatctccagacagaagcagatcttccttagagacagaacccgagaagaccagggtcaccggggcaacagcctggaccggaggtcccagggaggcccacacctcagtggggctgtgggagaagaaatccgaccttcgatgaaccggaagctgtcggatcaccccccgacccttcccctgcagcagcaccagcaccagccacagcctccgcaatatgccccagcgccccagcagctgcagcagcccccacagcagcgatatctgcagcaccaccatttccaccaggaacgccgaggaggcagccttgacataaatgatgggcattgtggcaccggcttgggcagtgaaatgaatgcggccctcatgcatcggagacacacagacccagtgcagctccaggcggcagggcgagtgcggtgggcccgggcgctgtatgactttgaggccctggaggatgacgagctggggttccacagcggggaggtggtggaggtcctggatagctccaacccatcctggtggaccggccgcctgcacaacaagctgggcctcttccctgccaactacgtggcacccatgacccgataaactcttcaggggacagaagctttttgtctggagctgcccacaagaaagagggcaaggaaaaaaggctggactccatgactatatatacatacatctatctacatctgcctgtgtacacacacaactttttatactagtaatttattggcaattgggctggtaattagttgatgcaaaagggaactcaggtggagaataatattgacacttgcttttctgcccccctcaggggtgtgtggaaggcagtgggggagttgggaggggggcagggaaatgaaatggagttttgtcctggccttcagctgtcactgcttcctccttgtcttgggaattttcacggagaacagctaagca

SEQ ID NO: 12790 - DNA, 1100 bp, Homo sapiens
  source 1..1100: mol_type = unassigned DNA
acagactgcagggctgactagggttagtttggaggagggagtaagaggtggggaggaggaggcacagttaatggatctgtaaacttgcaccctctttcagagtggtacatggaagacagcacaaagtggatccatactctgaaatgcagtaactctgatgcttgaatttgtctcccttcttgccagaaaggattctaataactcggtgtcaaagccaagacataaactcaaccccttctcttccaaaagcttcacgttacagcatggaagctgttgccaagtttgatttcactgcttcaggtgaggatgaactgagctttcacactggagatgttttgaagattttaagtaaccaagaggagtggtttaaggcggagcttgggagccaggaaggatatgtgcccaagaatttcatagacatccagtttcccaagcatgaggatgacgttcaacacttcaaggtcatgcgagacaacaagggtaattactttctgtggactgagaagtttccatccctaaataagctggtagactactacaggacaaattccatctccagacagaagcagatcttccttagagacagaacccgagaagaccagggtcaccggggcaacagcctggaccggaggtcccagggaggcccacacctcagtggggctgtgggagaagaaatccgaccttcgatgaaccggaagctgtcggatcaccccccgacccttcccctgcagcagcaccagcaccagccacagcctccgcaatatgccccagcgccccagcagctgcagcagcccccacagcagcgatatctgcagcaccaccatttccaccaggaacgccgaggaggcagccttgacataaatgatgggcattgtggcaccggcttgggcagtgaaatgaatgcggccctcatgcatcggagacacacagacccagtgcagctccaggcggcagggcgagtgcggtgggcccgggcgctgtatgactttgaggccctggaggaggtcctggatagctccaacccatcctggtggaccggccgcctgcacaacaagctgggcctcttccctgccaactacgtggcacccatgacccgataa

SEQ ID NO: 12791 - DNA, 1393 bp, Homo sapiens
  source 1..1393: mol_type = unassigned DNA
agactgcagggctgactagggttagtttggaggagggagtaagaggtggggaggaggaggcacagttaatggatctgtaaacttgcaccctctttcagagtggtacatggaagacagcacaaagtggatccatactctgaaatgcagtaactctgatgcttgaatttgtctcccttcttgccagaaaggattctaataactcggtgtcaaagccaagacataaactcaaccccttctcttccaaaagatggtttcacgaaggcctctctcgacaccaggcagagaacttactcatgggcaaggaggttggcttcttcatcatccgggccagccagagctccccaggggacttctccatctctgtcaggcatgaggatgacgttcaacacttcaaggtcatgcgagacaacaagggtaattactttctgtggactgagaagtttccatccctaaataagctggtagactactacaggacaaattccatctccagacagaagcagatcttccttagagacagaacccgagaagaccagggtcaccggggcaacagcctggaccggaggtcccagggaggcccacacctcagtggggctgtgggagaagaaatccgaccttcgatgaaccggaagctgtcggatcaccccccgacccttcccctgcagcagcaccagcaccagccacagcctccgcaatatgccccagcgccccagcagctgcagcagcccccacagcagcgatatctgcagcaccaccatttccaccaggaacgccgaggaggcagccttgacataaatgatgggcattgtggcaccggcttgggcagtgaaatgaatgcggccctcatgcatcggagacacacagacccagtgcagctccaggcggcagggcgagtgcggtgggcccgggcgctgtatgactttgaggccctggaggatgacgagctggggttccacagcggggaggtggtggaggtcctggatagctccaacccatcctggtggaccggccgcctgcacaacaagctgggcctcttccctgccaactacgtggcacccatgacccgataaactcttcaggggacagaagctttttgtctggagctgcccacaagaaagagggcttgcagagcagctctcctcctgttctccaaggggtgggcactgttgcattaggaattaaggtgcagcccagtgctgcgggcagccaagcgagtctgagcggggatgtgaaggcaggacggggttggagagaccctgcctgtgcaaggctggcctcctagtcaacacctagctgagacattcatctctgttcaaattaatattccttgggtctttcaaatgaatgtttcaatgtgaggagcgaagtactgggaaatcgagggattttccac

SEQ ID NO: 12792 - DNA, 1425 bp, Homo sapiens
  source 1..1425: mol_type = unassigned DNA
attctatgctggaccggttcgtgttaagtctgagttcctcaatcgctggctctcaggagctgtttggaaaattcgttgccatgcatgagtcgggggattggttttttttccactggaaattgttaatggggactgcattagcggccccttatcgctttgcctgatagagagacagcaggttcgcccaaacaattctggaaccctgatcactgccaattaggggagtattgtctggctgacataatcaacttcacgttacagcatggaagctgttgccaagtttgatttcactgcttcaggtgaggatgaactgagctttcacactggagatgttttgaagatggtttcacgaaggcctctctcgacaccaggcagagaacttactcatgggcaaggaggttggcttcttcatcatccgggccagccagagctccccaggggacttctccatctctgtcaggcatgaggatgacgttcaacacttcaaggtcatgcgagacaacaagggtaattactttctgtggactgagaagtttccatccctaaataagctggtagactactacaggacaaattccatctccagacagaagcagatcttccttagagacagaacccgagaagaccagggtcaccggggcaacagcctggaccggaggtcccagggaggcccacacctcagtggggctgtgggagaagaaatccgaccttcgatgaaccggaagctgtcggatcaccccccgacccttcccctgcagcagcaccagcaccagccacagcctccgcaatatgccccagcgccccagcagctgcagcagcccccacagcagcgatatctgcagcaccaccatttccaccaggaacgccgaggaggcagccttgacataaatgatgggcattgtggcaccggcttgggcagtgaaatgaatgcggccctcatgcatcggagacacacagacccagtgcagctccaggcggcagggcgagtgcggtgggcccgggcgctgtatgactttgaggccctggaggatgacgagctggggttccacagcggggaggtggtggaggtcctggatagctccaacccatcctggtggaccggccgcctgcacaacaagctgggcctcttccctgccaactacgtggcacccatgacccgataaactcttcaggggacagaagctttttgtctggagctgcccacaagaaagagggcaaggaaaaaaggctggactccatgactatatatacatacatctatctacatctgcctgtgtacacacacaactttttatactagtaatttattggcaattgggctggtaattagttgatgcaaaagggaactcaggtggagaataatattgacacttgcttttctgcccccctcaggggtgtgtggaaggcagtgggggagttgggagg
